(19) United States
(12) Patent Application Publication
(10) Pub. No.: US 2026/0015401 A1
(43) Pub. Date: Jan. 15, 2026

(54) COMPOSITIONS AND METHODS COMPRISING EPITOPES AND POLYPEPTIDES

(71) Applicant: Angeles Therapeutics, Inc., Toluca Lake, CA (US)

(72) Inventor: Preet M Chaudhary, Toluca Lake, CA (US)

(21) Appl. No.: 19/265,972

(22) Filed: Jul. 10, 2025

Related U.S. Application Data
(60) Provisional application No. 63/669,238, filed on Jul. 10, 2024.

(51) Int. Cl. C07K 14/705; C07K 14/00; C07K 16/28

(52) U.S. Cl. CPC C07K 14/705; C07K 14/001; C07K 16/2803; C07K 2317/24; C07K 2317/565; C07K 2317/567; C07K 2319/40

(57) ABSTRACT

The application provides novel peptide epitope tags and recombinant polynucleotide, polypeptides, vectors, cells and compositions comprising the tags. The application also provides novel designs for synthetic antigen receptors (SARs), novel antigen binding domains, novel SAR constructs and novel methods for manufacturing of cell therapy products. These novel methods and compositions have broad uses in cellular therapy.

### CROSS REFERENCE TO RELATED APPLICATIONS

[0001] The application claims priority to U.S. Provisional Application No. 63/669,238, filed Jul. 10, 2024, the disclosures of which are incorporated entirely herein by reference.

### TECHNICAL FIELD

[0002] This invention relates to field of biotechnology, and more specifically, to novel epitope tags and fusion proteins containing these epitope tags.

### INCORPORATION BY REFERENCE OF SEQUENCE LISTING

[0003] This application contains a Sequence Listing which has been submitted electronically in XML format and is hereby incorporated by reference in its entirety. The Sequence Listing XML file, was created on Jul. 9, 2025, is named “Compositions and methods comprising epitopes and polypeptides”, and is 15,373 kilobytes in size.

### BACKGROUND OF THE INVENTION

[0004] Engineered immune cells such as CAR-T cells have revolutionized immunotherapy, but ensuring their safe and effective use requires improved control over cell selection, tracking, and eradication if needed. Researchers have turned to epitope tags—short peptide sequences inserted into cell-surface proteins—as universal handles for detection and purification. For example, small tags like c-Myc, HA, FLAG, or Strep-tag II peptides have been attached to CAR extracellular domains, allowing flow-cytometric detection with anti-tag antibodies. However, tag placement and immunogenicity are critical: an improperly placed tag can sterically hinder antigen binding or signaling, and foreign immunogenic sequences could provoke immune neutralization of the therapeutic cells. Furthermore, using such tags clinically requires a suitable antibody reagent, raising regulatory hurdles for clinical use.

[0005] Several groups have developed tag systems to facilitate selection and safety of gene-modified cells. One approach is to use truncated human surface proteins as “tags” recognized by existing clinical antibodies. A truncated epidermal growth factor receptor (tEGFR) retaining the cetuximab epitope has served as a non-immunogenic marker and elimination switch: transduced T cells expressing EGFRt can be purified and later depleted by administering cetuximab. However, its relatively large size (˜170 aa) is a major limitation. Similarly, the synthetic RQR8 tag (136 amino acids) combines an epitope from human CD34 (for immunomagnetic selection with anti-CD34) and a mimotope of CD20 (for deletion with rituximab). These large protein tags, while effective, require co-expression of a sizeable transgene, adding complexity and potential expression burden. Furthermore, because these tags are not physically linked to the CAR polypeptide, their expression may be selectively lost even when CAR expression is retained, undermining their reliability as markers or control elements.

[0006] Thus, there remains a need for a minimal, non-immunogenic epitope tag system with a clinically approved antibody for versatile cell engineering. Ideally, such a tag would be (i) small enough to insert into various proteins without disrupting function, (ii) “hypoimmunogenic” (minimizing new immune epitopes), and (iii) paired with a high-affinity antibody or a binding reagent that is safe for human use. To date, no FDA-approved cell therapy product includes a built-in peptide tag for these purposes, underscoring the novelty and utility of the present invention.

### SUMMARY

[0007] In one aspect, the present disclosure relates to methods and compositions comprising one or more novel peptide epitope(s) and variants thereof, and to related polynucleotides, polypeptides, vectors, cells, and compositions comprising or encoding the same. The peptide epitope(s), polynucleotides, polypeptides, vectors, cells, and compositions described herein may be utilized alone or in combination with one or more additional agents for the in vitro and/or in vivo detection, elimination, modulation, or selection of target biological materials, including, but not limited to, peptides, polypeptides, proteins, lipid-associated structures, viral particles, viral like particles, lipid nanoparticles and cells expressing said epitopes tags and tagged proteins. The compositions and methods of the present disclosure are further applicable for the prevention, diagnosis, and/or treatment of a variety of diseases and disorders, including neoplastic, autoimmune, infectious, and degenerative conditions.

[0008] In one aspect the present invention relates to a fusion protein comprising: (a) a peptide epitope; and (b) a polypeptide. The present invention also relates to a binding agent (e.g., an antibody) that specifically binds to the peptide comprised in the fusion protein of the invention. The present invention also relates to a fusion protein comprising a peptide that the antibody of the invention binds to. The present invention also relates to a complex comprising a fusion protein of the invention and an antibody of the invention. The present invention also relates to a nucleic acid encoding a fusion protein of the invention or an antibody of the invention. The present invention also relates to a vector comprising the nucleic acid of the invention. The present invention also relates to a host cell comprising a nucleic acid of the invention or a vector of the invention or expressing a fusion protein of the invention or the antibody of the invention. The present invention also relates to a use of an antibody of the invention for the detection, immobilization, isolation, or purification of a fusion protein of the invention. The present invention also relates to a method of detecting and/or isolating a fusion protein of the invention, comprising contacting the fusion protein with an antibody of the invention. Where the fusion protein of the invention comprises an antibody moiety, the present invention also relates to a method of isolation of a specific target of the antibody moiety. The present invention relates to a kit comprising a nucleic acid or a nucleic acid expression construct encoding a peptide as comprised in a fusion protein of the invention and optionally an antibody of the invention. In an embodiment, the fusion protein is a Synthetic Antigen Receptor.

[0009] In one embodiment, the invention provides a small (5-50 amino acids) peptide epitope tag, designated Small Hypoimmunogenic Antibody Recognizable Peptide Tag (SHARP-tag or SHARP-tag) and its variants along with methods and tools for its use in protein and cell engineering. In an example embodiment, the SHARP-tag comprises the amino acid sequence RSEDRY (SEQ ID NO:1) or RSEDRYR (SEQ ID NO: 2). In an example embodiment, the SHARP-tags comprise the amino acid sequence represented by SEQ ID NO: 1-123, 150-167, 251-440, 550-579, 631-650, 651-654, 656, 674-676, 686, 689, and 692-720. The SHARP-tags are specifically recognized by a binding moiety referred to as SABR (SHARP Antigen Binding Reagent). In an embodiment, SABR is an antibody, antibody fragment, bispecific antibody, antibody conjugate, a non-immunoglobulin antigen binding scaffold or functional variants thereof. In an example embodiment, SABR is an antibody drug conjugate Polatuzumab vedotin or functional variants thereof. In another example embodiment, SABR is a monoclonal antibody 2F2, SN8, 10D10, H2Mab-250 or functional variants thereof. Polatuzumab vedotin is an FDA-approved antibody with high affinity for specific SHARP-tags (e.g., SEQ ID NO: 1-23). H2Mab-250 is a Her2 specific monoclonal antibody that binds with high affinity to specific SHARP-tags (e.g., SEQ ID NO: 557-566) and their variants. The SHARP-tag/SABR system offers a compact, hypoimmunogenic marker for a wide array of biotechnology and therapeutic applications.

[0010] SHARP-tag and Variants: In an embodiment, the invention provides an epitope tag (or tag) peptide of 5 amino acids (SEQ ID NO: 560), 6 amino acids (SEQ ID NO: 1), 7 amino acids (SEQ ID NO: 2) or 8 amino acids (SEQ ID NO: 3) that is derived from sequences with low immunogenicity. In an embodiment, the SHARP-tags (e.g., SEQ ID NOs: 1-123, 150-167, 251-440, 550-579, 631-650, 651-654, 656, 674-676, 686, 689, and 692-720), and variants including those with conservative amino acid substitutions or length modifications, are included as long as they retain binding to a SABR.

[0011] The tag's small size and hydrophilic character allow it to be fused into proteins with minimal structural or functional disruption. In an embodiment, the tag is polar. In an embodiment, the tag is not hydrophobic. In an embodiment, the SHARP-tag is designed to lack T-cell epitopes and to minimize antibody responses when used in an appropriate host. In an embodiment, the tag is hypoimmunogenic, minimally immunogenic or nonimmunogenic. In an embodiment, the tag is derived from an endogenous protein. In an embodiment, the tag is identical in sequence to a region of an endogenous protein. In an embodiment, the SHARP-tag is located in and/or derived from the N-terminal, C-terminal, the juxta membrane region, and/or hinge or stalk regions of an endogenous protein. In an embodiment, the SHARP-tag is located in the extracellular region of an endogenous protein. In an embodiment, the endogenous protein is not an intracellular protein. In an embodiment, the endogenous protein is not a human nuclear protein. In an embodiment, the endogenous protein is a target antigen for drug development, optionally wherein the drug is a recombinant polypeptide (e.g., an antibody, antibody conjugate, non-immunoglobulin antigen binding scaffold etc.). In an embodiment, drug(s) targeting the endogenous protein are in pre-clinical and/or clinical development. In an embodiment, the endogenous protein is a cancer antigen, a cell surface marker, a cancer cell-associated antigen, a tumor antigen, an autoimmune-associated antigen, and/or a differentiation antigen. In an embodiment, the epitope tag (i.e., SHARP-tag) has more than 60% (e.g., 70%, 75%, 80%, 85%, 90%, 95%, 99%) sequence identity to a peptide located in the unfolded region of an endogenous protein. In an embodiment, the epitope tag (i.e., SHARP-tag) has more than 60% (e.g., 70%, 75%, 80%, 85%, 90%, 95%, 99%) sequence identity to a peptide located in the random coil or unstructured region of an endogenous protein. In an embodiment, the tag has more than 60% (e.g., 70%, 75%, 80%, 85%, 90%, 95%, 99%) sequence identity to a peptide located in the loops connecting secondary structure elements within an endogenous protein. In an embodiment the tag lacks a cysteine residue. In an embodiment the tag lacks a disulfide bond. In an embodiment, the tag lacks an Asn-X-Ser/Thr motif (where X can be any amino acid residue) that would create an N-linked glycosylation site. In an embodiment, the tag lacks an N-linked glycosylation site. In an embodiment, the tag has an α-helical secondary structure. In one embodiment, the tag is detectable with high sensitivity in vitro, in vivo, or in both contexts, thereby enabling robust identification, tracking, or quantification of the tagged molecule under experimental and/or physiological conditions. In an embodiment, the tag has less than 50% (e.g., 40%, 30%, 20%, 10%, 5%, 1%) sequence identity to a peptide located in a region of an endogenous protein that is a mutational hot-spot and/or is associated with a congenital or acquired disease (e.g., cancer). In an embodiment, the endogenous protein is human CD79b, Her2, Her3, CD19, CD20, CD22, CD30, CD33, CD34, CD123, FLT3, FGFR2, BCMA, CS1, CD38, GPRC5D, EGFR, Nectin-4, ROR1, TROP2, PD1, or PDL1. In an embodiment, the endogenous protein is not human CD79b, Her2, Her3, CD19, CD20, CD22, CD30, CD33, CD34, CD123, FLT3, FGFR2, BCMA, CS1, CD38, GPRC5D, EGFR, Nectin-4, ROR1, TROP2, PD1, or PDL1.

[0012] In an embodiment, the epitope tag according to the invention is a small, monomeric epitope tag of 5-50aa, preferably ≤15aa with minimal size. The sequence is preferably uncharged and hydrophilic at physiological pH and most preferably, it is devoid of residues prone to be modified by amine-reactive fixatives and cross-linkers. A further advantage of the epitope tag of the present invention is that it is not restricted in terms of localization (N, C or in between proteins). In addition, the epitope tags of the invention can be placed at the N- or C-terminus of a target protein or even in between two folded protein domains without compromising proper targeting and folding of target proteins. The epitope tag and antibody system presented here is suited for an exceptionally broad range of applications ranging from biotechnology to cell biology. A single tag can therefore simultaneously replace a great variety of traditional epitope tags.

[0013] SABR: In an embodiment, the invention provides a binding moiety, designated SABR, that specifically binds the SHARP-tag. In an embodiment, SABR (e.g., an antibody) is in complex with an epitope tag it specifically binds to. In an embodiment, an SABR is a monoclonal antibody that specifically binds a SHARP-tag. In one embodiment, SABR is a fully human or humanized antibody. In an embodiment, SABR has defined heavy (vH) and light (vL) chain variable sequences (e.g., heavy chain variable regions given as SEQ ID NO:899-919, 937-941, 2179-2182 and 2184; and light chain variable regions given as SEQ ID NO: 774-794, 808-818 and 2173-2178, and 2183). In an embodiment, SABR has a vH sequence represented by SEQ ID NO:922 and vL sequence represented by SEQ ID NO:797 and functional variants thereof. In an embodiment, SABR has a vH sequence represented by SEQ ID NO:966-970 and vL sequence represented by SEQ ID NO:846-847 and functional variants thereof. In an embodiment, the antibody may have up to 20 amino acid substitutions in framework regions to optimize properties (affinity, stability, reduced immunogenicity) while retaining the same antigen specificity. In an embodiment, SABR includes antibodies and their functional equivalents (including chimeric or de-immunized variants) that are or will be clinically approved, enabling their use in vivo. In an embodiment, SABR encompasses binding molecules such as Fab fragments, single-chain Fv (scFv), nanobodies, diabodies, and any antigen-binding fragment that recognizes the SHARP-tag. In an embodiment, SABR encompasses conjugated forms of binding reagents (including any fragment, variant, or derivative thereof), including antibody-drug conjugates (ADCs) carrying cytotoxic payloads (e.g., vedotin, calicheamicin), radioactive moiety (e.g., beta-emitters, Auger-emitters, conversion electron-emitters, alpha-emitters, and low photon energy-emitters), or a protein toxin (e.g., ricin or Pseudomonas exotoxin) for imaging or therapy, and binding reagents conjugated to magnetic beads or solid supports for cell isolation. In further embodiments, SABR is a polyclonal antibody. In certain embodiments, the epitope tag (i.e., SHARP-tag) is recognizable by an antibody or antibody fragment, such as a single-chain variable fragment (scFv), Fab, F(ab′)₂, or a derivative thereof, and/or by a non-immunoglobulin antigen-binding scaffold, including but not limited to a DARPIN, CENTYRIN, D-domain, an affibody, an affilin, an adnectin, an affitin, an obody, a repebody, a fynomer, an alphabody, an avimer, an atrimer, a pronectin, an anticalin, a kunitz domain, and an Armadillo repeat protein. In some embodiments, SABR is a monoclonal antibody (mAb) or a functional fragment or variant thereof. In some embodiments, SABR (e.g. antibody or antibody conjugate) is or will be approved by a regulatory authority (e.g., FDA) for administration to a subject, including a human or a non-human subject (e.g., dog, horse, cat, cow, camel, elephant etc.). In some embodiments, SABR (e.g. antibody or antibody conjugate) is or will be in clinical development for use in a human or a non-human subject. In some embodiments, the SABR (e.g. antibody or antibody conjugate) binds to SHARP-tag that is derived from an endogenous protein. In an embodiment, the tag is identical in sequence to a peptide present in an endogenous protein.

[0014] In an embodiment, the SABR binds to a SHARP-tag that has more than 60% identity to a peptide located in the unfolded region of an endogenous protein. In an embodiment, the SHARP-tag has more than 60% sequence identity to a peptide located in the random coil or unstructured region of an endogenous protein. In an embodiment, the tag has more than 60% sequence identity to a peptide located in the loops connecting secondary structure elements within an endogenous protein. In an embodiment the tag lacks a cysteine residue. In an embodiment the tag lacks a disulfide bond. In an embodiment, the tag lacks an Asn-X-Ser/Thr motif (where X can be any amino acid residue) that would create an N-linked glycosylation site. In an embodiment, the tag lacks an N-linked glycosylation site. In an embodiment, the tag has an α-helical secondary structure. In one embodiment, the tag is detectable with high sensitivity in vitro, in vivo, or in both contexts, thereby enabling robust identification, tracking, or quantification of the tagged molecule under experimental and/or physiological conditions. In an embodiment, the tag has less than 50% sequence identity to a peptide located in a region of an endogenous protein that is a mutational hot-spot and/or is associated with a congenital or acquired disease (e.g., cancer).

[0015] Bispecific and multi-specific antibodies comprising an SABR arm are also included—for example, a bispecific T-cell engager with one arm binding SHARP-tag and the other binding CD3 on T cells, to direct immune clearance of SHARP-tag expressing cells. In other embodiments, the antibody is a bispecific or multi-specific antibody, including but not limited to a bispecific T cell engager (e.g., BiTE), a Tri specific T cell engager, a bispecific NK cell engager (BiKE), or a Tri specific NK cell engager (TriKE).

[0016] SABR-based Synthetic Antigen Receptor (SARs) and Chimeric Receptors: In an embodiment, the variable regions of SABR can be incorporated into synthetic or chimeric receptors. The term SAR refers to any non-native antigen binding receptor and includes conventional CARs (e.g., second generation CAR), universal CAR, armored CARs, and next generation CARs (e.g., SIR, STAR, HIT, Ab-TCR, TFP, zSIR, z16SAR, CD16-SAR, uTCR-SAR, Tri-TAC). The term also includes recombinant TCR (T cell receptor). In an embodiment, a SAR comprises a single polypeptide chain. In an embodiment, a SAR comprises more than one polypeptide chains. For instance, SEQ ID NO:2301 presents an anti-SHARP-tag second generation CAR (chimeric antigen receptor) made by fusing the SABR scFv (vH-(G₄S linker)-vL) to signaling domains (e.g., CD3ζ, CD28 or 4-1BB). Examples of SABR based SARs are presented in SEQ ID NO: 2198-2300. Such a SAR enables one engineered cell to recognize and eliminate another cell bearing the SHARP-tag. This forms the basis of tag-directed cell elimination (a “CAR-on-CAR” or anti-tag CAR system for safety), wherein a reserve T cell product expressing an SABR-CAR could be deployed to eradicate SHARP-tagged cells if needed. Likewise, SABR's binding domains can be used in chimeric bispecific receptors or other fusion proteins for targeted delivery.

[0017] Tagged Polypeptides (Fusion Proteins): A broad range of polypeptides comprising the peptide tag (i.e., SHARP-tag) are covered. The tag can be fused at the N-terminus, C-terminus, or internally (e.g., in a flexible loop or linker region) of a protein of interest. In an embodiment, the protein of interest (i.e. polypeptide) to which the tag is attached is a globular protein, a membrane protein, a fibrous protein, or natively unfolded protein, or is a subunit of a globular protein, a membrane protein, a fibrous protein, or natively unfolded protein. In an embodiment, the polypeptide to which the tag is attached comprises at least one protein domain. In an embodiment, the peptide tag is fused to the polypeptide at a position that is located outside the at least one protein domain. In an embodiment, fusion protein is in complex with a binding partner that specifically binds to the peptide tag comprised in the fusion protein. In an embodiment, the invention provides a fusion protein comprising a peptide that the SABR binds to. The invention also provides a complex comprising (a) a fusion protein; and (b) an antibody; In an embodiment, fusion protein comprises an antibody. Example categories include the following.

[0018] Synthetic Antigen Receptors (SARs): In an embodiment, all generations of CARs (1st generation CAR with CD3ζ only, 2nd generation CAR with one co-stimulatory domain, 3rd generation CAR with multiple costimulatory domain, and armored CARs such as those secreting cytokines, and next generation CARs that provide physiological signaling such as SIR, STAR, HIT, zSIR, z16SAR, TFP, TCR, uTCR-SAR etc.) can incorporate the SHARP-tag. The tag can be placed in the extracellular region—for instance, at the N-terminus before the antigen binding domain (e.g., scFv, vHH, vL, or vH domain etc.), within the scFv linker, in the hinge/spacer, or proximal to the transmembrane domain—to ensure surface exposure. One or more copies of SHARP-tags may be present on one or more chains of a SAR. Examples of polynucleotides encoding TAG-SARs comprising the SHARP-tags described herein are provided in SEQ ID NO (DNA): 7708-8703.

[0019] Monoclonal Antibodies and Fragments: Therapeutic or diagnostic antibodies can be engineered to include SHARP-tag, for example, in a flexible loop of the heavy chain constant region or as a C-terminal or N-terminal tag or in the constant regions). This allows such antibodies to be tracked or pulled down with SABR. Moreover, biotherapeutics like antibody-drug conjugates or bispecific antibodies can carry SHARP-tag for quality control or dual-binding functionality.

[0020] Cytokines and Chemokines: In an embodiment, immune modulatory proteins (e.g., IL-2, IL-15, interferons) and chemokines can be fused with SHARP-tag. Tagged cytokines can be detected in complex biological fluids using SABR or removed if necessary (for example, a SHARP-tagged IL-12 that can be neutralized or cleared by SABR in case of toxicity).

[0021] Receptors and Ligands: Any cell-surface receptor, co-receptor, or ligand protein (native or synthetic) can be modified to include SHARP-tag in an exposed extracellular loop or tail. For instance, a T cell receptor (TCR) or a synthetic Notch (synNotch) receptor could carry the tag for tracking engineered cells expressing these receptors.

[0022] Synthetic Fusion Proteins: This includes designer molecules such as “switch receptors” or “suicide proteins” that incorporate the SHARP-tag. For example, a fusion of SHARP-tag to a transmembrane anchor can serve as a stand-alone marker/suicide protein on the cell surface (analogous to RQR8 or truncated EGFR, but much smaller). Such a protein provides no signaling function of its own but permits selection (via SABR-coated beads) and deletion of the cell (via SABR-ADC or SABR-engaging effector cells). Another example is a multipurpose switch protein combining SHARP-tag with a cell-growth or death signal: e.g., a SHARP-tag fused to a co-stimulatory domain that can deliver a proliferative signal when crosslinked by SABR, or a SHARP-tag fused to an inducible caspase domain that triggers apoptosis upon SABR-mediated aggregation. These embodiments illustrate the flexibility of the tag in constructing safety switches.

[0023] The invention also provides that naturally occurring protein or an endogenous protein or its isoform can serve as marker/suicide protein on the cell surface. In an embodiment, CD79b (SEQ ID NO (DNA): 3110 and SEQ ID NO (PRT): 660) and CD79b isoform-2 (SEQ ID NO (DNA): 3106 and SEQ ID NO (PRT):656) and variants thereof with up to 30 amino acid substitutions can serve as marker/suicide proteins.

[0024] In an embodiment, the invention provides a recombinant polypeptide comprising one or more copies of a tag (e.g., a SHARP-tag) where the tag is derived from an endogenous protein. In an embodiment, the tag is identical in sequence to a region of an endogenous protein. In an embodiment the tag lacks a cysteine residue. In an embodiment the tag lacks a disulfide bond. In an embodiment, the tag lacks an Asn-X-Ser/Thr motif (where X can be any amino acid residue) that would create an N-linked glycosylation site. In an embodiment, the tag lacks an N-linked glycosylation site. In an embodiment, the tag has an α-helical secondary structure. In an embodiment, the tag has less than 50% (e.g., 40%, 30%, 20%, 10%, 5%, 1%) sequence identity to a peptide located in a region of an endogenous protein that is a mutational hot-spot and/or is associated with a congenital or acquired disease (e.g., cancer). In an embodiment, the tag is 5, 6, 7, 8, 9, 10, 11, 12, 13, 14, 15, 16, 17, 18, 19, 20, or 30 amino acids in length. In an embodiment, the tag is recognized by a drug (e.g. antibody or a derivative) that is or will be approved by a regulatory agency for in vivo administration or is in clinical development for administration to a subject.

[0025] Genetic Constructs and Vectors: In an embodiment, nucleic acids encoding the SHARP-tag and the various tagged polypeptides are encompassed. This includes DNA and RNA sequences encoding the SHARP-tags (and variants) and vectors for expression. Viral vectors (such as lentiviral, retroviral, adenoviral, or AAV vectors) carrying SARs or other transgenes with SHARP-tag are provided, as well as non-viral vectors like plasmids and mRNA transcripts for transient expression. Packaging systems for viral production can also leverage the SHARP-tag: for instance, a viral envelope protein or a transduction particle can be engineered to display the SHARP-tag epitope, allowing virus-containing cells or virus-like particles (VLPs) to be immunoaffinity-purified or neutralized using SABR. The invention covers production host cells (e.g., retroviral packaging lines) engineered with SHARP-tag markers for lot release testing and safe elimination after vector production. In an embodiment, the invention provides an engineered viral particle, a virus-like particle (VLP) or a lipid nanoparticle that is modified to express a recombinant polypeptide comprising one or more copies of a tag (e.g., a SHARP-tag) where the tag has more than 60% sequence identity to a peptide present in an endogenous protein. In an embodiment the tag lacks a disulfide bond. In an embodiment, the tag lacks an Asn-X-Ser/Thr motif (where X can be any amino acid residue) that would create an N-linked glycosylation site. In an embodiment, the tag lacks an N-linked glycosylation site. In an embodiment, the tag has an α-helical secondary structure. In an embodiment, the tag has less than 50% sequence identity to a peptide located in a region of an endogenous protein that is a mutational hot-spot and/or is associated with a congenital or acquired disease (e.g., cancer). In an embodiment, the tag is 5 to 30 amino acids in length. In an embodiment, the tag is recognized by a drug (e.g. antibody or a derivative) that is or will be approved by a regulatory agency for in vivo administration or is in clinical development for administration to a subject.

[0026] Engineered Cells Expressing SHARP-tag Constructs: Any cell that is genetically modified to express a SHARP-tagged polypeptide is within the scope of the invention. Primary human T lymphocytes transduced to express SHARP-tagged SARs are a prime example, but the cell type is not limited to T cells. Natural Killer (NK) cells, NKT cells, macrophages, dendritic cells, or even stem cells (e.g., HSCs or iPSCs engineered to express a therapeutic transgene with SHARP-tag) can be included. The tag provides a universal marker on these cells for the following applications. In an embodiment, the invention provides an engineered cell or a recombinant cell that is genetically modified to express a recombinant polypeptide comprising one or more copies of a tag (e.g., a SHARP-tag) where the tag is derived from an endogenous protein. In an embodiment, the tag is identical in sequence to a region of an endogenous protein. In an embodiment, the epitope tag (i.e., SHARP-tag) is located in the extracellular region of an endogenous protein. In an embodiment, the endogenous protein is not an intracellular protein. In an embodiment, the epitope tag (i.e., SHARP-tag) is located in and/or derived from the N-terminal, C-terminal, the juxta membrane region, and/or hinge or stalk regions of an endogenous protein. In an embodiment, the epitope tag (i.e., SHARP-tag) is located in and/or derived from the unfolded region of an endogenous protein. In an embodiment, the epitope tag (i.e., SHARP-tag) is located in and/or derived from the random coil or unstructured region of an endogenous protein. In an embodiment, the tag is located in and/or derived from the loops connecting secondary structure elements within an endogenous protein. In an embodiment, the tag lacks a cysteine residue, a disulfide bond, an Asn-X-Ser/Thr motif and/or an N-linked glycosylation site. In an embodiment, the tag is 5 to 30 amino acids in length. In an embodiment, the tag is recognized by a drug (e.g. antibody or a derivative) that is or will be approved by a regulatory agency for in vivo administration or is in clinical development for administration to a subject.

[0027] Isolation & Enrichment: SHARP-tagged cells can be selectively enriched from a mixed population using SABR-based reagents. For example, magnetic beads coated with SABR will capture tagged cells for separation, analogous to clinical CD34-selection techniques. This allows high-purity recovery of transduced cells prior to patient infusion. In still further aspects, the present disclosure is directed to a method for activating a cell, such as a T cell (e.g., a non-natural T cell), comprising contacting a cell with a binding domain specific for a tag cassette, wherein the cell comprises a nucleic acid molecule encoding a fusion protein (e.g., a TAG-SAR; e.g., SEQ ID NO: 4808) according to this disclosure and the binding domain specific for the tag cassette is attached to a solid surface.

[0028] In some aspects, the present disclosure is directed to a method for identifying cell, such as a T cell, comprising contacting a sample comprising a cell, such as a T cell (e.g., a non-natural T cell) with a binding domain specific for a tag cassette, wherein the cell comprises a nucleic acid molecule encoding a fusion protein (e.g., a TAG-SAR) or a recombinant protein (e.g., CD79b; e.g., SEQ ID NO: 3107-3110) according to this disclosure and the binding domain (e.g., 2F2, SN8, huMA79b, or SEQ ID NO:1182-1190, 1198) specific for the tag cassette (i.e., SHARP-tag) comprises a detectable moiety, and detecting the presence of the cell expressing a fusion protein in the sample. In an example embodiment, T cells expressing a TAG-SAR (e.g., SEQ ID NO: 4808) comprising a tag (SEQ ID NO: 3124) could be detected using a Malibu-Glo reagent encoded by SEQ ID NO: 1198 that comprises a huMA79b scFv fused to NanoLuc (Nluc). For example, Jurkat-NFAT-GFP (JNG) cell clone 4827 that co-expresses a double chain SAR (040524-EZdX1; SEQ ID NO: 4938) with an IL15-CD79b isoform2 fusion protein (SEQ ID NO: 3116) was detected using the Malibu-Glo reagent encoded by SEQ ID NO: 1198. Finally, an antibody (e.g., 2F2, SN8 or SEQ ID NO:1182-1190) can substitute for the Malibu-Glo reagent for detection of T cells expressing the TAG-SAR or a recombinant protein comprising the tag.

[0029] In certain further aspects, the present disclosure is directed to a method for sorting a T cell, comprising contacting a sample comprising a non-natural T cell with a binding domain specific for a tag cassette, wherein the non-natural T cell comprises a nucleic acid molecule encoding a fusion protein (e.g., a TAG-SAR; e.g., SEQ ID NO: 4808) or a recombinant protein (e.g., CD79b; e.g., SEQ ID NO: 3107-3110) according to this disclosure and the binding domain specific (e.g., 2F2, SN8, huMA79b, or SEQ ID NO:1182-1190, 1198) for the tag cassette comprises a detectable moiety (e.g., FITC, Biotin etc.), and sorting the non-natural T cell expressing a fusion protein from other cells not expressing a fusion protein in the sample.

[0030] In certain aspects, the present disclosure is directed to a method for enriching or isolating a T cell, comprising contacting a sample comprising a non-natural T cell with a binding domain specific for a tag cassette, wherein the non-natural T cell comprises a nucleic acid molecule (e.g., a TAG-SAR; e.g., SEQ ID NO: 4808) encoding a fusion protein or a nucleic acid molecule (e.g., CD79b; e.g., SEQ ID NO: 3107-3110) encoding a recombinant protein according to this disclosure and the binding domain (e.g. 2F2 or SN8 antibody) specific for the tag cassette (e.g., SEQ ID NO: 1-11 comprises a detectable moiety. The method involves enriching for or isolating the non-natural T cell expressing a fusion protein away from other cells not expressing a fusion protein in the sample. Example of nucleic acids encoding the tags that can be used in various embodiments of the invention are provided in SEQ ID NO: 3101-3141.

[0031] In further aspects, the present disclosure is directed to a method for depleting certain T cells, comprising contacting a non-natural T cell with a binding domain (e.g., Polatuzumab vedotin) specific for a tag cassette (e.g., SEQ ID NO: 1-123), wherein the non-natural T cell comprises a nucleic acid molecule encoding a fusion protein (e.g., TAG-SAR) according to this disclosure and wherein binding of the binding domain (e.g., Polatuzumab vedotin) specific for the tag cassette leads to cell death of the T cells expressing a fusion protein.

[0032] In an embodiment, the invention provides a method of detecting, isolating, depleting or enriching a cell, wherein the cell has been modified to express a recombinant polypeptide comprising one or more copies of a tag (e.g., a SHARP-tag) wherein the tag is derived from an endogenous protein. In an embodiment, the epitope tag (i.e., SHARP-tag) is located in the extracellular region of an endogenous protein. In an embodiment, the endogenous protein is not an intracellular protein. In an embodiment, the tag is identical in sequence to a region of an endogenous protein. In an embodiment, the epitope tag (i.e., SHARP-tag) is located in and/or derived from the N-terminal, C-terminal, the juxta membrane region, and/or hinge or stalk regions of an endogenous protein. In an embodiment, the tag lacks a cysteine residue, a disulfide bond, an Asn-X-Ser/Thr motif and/or an N-linked glycosylation site. In an embodiment, the tag is recognized by a drug (e.g. antibody or a derivative) that is or will be approved by a regulatory agency for in vivo administration or is in clinical development for administration to a subject.

[0033] In Vitro Expansion & Activation: The SHARP-tag can serve as a target for stimulatory signals. Coating a culture surface or nanoparticle with SABR (or an anti-SHARP-tag Fc fusion) can crosslink SHARP-tagged SARs (e.g., CAR, SIR, zSIR, z16SAR etc.) on T cells, thereby activating them and promoting proliferation independent of native antigen. This provides a universal expansion method for engineered T cells, overcoming limitations of antigen-specific stimulation or non-specific mitogens. Unlike existing methods that require a specific antigen or feeder cells, an SABR-mediated stimulation is universally applicable to any SHARP-tagged SAR-T product.

[0034] In further aspects, the present disclosure is directed to a method for promoting cell proliferation or signaling, such as T cell proliferation, comprising contacting a cell (e.g., a non-natural T cell) with a binding domain specific for a tag cassette and optionally a growth factor cytokine for a time sufficient to allow cell growth, wherein the cell comprises a nucleic acid molecule encoding a fusion protein (e.g., a TAG-SAR; e.g., SEQ ID NO: 4808) according to this disclosure. In an embodiment, the cell expresses a SAR that binds to the tag (e.g., SHARP-tag) described herein. In an example embodiment, the SAR has a SEQ ID NO: 2448, or 2407). In an embodiment, the SAR targets more than one antigen. In an embodiment, the tag is derived from an endogenous protein. In an embodiment, the tag is identical in sequence to a region of an endogenous protein. In an embodiment, the binding domain specific for the tag cassette (i.e., SABR) is attached to a solid surface or a nanoparticle. In an alternate embodiment, the method further includes the addition of an agent that binds to SABR, i.e., an anti-SABR antibody.

[0035] In an alternate embodiment, the present disclosure further provides a method for providing a stimulatory or a proliferative signal to a cell expressing a SAR directed against the SHARP-tag by exposing the cells to the SHARP-tag or to a polypeptide comprising the SHARP-tag. In an embodiment, the SAR binds to a SHARP-tag represented by SEQ ID NO: 1-123 or a variant thereof. In an embodiment, the SAR binds to a SHARP-tag represented by SEQ ID NO: 1-123, 150-167, 251-440, 550-579, 631-650, 651-654, 656, 674-676, 686, 689, and 692-720. In an embodiment, the SAR binds to CD79b. In an embodiment, the SAR is double chain SAR or a multi-chain SAR. In an embodiment, the SAR is a single chain CAR. In an embodiment, the SAR is SIR, HC-SIR, zSIR, z16-SIR, CD16-SAR, Ab-TCR, TFP or a CAR. In an embodiment, the method is carried out in vitro. In an embodiment, the SAR comprises a vL region of an antibody comprising a sequence represented by SEQ ID NO: 774-782, 790, 792-794, 808-818, 2173-2178 and the complementary vH fragment of the antibody represented by SEQ ID NO:899-907, 915, 917-919, 937-941, 2179-2182 or variants of the forgoing sequences comprising up to 10 amino acid substitutions in the framework region. In an embodiment, the method is carried out in Vivo. In an embodiment, the method results in activation of cell signaling, optionally NFAT signaling, in the cell expressing the SAR. In an embodiment, the cell is an immune cell (e.g., T cell, NK cell, NKT cell, monocyte, macrophage, B cell, neutrophil, dendritic cell etc.). In an embodiment, the invention provides a method of providing a proliferative or activating signal to a cell, wherein the cell has been modified to express a recombinant polypeptide comprising one or more copies of a tag (e.g., a SHARP-tag) wherein the tag is derived from an endogenous protein. In an embodiment, the epitope tag (i.e., SHARP-tag) in the extracellular region of an endogenous protein. In an embodiment, the endogenous protein is not an intracellular protein. In an embodiment, the tag is identical in sequence to a region of an endogenous protein. In an embodiment, the epitope tag (i.e., SHARP-tag) in and/or derived from the N-terminal, C-terminal, the juxta membrane region, and/or hinge or stalk regions of an endogenous protein. In an embodiment, the epitope tag (i.e., SHARP-tag) in and/or derived from the unfolded region of an endogenous protein. In an embodiment, the epitope tag (i.e., SHARP-tag) in and/or derived from the random coil or unstructured region of an endogenous protein. In an embodiment, the tag in and/or derived from the loops connecting secondary structure elements within an endogenous protein. In an embodiment, the tag lacks a cysteine residue, a disulfide bond, an Asn-X-Ser/Thr motif and/or an N-linked glycosylation site.

[0036] Tracking & Detection: Once administered, cells expressing a SHARP-tag can be monitored in the patient's blood or tissues by leveraging the SABR. For instance, a fluorescently labeled SABR can be used in flow cytometry to detect and count SAR-T cells during therapy. Likewise, SABR can be used in immunohistochemistry or immuno-PET imaging (after radiolabeling with, e.g., Zirconium-89) to visualize the distribution and persistence of the cells. Having an invariant epitope on the engineered cells means a single detection reagent can be used across different SAR specificities. In an embodiment, the tag is derived from an endogenous protein. In an embodiment, the epitope tag (i.e., SHARP-tag) in the extracellular region of an endogenous protein. In an embodiment, the endogenous protein is not an intracellular protein.

[0037] In Vivo Regulation & Safety: A critical feature of the SHARP-tag platform is the ability to modulate or eliminate the engineered cells post-infusion. By administering SABR or its effector-modified variants, clinicians can partially or completely ablate SHARP-tagged cells if adverse events occur. For example, infusion of SABR IgG could opsonize the cells for Fc-mediated clearance (similar to rituximab clearing CD20+ B cells). For more potent elimination, an SABR-ADC carrying a toxin (such as a maytansinoid or saporin) can selectively kill SHARP-tagged cells. Additionally, an SABR×CD3 bispecific T cell engager can recruit the patient's endogenous T cells to attack the SHARP-tagged cells, functioning as a “kill switch” drug. Conversely, the tag can also be used to temporarily dampen cell activity without killing. Administering a non-cytotoxic bivalent SABR (or Fab fragment) in excess can saturate the SHARP-tag on CAR-T cells, blocking their antigen binding sterically or causing checkpoint-like inhibitory signaling if designed appropriately. Once the crisis (e.g., cytokine release syndrome) is managed, the blocking agent can be withdrawn to restore activity. Thus, the SHARP-tag platform enables fine-tuned on-demand control over cell therapies, enhancing safety.

[0038] The invention encompasses therapeutic and/or preventive methods where the activation of the engineered immune cells endowed with a TAG-SAR or expressing a SHARP-tagged polypeptide is modulated by depleting the cells by using a SABR (e.g., Polatuzumab vedotin, 2F2, SN8, 10D10, H3Mab-250 or variants thereof) that binds to the tag (i.e., SHARP-tag) of said TAG-SAR. In an embodiment, the method comprises administration of therapeutic effective amounts of the SABR (e.g., antibody) to the subject in need. In an embodiment, the subject has been administered TAG-SAR or T cells expressing a SHARP-tag. In an embodiment, the subject comprises T cells expressing a TAG-SAR (tagged SAR) or a SHAPR-Tag of the disclosure. In one aspect, the subject is diagnosed with one or more complications of immune effector cell therapy. In one aspect, the subject is at risk of developing one or more complications of immune effector cell therapy. Examples of complications of immune effector cell therapy include, but are not limited to, cytokine release syndrome (CRS), immune effector cell associated neurotoxicity syndrome (ICANS), Hemophagocytic lymphohistiocytosis (HLH), non-ICANS neurotoxicities (e.g., Parkinson's disease, cranial nerve palsies, peripheral neuropathies etc.), cytopenia and second T cell cancers. In an embodiment, the tag (i.e., SHAPR-Tag) is derived from an endogenous protein. In an embodiment, the tag is identical in sequence to a region of an endogenous protein. In an embodiment, the epitope tag (i.e., SHARP-tag) in the extracellular region of an endogenous protein. In an embodiment, the endogenous protein is not an intracellular protein. In an embodiment, the epitope tag (i.e., SHARP-tag) in and/or derived from the N-terminal, C-terminal, the juxta membrane region, and/or hinge or stalk regions of an endogenous protein. In an embodiment, the tag lacks a cysteine residue, a disulfide bond, an Asn-X-Ser/Thr motif and/or an N-linked glycosylation site. In an embodiment, the tag is recognized by a drug (i.e., SABR) that is or will be approved by a regulatory agency for in vivo administration or is in clinical development for administration to a subject.

[0039] In various embodiments, SABR is administered intravenously at a dose sufficient to occupy all SHARP-tag sites on the target cells. For example, a single dose of about 10 mg/kg SABR IgG may be given to substantially opsonize and deplete the tagged cells, whereas an SABR-drug conjugate can be administered at a lower dose (e.g., ˜0.1 mg/kg) due to higher potency. Dosage and frequency can be adjusted or repeated as needed to achieve partial or complete depletion of the tagged cells, as illustrated in the Examples below.

[0040] Multiplex Tagging and Combinatorial Use: The SHARP-tag can be used alone or in combination with other known tags and safety switches. Some embodiments may incorporate multiple copies of SHARP-tag in tandem to increase antibody avidity—for instance, two or three SHARP-tags spaced by linkers on a single protein, allowing bivalent SABR to bind more tightly (avidity effect) or to ensure at least one epitope is accessible if others are masked. In other embodiments, distinct epitope tags are co-expressed: an engineered cell might express both a SHARP-tag and another tag such as FLAG, Myc, His6, RQR8, CD34, or a rituximab/CD20 mimotope. Such combinations can leverage existing selection tools (e.g., clinically approved anti-CD34 reagents) alongside SABR, or provide redundancy (if one tag/antibody system fails or is immunologically neutralized, another can serve as backup). The co-expression of SHARP-tag with an established suicide gene (like inducible caspase-9) is also envisioned, creating layered safety systems. Importantly, incorporating SHARP-tag in various contexts does not interfere with these other tags; it can be added to existing constructs with minimal genetic footprint.

[0041] Exemplary Applications: The SHARP-tag platform is broadly applicable across medical domains.

[0042] Oncology: SHARP-tagged CAR-T cells targeting leukemia or solid tumor antigens can be controlled to improve safety (mitigating cytokine storm or off-tumor toxicity by partial depletion of cells) and to allow combination therapies. For example, a SHARP-tagged CAR-T for solid tumors can be given along with an SABR-conjugated imaging agent to track tumor infiltration in real time. SHARP-tag can also be used in oncolytic viruses or tumor vaccines to mark infected or modified cells for follow-up elimination.

[0043] Viral Infections: CAR-T cells or TCR-T cells targeting viral infections (HIV, HBV, CMV, etc.) can include SHARP-tag for post-therapy elimination once the infection is controlled, reducing long-term risk. Infected cells could potentially be tagged via gene therapy to serve as immunological targets—e.g., delivering SHARP-tag expression selectively to HIV-infected T cells, then using SABR-based effectors to clear those cells.

[0044] Autoimmune Diseases: CAR-Tregs (regulatory T cells engineered with CARs to suppress autoimmune reactions) could carry SHARP-tags to assure they can be ablated if they lose regulatory phenotype or cause immunosuppression beyond the therapeutic window. Similarly, cells engineered to express tolerogenic factors (IL-10, TGF-β) in autoimmune disorders might be given SHARP-tag as a safety off-switch.

[0045] Inflammatory and Other Disorders: Engineered cell therapies for conditions like graft-versus-host disease (GvHD), metabolic disorders, or regenerative medicine (e.g., mesenchymal stem cells delivered for tissue repair) can benefit from SHARP-tag monitoring and control. In one scenario, donor T cells in a transplant could be modified to express SHARP-tag so that if GvHD occurs, SABR can be administered to selectively deplete the donor T cells while sparing the patient's own cells.

[0046] The invention further provides a method for isolating a tag (i.e., SHARP-tag) suitable for biotechnology, genetic engineering and cell and gene therapy applications.

[0047] In one aspect the present invention relates to a fusion protein comprising: (a) a peptide epitope (i.e., SHARP-tag); and (b) a polypeptide. In an embodiment, the peptide epitope is derived from an endogenous protein and/or has at least 60% sequence identity to a region of an endogenous protein, optionally from the extracellular domain of the endogenous protein. In an embodiment, the peptide epitope is hydrophilic, polar, linear, 5 to 50 amino acids in length, hypoimmunogenic, located in the N-terminal, C-terminal or juxta membrane region of the extracellular domain of an endogenous protein, non-immunogenic, not an auto-antigen, not a nuclear protein, does not have at least 50% sequence identity to a region of an endogenous protein that is a hot-spot for mutations or has been associated with a congenital or acquired disease. In an embodiment, the peptide epitope has a sequence represented by SEQ ID NO: SEQ ID NO: 1-123, 150-167, 251-440, 550-579, 631-650, 651-654, 656, 674-676, 686, 689, and 692-720 or a functional variant thereof. The present invention also relates to a binding moiety or a SABR (e.g., an antibody) that specifically binds to the peptide comprised in the fusion protein of the invention. The present invention also relates to a fusion protein comprising a peptide that the SABR (e.g., an antibody) of the invention binds to. The present invention also relates to a complex comprising a fusion protein of the invention and the SABR (e.g., an antibody) of the invention. The present invention also relates to a nucleic acid encoding a fusion protein of the invention or SABR (e.g., an antibody) of the invention. The present invention also relates to a vector comprising the nucleic acid of the invention. The present invention also relates to a host cell comprising a nucleic acid of the invention or a vector of the invention or expressing a fusion protein of the invention or the SABR (e.g., an antibody) of the invention. The present invention also relates to a use of a SABR (e.g., an antibody) of the invention for the detection, immobilization, isolation, or purification of a fusion protein of the invention. The present invention also relates to a method of detecting a fusion protein of the invention, comprising contacting the fusion protein with an SABR (e.g., an antibody) of the invention. The present invention also relates to a method of isolating the fusion protein of the invention, comprising contacting the fusion protein with an antibody of the invention. Where the fusion protein of the invention comprises an antibody moiety, the present invention also relates to a method of isolation of a specific target of the antibody moiety. The present invention also relates a method of treatment comprising administration to the subject with a disease a therapeutic effective amount of a polynucleotide, polypeptide, vector, cell, composition and/or a SABR either alone or in combination with other agents. The present invention also relates to a pharmaceutical composition comprising a polynucleotide, polypeptide, vector, cell, and/or SABR and a suitable carrier. The present invention also relates to methods of detecting, tracking, enriching, controlling, regulating and depleting cells comprising the fusion proteins comprising the peptide tags. The present invention also relates to a kit comprising a nucleic acid or a nucleic acid expression construct encoding a peptide as comprised in a fusion protein of the invention and optionally an SABR (e.g., an antibody) of the invention.

[0048] Novel Antigen binding domains. The disclosure further provides novel antigen binding domains (e.g., scFv, vL, vH, vHH etc.) targeting different antigens. The novel vL fragments are represented by SEQ ID NO (PRT):722-847, the complementary vH fragments are represented by 848-967 (Tables 2 and 3). The disclosure also provides novel vHH domains, including humanized vHH, targeting different antigens. These vHH domains are represented by SEQ ID NO:580-607, and 1081-1163. The disclosure also provides fully human heavy chain variable domains (FHVH), which are represented by SEQ ID NO: 1164-1172. These novel antigen binding domains (e.g., scFv, vL, vH, vHH, FHVH etc.) can be used in the construction of SAR (e.g., SIR, zSIR, Ab-TCR, CAR, etc.), antibodies, scFv, bispecific antibodies, antibody drug conjugates and radio-labelled antibodies etc. The disclosure also provides novel antigen binding domains with at least 75% (e.g., 75%, 80%, 85%, 90%, 95%, 99%) amino acid sequence identity in the framework region to the novel antigen binding domains (e.g., vL, vH, vHH, FHVH etc.) described herein (Tables 2-4). The disclosure also provides novel antigen binding domains with up to 2 amino acid differences (i.e., 1, 2) in each of the CDRs of the novel antigen binding domains (e.g., vL, vH, vHH, FHVH etc.) provided in Tables 2-4. In an embodiment, the light chain complementary determining regions 1-3 (LC-CDR1-3) for these novel vL domains are as set forth in SEQ ID Nos: 6601-6726, 6970-7095, 7339-7464, respectively. In an embodiment, the heavy chain complementary determining regions 1-3 (HC-CDR1-3) for these novel vH domains are as set forth in SEQ ID Nos: 6727-6849, 7096-7218, 7465-7587, respectively. In an embodiment, the CDR1-3 for the novel vHH and FHVH domains are provided in SEQ ID NO:6850-6969, 7219-7338, 7588-7707, respectively. Example SAR comprising these novel antigen binding domains are provided in SEQ ID NO (DNA): 9039-9045.

[0049] Novel Viral Envelopes. The disclosure provides novel viral envelope proteins for pseudotyping of lentiviral vectors. The disclosure also provides tagged modified envelope proteins that express one or more copies of the epitope tags described herein (e.g., SHARP-tag).

[0050] Novel SARs including CD79b SARs: In another aspect, the disclosure provides novel SARs comprising novel polynucleotides, polypeptides targeting specific antigens. In one aspect the antigen is human CD79b. In other aspects the antigen is CD19, CD20, CD22, CD33, CD123, CLL1, BCMA, DLL3, IL13Ra2, PSMA, PSCA, STEAP2, CLDN6, CLDN-18.2, MSLN, GPC3, GCC, GPRC5D, Her2, NPM1c, mutant NPM1c, TAG72, MOG, IL23R, HLA-A2, CSF1R, p53, p53-R175H, p53-R248Q, FCRH5, TAJ/TNFRSF19, ROR1, or EGFRviii.

[0051] SAR activated by soluble ligand. In another aspect, the disclosure provides a double chain antigen receptor which shows activation by a soluble ligand. In an embodiment, the receptor is not a natural receptor, e.g., a natural TCR. In an embodiment, the receptor is a synthetic or a non-natural receptor. In an embodiment, the receptor is a synthetic antigen receptor (SAR). In an embodiment, the receptor has the design of a SIR, cTCR, Ab-TCR, zSIR, HIT, STAR, z16SAR, z16SAR. In an embodiment, the receptor comprises at least one extracellular domain and at least one hydrophobic domain. In an embodiment, the receptor is a dimer of two polypeptide chains. In an embodiment, the receptor comprises vL and vH fragments as the antigen binding domain. In an embodiment, the vL and vH fragments are present on two polypeptide chains of the double chain receptor and form a Fv fragment that can bind to the cognate ligand. In an embodiment, the ligand is a peptide tag or polypeptide. In an embodiment, the peptide tag is between 5-10, 6-11, 6-13, 5-10, 4-10, 7-16, 8-17 amino acid residues in length. In an embodiment, the peptide tag forms a linear epitope that does not rely on tertiary structure. In an embodiment, the peptide tag is hydrophilic. In an embodiment, the peptide tag is not hydrophobic. In an embodiment the peptide lacks a cysteine residue. In an embodiment the peptide tag lacks a disulfide bond. In an embodiment, the peptide tag lacks an Asn-X-Ser/Thr motif that would create an N-linked glycosylation site. In an embodiment, the peptide tag is a SHARP-tag. In an embodiment, the peptide tag is represented by SEQ ID NO: 1-123, 150-167, 251-440, 550-579, 631-650, 651-654, 656, 674-676, 686, 689, and 692-720 or variants thereof.

### Novel SAR Design.

[0052] In an embodiment, the disclosure provides novel multichain SAR (MC-SAR) designs comprising two or more chains. These multichain SAR designs provide an improvement over the current SAR (e.g., CAR) in providing physiological T cell receptor signaling, lack of tonic signaling, high sensitivity, ability to target more than one antigen, safety, and lower cytokine production. Furthermore, these multichain SAR can comprise a SHARP-tag, which allow for their easy detection, enrichment, activation, proliferation, in vivo monitoring, tracking and depletion. Schematic representations are provided in FIG. 9. In an embodiment, the novel SAR comprises:
[0053] a) a first polypeptide chain comprising a first antigen-binding domain comprising a vH antibody domain, a first constant antibody domain and a first T cell receptor domain (TCRD) comprising a first transmembrane domain of a first TCR subunit; and
[0054] b) an optional second polypeptide chain comprising a second antigen-binding domain comprising a vH antibody domain, a second constant antibody domain and a second T cell receptor domain (TCRD) comprising a second transmembrane domain of a second TCR subunit; and
[0055] c) a third polypeptide chain comprising a third antigen-binding domain comprising a vL antibody domain, and a third constant antibody domain;
   wherein the vH antibody domain of the first antigen-binding domain and the vL antibody domain of the third antigen-binding domain form an antigen-binding module that specifically binds to first antigen; and
   wherein the vH antibody domain of the optional second antigen-binding domain and the vL antibody domain of the third antigen-binding domain form an antigen-binding module that specifically binds to second antigen.

[0056] In an embodiment, the first antigen and the second antigen are identical or non-identical. In an embodiment, the first antigen-binding domain and the second antigen-binding domain are identical or non-identical. In an embodiment, the first antigen-binding domain and the second antigen-binding domain bind to the same antigen or different antigens. In an embodiment, the first antigen-binding domain and the second antigen-binding domain bind to the same epitope of an antigen or to different epitopes of an antigen. In an embodiment, a hinge region is present between the constant antibody domains and the TCRDs of the first and the optional second polypeptide chains. In an embodiment, a hinge region is present between the first constant antibody domain and the first T cell receptor domain (TCRD). In an embodiment, a hinge region is present between the second constant antibody domain and the second T cell receptor domain (TCRD). In an embodiment, (i) the first TCR subunit is a TCR α chain, and the second TCR subunit is a TCR β chain; or (ii) the first TCR subunit is a TCRβ chain, and the second TCR subunit is a TCR δ chain; (iii) the first TCR subunit is a TCR γ chain, and the second TCR subunit is a TCR δ chain; or (iv) the first TCR subunit is a TCR δ chain, and the second TCR subunit is a TCR γ chain; or (v) the first TCR subunit is a TCR α chain, and the second TCR subunit is a hybrid TCR chain; or (vi) the first TCR subunit is a hybrid TCR chain, and the second TCR subunit is TCR α chain; or vii) the first TCR subunit is a TCR β chain, and the second TCR subunit is a hybrid TCR chain; or (viii) the first TCR subunit is a hybrid TCR chain, and the second TCR subunit is TCR β chain; or (ix) the first TCR subunit is a TCR γ chain, and the second TCR subunit is a hybrid TCR chain; or (x) the first TCR subunit is a hybrid TCR chain, and the second TCR subunit is TCR γ chain; or (xi) the first TCR subunit is a TCR γ chain, and the second TCR subunit is a hybrid TCR chain; or (xii) the first TCR subunit is a hybrid TCR chain, and the second TCR subunit is TCR γ chain.

[0057] In an embodiment, the TCR α chain subunit is represented by SEQ ID NO: 1408 or 1409 or a functional variant thereof with at least 75% identity to the above. In an embodiment, the TCR β chain subunit is represented by SEQ ID NO: 1412 or 1413 or a functional variant thereof with at least 75% identity to the above. In an embodiment, the TCR γ chain subunit is represented by SEQ ID NO: 1415 or 1416 or a functional variant thereof with at least 75% identity to the above. In an embodiment, the TCR γ chain subunit is represented by SEQ ID NO: 1418 or 1419 or a functional variant thereof with at least 75% identity to the above.

[0058] In an embodiment, the TCRD is a hybrid TCR chain in which the connecting peptide of one TCR chain is substituted by connecting peptide of another TCR chain. In an embodiment, the connecting peptides of TCR constant chains are represented by SEQ ID NO: 1492-1499.

[0059] In an embodiment, the TCRD is a hybrid TCR chain in which the transmembrane domain of one TCR chain is substituted by transmembrane domain of another TCR chain. In an embodiment, the transmembrane domains of TCR constant chains are represented by SEQ ID NO: 1502-1509. In an embodiment, the first TCRD and the second TCRD form a T cell receptor module (TCRM) that is capable of recruiting at least one TCR-associated signaling module.

[0060] In an embodiment, the first, second and third constant antibody domains are each selected from the group consisting of SEQ ID NO: 1458-1473 or functional variants thereof. In an embodiment, the third constant antibody domain is a CL antibody domain or functional variants thereof. In an embodiment, the third constant antibody domain is represented by SEQ ID NO: 1458 or a functional variant thereof. In an embodiment, the first, second and third constant antibody domains are each selected from the group consisting of a CH1, CH2, CH3, CH4 and CL antibody domain. In an embodiment, the first and optional second constant antibody domains are each selected from the group consisting of a CH1, CH2, CH3, and CH4 antibody domain. In an embodiment, the first and optional second constant antibody domains are represented by a selected from the group consisting of SEQ ID NO: 1459, 1460, 1462, 1463, 1465-1473 or a functional variant thereof. In an embodiment, the first and the optional second constant antibody domains are identical or non-identical. In an embodiment, the first and the optional second constant antibody domains are selected from the group consisting of CH1, CH2, CH3, and CH4 antibody domain. In an embodiment, the first and/or the optional second constant antibody domain is a CH1 antibody domain, and the third constant antibody domain is a CL antibody domain. In an embodiment, the first and/or the optional second constant antibody domain is selected from the group consisting of CH1, CH2, CH3, and CH4 antibody domain, and the third constant antibody domain is a CL antibody domain. In an embodiment, one or more disulfide bonds are formed between the hinge region present between the first and the optional second polypeptide chain. In an embodiment, the hinge region is represented by a SEQ ID NO: 1513-1520, 1780 or a variant thereof. In an embodiment, the hinge region is represented by a SEQ ID NO: 1513-1520, 1780 or a variant thereof in which one or more cysteine residues are mutated to another amino acid residue, optionally wherein the other residue is Ala. In an embodiment, the sequence of the first and the optional second antibody constant domain along with the hinge regions is represented by SEQ ID NO: 1461, 1462, 1501, 1507, and 1512 or a functional variant thereof. In an embodiment, a linker is present between any of the domains of the SAR. In an embodiment, the linker is between 1-25 amino acids in length. In an embodiment, the linker is a SHARP-tag. In an embodiment, one or more non-scFv autonomous antigen binding domains (AABD) are operationally linked via optional linker domains (or linkers) to the N-terminus or near the N-terminus of the vH and vH antibody domains of the first, optional second and/or the third polypeptide chains. In an embodiment, the first, optional second and/or the third polypeptide chains comprise one or more copies of an epitope tag, e.g., SHARP-tag. In an embodiment, the AABD comprises a SHARP-tag. In an embodiment, the linker domain (or linker) comprises and SHARP-tag. In an embodiment, the invention provides a complex comprising the SAR and at least one TCR-associated signaling module selected from the group consisting of CD36F, CD37F, and CD3ζ Q.

[0061] In an embodiment, the first polypeptide chain further comprises a first peptide linker between the first antigen-binding domain and the first TCRD and the optional second polypeptide chain further comprises a second peptide linker between the second antigen-binding domain and the second TCRD. In an embodiment, the first TCRD further comprises a first connecting peptide or fragment thereof of a TCR subunit N-terminal to the first transmembrane domain and the optional second TCRD further comprises a second connecting peptide or fragment thereof of a TCR subunit N-terminal to the second transmembrane domain. In an embodiment, the transmembrane domain comprises a sequence selected from the group consisting of SEQ ID NO: 1502-1505 or functional variants with 1, 2, 3 or 4 amino acid substitutions. In an embodiment, the connecting peptide comprises a sequence selected from the group consisting of SEQ ID NO: 1492-1499 or functional variants with 1, 2, 3 or 4 amino acid substitutions.

[0062] In an embodiment, the vL and/or vH domains are replaced by vHH domains. In an embodiment, the vL and/or one or both vH domains are replaced by single antibody domains (e.g., single vH domain, or FHVH domain). In an embodiment, the vL and/or vH domains are replaced by scFV domains. In an embodiment, the vL and/or one or both vH domains are replaced by non-immunoglobulin antigen binding scaffolds (e.g., DARPIN). In an embodiment, the vL and/or one or both vH domains are replaced by a single chain TCR domain. In an embodiment, the vL and/or and or both vH domains are replaced by an adaptor, an adaptor binding domain or a tag. In an embodiment, the vL and/or and or both vH domains are replaced by an adaptor, an adaptor binding domain or a tag is a SHARP-tag. In an embodiment, the vL and/or and or both vH domains are replaced by the ligand binding domain of a receptor (e.g., Fc binding region of CD16A or CD16B).

[0063] In an embodiment, the disclosure provides novel multichain SAR designs that form non-T cell receptor module (NTCRM). Schematic representations are provided in FIG. 10. In an embodiment, the SAR comprises:
[0064] d) a first polypeptide chain comprising a first antigen-binding domain comprising a vH antibody domain, a first constant antibody domain and a first Membrane associated module (MAM); and
[0065] e) an optional second polypeptide chain comprising a second antigen-binding domain comprising a vH antibody domain, a second constant antibody domain and a second Membrane associated module (MAM); and
[0066] f) a third polypeptide chain comprising a third antigen-binding domain comprising a vL antibody domain, and a third constant antibody domain.
   In an embodiment, the vH antibody domain of the first antigen-binding domain and the vL antibody domain of the third antigen-binding domain form an antigen-binding module that specifically binds to a first antigen; and the vH antibody domain of the optional second antigen-binding domain and the vL antibody domain of the third antigen-binding domain form an antigen-binding module that specifically binds to a second antigen. In an embodiment, the first MAM and the second MAM form a non-T cell receptor module (NTCRM) that activates at least one signaling pathway and/or recruiting at least one signaling adaptor.

[0067] In an embodiment, the first, second and third constant antibody domains are each selected from the group consisting of SEQ ID NO: 1458-1473 or functional variants thereof. In an embodiment, the third constant antibody domain is a CL antibody domain or functional variants thereof. In an embodiment, the third constant antibody domain is represented by SEQ ID NO: 1458 or a functional variant thereof. In an embodiment, the first, second and third constant antibody domains are each selected from the group consisting of a CH1, CH2, CH3, CH4 and CL antibody domain. In an embodiment, the first and optional second constant antibody domains are each selected from the group consisting of a CH1, CH2, CH3, and CH4 antibody domain. In an embodiment, the first and optional second constant antibody domains are represented by a selected from the group consisting of SEQ ID NO: 1459, 1460, 1462, 1463, 1465-1473 or a functional variant thereof. In an embodiment, the first and the optional second constant antibody domains are identical or non-identical. In an embodiment, the first and the optional second constant antibody domains are selected from the group consisting of CH1, CH2, CH3, and CH4 antibody domain. In an embodiment, the first and/or the optional second constant antibody domain is a CH1 antibody domain, and the third constant antibody domain is a CL antibody domain. In an embodiment, the first and/or the optional second constant antibody domain is selected from the group consisting of CH1, CH2, CH3, and CH4 antibody domain, and the third constant antibody domain is a CL antibody domain. In an embodiment, one or more disulfide bonds are formed between the hinge region present between the first and the optional polypeptide chain. In an embodiment, the hinge region is represented by a SEQ ID NO: 1513-1520, 1780 or a variant thereof. In an embodiment, the hinge region is represented by a SEQ ID NO: 1513-1520, 1780 or a variant thereof in which one or more cysteine residues are mutated to another amino acid residue, optionally wherein the other residue is Ala. In an embodiment, the sequence of the first and the optional second antibody constant domain along with the hinge regions is represented by SEQ ID NO: 1461, 1462, 1501, 1507, and 1512 or a functional variant thereof. In an embodiment, a linker is present between any of the domains of the SAR. In an embodiment, the linker is between 1-25 amino acids in length. In an embodiment, the linker is a SHARP-tag. In an embodiment, one or more non-scFv autonomous antigen binding domains (AABD) are operationally linked via optional linker domains (or linkers) to the N-terminus or near the N-terminus of the vH and vH antibody domains of the first, optional second and/or the third polypeptide chains. In an embodiment, the first, optional second and/or the third polypeptide chains comprise one or more copies of an epitope tag, e.g., SHARP-tag. In an embodiment, the AABD comprises a SHARP-tag. In an embodiment, the linker domain (or linker) comprises and SHARP-tag.

[0068] In an embodiment, the first polypeptide further comprises a first hinge domain or fragment thereof N-terminal to the first MAM; and/or the second polypeptide further comprises a second hinge domain or fragment thereof N-terminal to the second MAM. In an embodiment, the hinge domain comprises a sequence selected from the group consisting of SEQ ID NO: 1729-1743 or functional variants with 1, 2, 3 or 4 amino acid substitutions. In an embodiment, the SAR comprises a disulfide bond between a residue in the first MAM and the second MAM and/or a residue in the first hinge domain and a residue in the second hinge domain.

[0069] In an embodiment, first polypeptide further comprises a first cytosolic domain containing an optional activation domain C-terminal to the first transmembrane/membrane-anchoring domain comprising the first MAM; and/or the second polypeptide further comprises a second cytosolic containing an optional activation domain C-terminal to the second transmembrane/membrane anchoring domain comprising the second MAM. In an embodiment, the cytosolic domain comprises a sequence selected from the group consisting of SEQ ID NO: 1744-1766 or functional variants with 1, 2, 3 or 4 amino acid substitutions.

[0070] In an embodiment, the first polypeptide chain further comprises a first accessory intracellular domain comprising a co-stimulatory or a co-receptor domain sequence C-terminal to the first transmembrane/membrane anchoring domain of the first MAM; and/or the second polypeptide chain further comprises a second accessory intracellular domain comprising a co-stimulatory, a coreceptor domain sequence or a signaling molecule C-terminal to the second transmembrane/membrane anchoring domain comprising the second MAM. In an embodiment, the co-stimulatory domain comprises a sequence selected from the group consisting of SEQ ID NO: 1759-1766 or functional variants with 1, 2, 3, 4, 5, or 10 amino acid substitutions.

[0071] In an embodiment, the a) co-stimulatory domain is selected from the cytosolic domain of CD28, 4-1BB, OX40, 2B4, CD27, CD81, CD2, CD5, BAFF-R, CD30, CD40, HVEM or ICOS, or a variant or a fragment thereof; and b) co-receptor domain is selected from the cytosolic domain of CD8a, CD8b or CD4, or a variant or a fragment thereof and c) signaling molecule is a kinase optionally selected from the group of Lck, FYN, ZAP-70, PLCγ1, SLP-76 and LAT or a functional variant or a fragment thereof. In an embodiment, the first and/or the second MAM and the NTCRM are comprised of the transmembrane/membrane anchored domain, optional cytosolic domain, optional hinge domain and/or optional extracellular domain of a non-T cell receptor and/or a signaling adaptor. In an embodiment, the first and/or the second MAM and the NTCRM are comprised of the transmembrane/membrane anchored domain, optional cytosolic domain, optional hinge domain and/or optional extracellular domain that are all derived from a single or different non-T cell receptor and/or a signaling adaptor or variants thereof.

[0072] In an embodiment, the two transmembrane/membrane anchored domains, optional cytosolic domains, optional co-stimulatory domain, optional hinge domains and/or optional extracellular domains are identical or different in sequence and are derived from the same protein.

[0073] In an embodiment, a) the non T cell receptor is a naturally occurring receptor and is selected from the group consisting of: CD16A, CD16B, CD64, CD32, NKp30, NKp44, NKp46, KIR2DL1, KIR2DL2, KIR2DL3, KIR2DL5A, KIR2DL5B, KIR3DL1, KIR3DL2, KIR3DL4, KIR2DL4, KIR2DS1, KIR2DS2, KIR2DS3, KIR2DS4, KIR2DS5, KIR3DS1, NKG2D, NKG2C, NKG2A, NKG2E, NKG2F, DNAM-1, 2B4, OX40, CD28, 4-1BB, CD27, CD81, CD2, CD5, TNFR-I, TNFR-II, Fas, CD30, CD40, CRTAM, TIGIT, CD96, SLAMF6, SLAMF7, CD100, CD160, CEACAM, ILT2, KLRG1, LAIR1, CD161, a variant of any of the foregoing, and fragments thereof; and b) the signaling adaptor is selected from the group consisting of: CD3ζ, FcRγ, DAP10, a variant of any of the foregoing and fragments thereof.

[0074] In an embodiment, the a) CD16 lacks a partial or complete cytosolic domain and/or comprise a mutation in the transmembrane domain; and/or b) one or both CD3ζ cytosolic domains comprise a deletion of residue Q101; c) both a) and b).

[0075] In an embodiment, one or more autonomous antigen binding domains (AABD) or fragments thereof are operationally linked to the N-terminus or near the N-terminus of the vL, vH, Vα, Vβ, Vγ and/or Vδ domain via one or more optional linkers.

[0076] In an embodiment, the transmembrane domain comprises a sequence selected from the group consisting of SEQ ID NO: 1502-1506, 1714-1728 or functional variants with 1, 2, 3 or 4 amino acid substitutions. In an embodiment, the connecting peptide comprises a sequence selected from the group consisting of SEQ ID NO: 1492-1499 or functional variants with 1, 2, 3 or 4 amino acid substitutions. In an embodiment, the connecting peptide comprises a sequence selected from the group consisting of SEQ ID NO: 1492-1499 or functional variants with 1, 2, 3 or 4 amino acid substitutions.

[0077] In an embodiment, the first antigen and the second antigen are identical or non-identical. In an embodiment, the first antigen-binding domain and the second antigen-binding domain are identical or non-identical. In an embodiment, the vH domain of the first polypeptide chain and the vH domain of the second polypeptide chain are identical or non-identical. In an embodiment, the first antigen-binding domain and the second antigen-binding domain bind to the same antigen or different antigens. In an embodiment, the first antigen-binding domain and the second antigen-binding domain bind to the same epitope of an antigen or to different epitopes of an antigen.

[0078] In an embodiment, the vL and/or vH domains are replaced by vHH domains. In an embodiment, the vL and/or one or both vH domains are replaced by single antibody domains (e.g., single vH domain, or FHVH domain). In an embodiment, the vL and/or vH domains are replaced by scFV domains. In an embodiment, the vL and/or one or both vH domains are replaced by non-immunoglobulin antigen binding scaffolds (e.g., DARPIN). In an embodiment, the vL and/or one or both vH domains are replaced by a single chain TCR domain. In an embodiment, the vL and/or and or both vH domains are replaced by an adaptor, an adaptor binding domain or a tag. In an embodiment, the vL and/or and or both vH domains are replaced by an adaptor, an adaptor binding domain or a tag is a SHARP-tag. In an embodiment, the vL and/or and or both vH domains are replaced by the ligand binding domain of a receptor (e.g., Fc binding region of CD16A or CD16B).

[0079] In an embodiment, a hinge region is present between the constant antibody domains and the connecting peptides of the first and the optional second polypeptide chains. In an embodiment, a hinge region is present between the first constant antibody domain and the first MAM and/or between the second constant antibody domain and the second MAM.

[0080] In an embodiment, any of the SAR described herein is expressed in a cell, optionally wherein the cell is a T cell, NKT cell, NK cell, or a pluripotent stem cell that can give rise to a T cell, NKT cell or an NK cell. In an embodiment, the cell has impaired or abolished expression of one or more TCR constant chains, wherein optionally the TCR constant chains are selected from the group consisting of TCR α, Rβ1, β2, γ, δ or pre-TCRα. In an embodiment, the SAR is expressed from an endogenous TCR locus, optionally wherein the endogenous TCR locus is TCR α, β1, β2, γ, δ or pre-TCRα gene locus. In an embodiment, the SAR is expressed under the promoter and regulatory element of an endogenous TCR gene, optionally wherein the endogenous TCR gene is TCR α, β1, β2, γ, δ or pre-TCRα gene. In an embodiment, the SAR is co-expressed with an accessory module or a therapeutic control. In an embodiment, the SAR is transduced in a cell using a vector, optionally wherein the vector is a lentiviral vector, retroviral vector, viral like particle, lipid nanoparticle, mRNA vector, DNA vector, transposon, plasmid vector, adenoviral vector or adeno-associated viral vector. In an embodiment, the SAR is transduced in a cell a) in vitro, b) in vivo, c) both a) and b). In embodiments, the SAR is expressed transiently or expressed stably.

[0081] The invention provides an effector cell (e.g., a T cell) presenting on its surface the SAR, optionally wherein the effector cell does not express the first TCR subunit and/or the second TCR subunit. The invention provides a method of killing a target cell, comprising contacting the target cell with the effector cell expressing the SAR. The invention provides a pharmaceutical composition comprising the effector cells expressing the SAR and a pharmaceutically acceptable carrier. The invention provides a method of treating a disease in an individual in need thereof comprising administering to the individual an effective amount of the pharmaceutical composition comprising the effector cells expressing the SAR.

[0082] Provided herein are pharmaceutical compositions that include any of the nucleic acids, polypeptides, envelopes, vectors, cells and compositions described herein that encode any of the epitope tags, single chain, double chain and multi-chain SARs and/or accessory modules described herein, or any of the sets of nucleic acids described herein that together encode any of the single chain, double chain and multi chain SARs and/or accessory modules described herein, and a pharmaceutically acceptable carrier. Also provided are kits that include any of the any of the nucleic acids, polypeptides, envelopes, vectors, cells and pharmaceutical compositions described herein.

[0083] Also provided are methods of treatment and/or prevention of disease by using any of the polynucleotides, polypeptides, vectors, cells and compositions described herein. In one aspect, the SAR (e.g., CD79b SAR) of the disclosures are used for the treatment of patients with leukemia and lymphoma, autoimmune disorders (e.g., Lupus, idiopathic myositis, myasthenia gravis, rheumatoid arthritis etc.) and/or allergic disorders (e.g., asthma).

[0084] The invention provides a cell-based method to determine the potency and/or titer of a vector encoding a SAR (e.g., a SIR, a HC-SIR, Ab-TCR etc.) by infecting T cells or a T cell line with impaired or abolished expression of one or more endogenous TCR constant chain, optionally wherein the TCR constant chain is selected from the group consisting of TCRα, β1, β2, γ, δ or preTCRα constant chain. In an embodiment, the SAR is a double chain SAR. In an embodiment, the SAR comprises a TCR constant chain, optionally wherein the TCR constant chain is selected from the group consisting of TCRα, β1, β2, γ, δ or preTCRα constant chain. In an embodiment the method offers greater sensitivity and accuracy in determining the titer of the vector as compared to the assay performed in wild-type T cell or T cell lines. In an embodiment, the T cell or a T cell line with impaired or abolished expression of one or more endogenous TCR constant chains can be obtained by methods known in the art, such as CRISP/Cas9, siRNA or Zn finger nucleases.

[0085] The invention also provides a method to detect the expression of a SAR based on staining with an antibody, antibody fragment or a non-immunoglobulin antigen binding domain raised or directed against the antigen binding domain(s) of the SAR. In an embodiment, the antibody is directed to an immunoglobulin or an antibody or an antibody fragment (e.g., Fab, Fab2 etc.). In an embodiment, the antibody is not an anti-ideotype antibody.

[0086] The invention also provides a method to measure the expression of SAR constructs comprising TCR constant chains. The expression of the SIR can be difficult to detect with the conventional methods, e.g., staining with Protein L due to poor sensitivity and high background. The invention provides a novel approach to measure the expression of a SAR comprising TCR constant chains. Examples of such SAR constructs include SIR, HIT, STAR, HC-SAR, multi-chain SAR etc. In an embodiment, to detect the expression of such SAR with greater sensitivity, the cells are stained with antibodies against human TCRα, TCRβ1 and/or TCRβ2 constant chains. In an embodiment, the antibodies or the antibody is conjugated to one or more fluorochromes and the analysis is done using flow cytometry. In an embodiment, the T cell is a T cell line, optionally Jurkat cell line or a clone thereof. In an embodiment, the expression of the TCRβ2 constant chain on JNG cells is used to determine the expression of the SAR. In an embodiment, the T cell or the T cell line has impaired or abolished expression of one or more endogenous TCR constant chains, optionally wherein the TCR constant chain is selected from the group consisting of TCRα, β1, β2, γ, δ or preTCRα constant chain. In an embodiment, the cell expressing the SAR is a primary T cell. In an embodiment, the T cell(s) are stained with antibodies against TCRβ1 and TCRβ2 constant chains. In an embodiment, the presence of T cells that show staining with both TCRβ1 and TCRβ2 constant chain specific antibodies (i.e., double positive cells) is used as a measure of the expression of the SAR. In an embodiment, the method is used to measure the potency of the vector encoding the SAR and as a product release assay.

[0087] In an embodiment, the invention provides a short method for manufacturing of a SIR, HC-SIR, zSIR, z16-SIR, CD16-SIR comprising the following steps. 1. An optional step of giving a mobilizing agent to the donor to mobilize immune effector cells, optionally wherein the mobilizing agent is selected from the group consisting of 1) CXCR4 antagonist, 2) cytokine, 3) Dasatinib, 4) exercise, 5) chemotherapy, 6) combination of one or more of 1-5; 2; collecting immune effector cells via apheresis; 3) Isolating T cells using CD3 selection or CD4/CD8 enrichment and/or depletion of non-T cells; 4) Activating the enriched T cells, optionally in the presence of IL2 or IL15/IL7, and optionally using CD3/CD28 beads or antibodies for 12-18 hours; 5) Transducing 300-400 million isolated T cells with a nucleic acid encoding the SAR, optionally wherein the transduction is done using a vector, optionally wherein the vector is a lentiviral vector, retroviral vector, viral like particle or lipid nanoparticle. In an embodiment, the transduction is done using spin-infection. In an embodiment, the transduction is done in the presence of vectofuscin; 6) expanding the cells for 12 hours to 7 days in the presence of IL2 or IL15/IL7 and CD3/CD28 beads or antibodies; 7) harvesting the cells. In an embodiment, the manufacturing is done in close automated system. In an embodiment, the system is Prodigy® CliniMACS. In an embodiment, the process is performed using the T Cell Transduction Large Scale (TCT-LS) Process from Prodigy. In an embodiment, the optional steps of cryopreservation of the apheresed product and its subsequent thawing prior to T cell isolation is included.

[0088] In an embodiment, the invention provides a method of improving the efficacy of an immune effector cell composition comprising a SAR targeting PSMA (e.g., a PSMA-targeted CAR, SIR, zSIR, Ab-TCR etc.) by administration of an anti-androgen agent. The anti-androgen agent may be selected from the group consisting of bicalutamide, flutamide, nilutamide, enzalutamide, apalutamide, darolutamide, abiraterone acetate, or a pharmaceutically acceptable salt, ester, prodrug, or formulation thereof. In some embodiments, the anti-androgen agent is a non-steroidal androgen receptor antagonist or an androgen biosynthesis inhibitor. In various embodiments, the anti-androgen drug is administered systemically, including but not limited to oral, intravenous, subcutaneous, or intramuscular routes. In preferred embodiments, the drug is administered orally.

[0089] In some embodiments, the anti-androgen drug is administered at a dosage that is therapeutically effective for treating prostate cancer in a human subject. In certain embodiments, the dose is selected from one of the following: Bicalutamide: from about 10 mg to about 150 mg per day; preferably about 50 mg per day; Flutamide: from about 250 mg to about 1000 mg per day, administered in two or more divided doses; Nilutamide: from about 150 mg to about 300 mg per day; Enzalutamide: from about 40 mg to about 200 mg per day; preferably about 160 mg per day; Apalutamide: from about 60 mg to about 300 mg per day; preferably about 240 mg per day; Darolutamide: from about 300 mg to about 1800 mg per day, administered in one or more divided doses; preferably about 1200 mg per day; Abiraterone acetate: from about 250 mg to about 1000 mg per day; preferably about 1000 mg per day in combination with a corticosteroid (e.g., prednisone 5 mg twice daily). In certain embodiments, the anti-androgen drug is administered daily, once daily, or in divided doses two or more times per day. In some embodiments, the anti-androgen drug is administered in combination with other agents, including but not limited to corticosteroids (e.g., prednisone), GnRH agonists or antagonists, chemotherapeutic agents, or immune checkpoint inhibitors. In various embodiments, the anti-androgen drug is formulated in a composition comprising one or more pharmaceutically acceptable excipients, carriers, diluents, or stabilizers, suitable for systemic administration.

[0090] The following detailed description and examples illustrate various embodiments of this platform and methods for its use, without limiting the scope of the invention.

### BRIEF DESCRIPTION OF THE DRAWINGS

[0091] FIG. 1. Malibu Glo assay showing specific binding of the Malibu Glo reagent (SEQ ID NO:1199) to T cells expressing the two TAG-SAR constructs (SEQ ID NO:5045 and 5046) as compared to untagged SAR construct (SEQ ID NO: 5044).

[0092] FIG. 2. Flow cytometry showing specific binding of the Malibu Glo reagent (SEQ ID NO: 1199) to T cells expressing the two TAG-SAR constructs (SEQ ID NO: 5045 and 5046) as compared to the untagged SAR construct (SEQ ID NO: 5044).

[0093] FIG. 3. Flow cytometry showing specific binding of the FLAG-tagged SN8 antibody to T cells expressing the two TAG-SAR constructs (SEQ ID NO: 5045 and 5046) as compared to the untagged SAR construct (SEQ ID NO: 5044).

[0094] FIG. 4. Flow cytometry showing specific binding of the HuMa79b (SEQ ID NO: 1182) and 2F2 (SEQ ID NO: 1189) to T cells expressing the indicated TAG-SAR constructs (SEQ ID NO: 4818, 4824, 4819, 4995) as compared to the untagged SAR construct (SEQ ID NO: 5044).

[0095] FIG. 5. Matador Cytotoxicity Assay on LucPPe-expressing LNCaP cells confirms selective depletion of T cells expressing the TAG-SAR constructs (SEQ ID NO: 5045 and 5046) as compared to the untagged SAR construct (SEQ ID NO: 5044) following treatment with Polatuzumab vedotin as reflected by loss of cytotoxicity on LNCaP cells.

[0096] FIG. 6. Bioluminescence Imaging (BLI) showing that in vivo treatment with Polatuzumab vedotin protects mice against toxicity of T cells expressing STEAP2 targeted second-generation CAR (SEQ ID NO: 5057) comprising a SHARP-tag.

[0097] FIG. 7. Bioluminescence imaging of NSG mice xenografted with JEKO-1 cells and administered either control T cells or T cells expressing the indicated SAR constructs.

[0098] FIG. 8. Bioluminescence imaging of NSG mice xenografted with LNCaP cells and administered either control T cells or T cells expressing the indicated SAR constructs.

[0099] FIG. 9. Schematic representations of multi-chain unispecific and bispecific Synthetic Antigen Receptors (MC-SAR) comprising TCR signaling chains. vH1 and vH2 reflect two different vH domains that share a common light chain variable region (i.e., vL domain). Cα, Cβ, Cγ and Cδ represent modules comprising the connecting peptide, transmembrane and/or cytosolic domains of TCRα, β, γ and δ constant chains. FIGS. 7C, D, G and H show hybrid TCR constant chains.

[0100] FIG. 10. Schematic representations of multi-chain unispecific and bispecific Synthetic Antigen Receptors (MC-SAR) comprising non-TCR signaling domains. Abbreviations used are: CD3z, a module comprising the transmembrane and cytosolic domain of CD3z with the optional hinge domain of CD3z; CD16, a module comprising the transmembrane and optional cytosolic domain of CD16 with the optional hinge domain of CD16; FcRγ, a module comprising the transmembrane and cytosolic domain of FcRγ with the optional hinge domain of FcRγ; BB, cytosolic domain of 4-1BB, CD3z-BB-CD3z, a module comprising the transmembrane domain of CD3z, cytosolic domain of 4-1BB and cytosolic domain of CD3z. vH1 and vH2 reflect two different vH domains that share a common light chain variable region (i.e., vL domain).

### DETAILED DESCRIPTION

[0101] In one aspect the present disclosure provides an isolated epitope tag that comprises or consists of 5, 6, 7, 8, 9, 10, 11, 12, 13, 14, 15, 16, 17, 18, 19, 20 or more than 20 amino acid residues. In one aspect the present disclosure provides an isolated epitope tag that comprises or consists of 5, 6, 7, 8, 9, 10, 11, 12 or 13 amino acid residues. In one aspect, the present disclosure provides an epitope tag comprising 5 amino acid residues. In one aspect, the present disclosure provides an epitope tag comprising 6 amino acid residues. In another aspect the present disclosure provides an epitope tag comprising 7 amino acid residues. In another aspect the present disclosure provides an epitope tag comprising 8 amino acid residues. In one aspect, the present disclosure provides an isolated epitope tag comprising from about 6 to about 30 amino acid residues. In other embodiments, the epitope tag comprises at least 6, 7, or 8 amino acids. In yet other embodiments, the epitope tag ranges from 6 to 11, 6 to 13, 6 to 20, 6 to 25, 6 to 50, 6 to 60, 7 to 30, 7 to 20, 7 to 15, 8 to 30, 8 to 20, 8 to 15, or 9 to 11 amino acids in length. In various embodiments, the epitope tag may have about 6, 7, 8, 9, 10, 11, 13, 14, 16, or 18 amino acid residues. The epitope tag may be linear and optionally designed to minimize immunogenicity while enabling reliable detection, isolation, or modulation of tagged polypeptides.

[0102] In one aspect, the invention provides an epitope tag that is 5, 6, 7, 8, 9, 10, 11, 12, 13, 14, 15, 16, 17, 18, 19, 20, 21, 22, 23, 25, 26, 30, 35, 40, or 50 amino acids in length.

[0103] In one aspect the epitope tag is recognized by a drug that is or will be approved by a regulatory agency. In one aspect the epitope tag is recognized by a drug that is approved or will be approved by a regulatory agency in USA, Europe, UK, Canada, China, Japan, India, Brazil, Israel, South Korea, Australia, New Zealand, Malaysia, Indonesia, Singapore, Thailand, Colombia, Chile, South Africa, Saudia Arabia, UAE and/or Mexico. In one aspect the regulatory agency is the US Food and Drug Administration (FDA) or an equivalent agency in other countries or jurisdictions. In one aspect, the regulatory agency is EMA (European Medical Agency), Medicines and Healthcare Products Regulatory Agency (MHRA) of UK, Health Canada, Pharmaceutical and Medical Devices Agency (PMDA) of Japan, National Medical Products Administration (NMPA) of China, or Central drug Standard Control Organization (CDSCO) of India.

[0104] In an embodiment, the drug is an antibody, antibody fragment, or a non-immunoglobulin antigen binding scaffold.

[0105] In an embodiment the epitope tag is recognized by a drug (e.g., an antibody or an antibody drug conjugate or an ADC) that is approved or would be approved by a regulatory agency (e.g., FDA or EMA) for in vivo administration to a subject. In an embodiment, the subject is a human subject. In one aspect the epitope tag is recognized by an antibody, a bispecific antibody and/or an antibody drug conjugate. In one aspect, the drug (e.g., an antibody or an antibody drug conjugate) is Polatuzumab or Polatuzumab vedotin or Polatuzumab vedotin-piiq (sold as Polivy®) or a generic version of the forgoing. In one aspect, the epitope tag is bound by Polatuzumab or Polatuzumab vedotin (Polivy®) or a generic version of the forgoing. In an embodiment, the drug (e.g., an antibody, a bispecific antibody or an antibody drug conjugate) binds to the same epitope as Polatuzumab or Polatuzumab vedotin or Polatuzumab vedotin-piiq (sold as Polivy®) or a generic version of the forgoing. In an embodiment, the drug binds to an overlapping epitope as Polatuzumab or Polatuzumab vedotin or Polatuzumab vedotin-piiq (sold as Polivy®) or a generic version of the forgoing. In an embodiment, the drug competes for binding with Polatuzumab or Polatuzumab vedotin-piiq (Polivy®) or a generic version of the forgoing. In an embodiment, the drug (e.g., antibody, bispecific antibody or ADC) binds to CD79b. In an embodiment, the drug (e.g., antibody, bispecific antibody or ADC) binds to human CD79b. In an embodiment, the drug binds to CD79b from a non-human species (e.g., mouse, rabbit, dog, rat, monkey, cat, elephant etc.). In an embodiment, the antibody has light chain variable regions represented by SEQ ID NO: 774-794, 808-818 and 2173-2178, and 2183 and heavy chain variable regions represented by SEQ ID NO: 899-919, 937-941, 2179-2182 and 2184 or variants thereof with up to 20 amino acid substitutions.

[0106] In an embodiment, the epitope tag, polypeptide and cells comprising the same are recognized by monoclonal antibody SN8 (Thermofisher Scientific Catalog #Catalog #604-490), 3A2-2E7 (BD Bioscience; Catalog 557592), CD79b-2F2, CB3-1 (BD Biscience), AT105 (Abcam), huMA79b, Polatuzumab or Polatuzumab vedotin or variants thereof. In an embodiment, the epitope tag, polypeptides (e.g., CAR, next generation CAR, antibodies, cytokines, chemokines etc.) and cells comprising the same are recognized by an antibody or antibody fragment, antibody conjugates (e.g., scFv, Fab, bispecific antibody, antibody drug conjugate, scFv etc.) described in PCT/US2024/10592, US20070207142, WO2009012268, WO2009012256 and EP2176295B1, which are incorporated in their entirety by reference herein, or the functional variants or derivatives thereof.

[0107] In an embodiment, the epitope tag, polypeptides (e.g., CAR, next generation CAR, antibodies, cytokines, chemokines etc.), vectors, cells and compositions comprising the epitope tag described herein are recognized by an antibody, an antibody fragment or an antibody derivative (e.g., scFv, Fab, bispecific antibody, antibody drug conjugate etc.) that comprises the CDRs (complementary determining regions) of antibodies, antibody fragments and antibody conjugates described in US20070207142, PCT/US2024/10592, WO2009012268, WO2009012256 and EP2176295B1, or variants with 1, 2 or 3 amino acids substitutions in one or more of the CDRs. In an embodiment, the epitope tag, polypeptides (e.g., CAR, next generation CAR, antibodies, cytokines, chemokines etc.), vectors, cells and compositions comprising the epitope tag described herein are recognized by an antibody comprising the heavy chain and light chain regions represented by SEQ ID NO:1194 and 1195, respectively, or functional variants with 70%, 75%, 80%, 85%, 90%, 95%, 97%, 98% or 99% sequence identity thereto or variants with up to 10, 20, 30, or 40 amino acids substitutions in the framework regions. In an embodiment, the epitope tag, recombinant polypeptides (e.g., CAR, next generation CAR, antibodies, cytokines, chemokines etc.), vectors, cells and compositions comprising the epitope tag described herein are recognized by an antibody, an antibody fragment or an antibody conjugate (e.g., scFv, Fab, bispecific antibody, antibody drug conjugate etc.) that comprises the CDRs (complementary determining regions) of an antibody with heavy chain and light chain regions represented by SEQ ID NO:1194 and 1195, respectively, or functional variants with up to 1, 2 or 3 amino acid substitutions in one or more CDR regions. In an embodiment, the epitope tag, polypeptides (e.g., CAR, next generation CAR, antibodies, cytokines, chemokines etc.), vectors, cells and compositions comprising the one or more epitope tags described herein are recognized by an antibody (e.g., monoclonal antibody, polyclonal antibody, bispecific antibody etc.), an antibody fragment (e.g., scFv, vL, vH, Fv etc.), or an antibody conjugates (e.g., antibody drug conjugate etc.) that comprise the CDRs (complementary determining regions) of an antibody, an antibody fragment (e.g., scFv, vL, vH) and/or an antibody conjugate described herein or functional variants with 1 or 2 amino acids substitutions in the CDRs. In an embodiment, the epitope tag, polypeptides (e.g., CAR, next generation CAR, antibodies, cytokines, chemokines etc.) and cells comprising the epitope tag(s) are recognized by an antibody, antibody fragment, antibody drug conjugate comprising the vL fragment of an antibody represented by SEQ ID NO: 774-782, 790, 792-794, 808-818, 2173-2178 and the complementary vH fragment of the antibody represented by SEQ ID NO:899-907, 915, 917-919, 937-941, 2179-2182 or variants of the forgoing sequences comprising up to 20 amino acid substitutions in the framework region. In an embodiment, the antibody or its functional variant requires the residue E located at position 3 of SEQ ID NO: 1-11 for binding to the SHARP-tag or the polypeptide, cell, vector, and/or composition comprising the SHARP-tag. The CDRs of the above vL and vH are provided in Tables 2-3.

[0108] In an embodiment, the epitope tag, polypeptides (e.g., CAR, next generation CAR, antibodies, cytokines, chemokines etc.) and cells comprising the same are recognized by an antibody, an antibody fragment, or an antibody drug conjugate comprising the vL fragment of an antibody (2F2) represented by SEQ ID NO: 783-789 and 791 and the complementary vH fragment of the antibody represented by SEQ ID NO: 908-914 and 916 or functional variants of the forgoing sequences comprising up to 20 amino acid substitutions in the framework region. In an embodiment, the epitope tag, polypeptides (e.g., CAR, next generation CAR, antibodies, cytokines, chemokines etc.) and cells comprising the epitope tag(s) are recognized by an antibody, antibody fragment, antibody drug conjugate comprising the vL fragment of an antibody (2F2) represented by SEQ ID NO: 783-789 and 791 and the complementary vH fragment of the antibody represented by SEQ ID NO: 908-914 and 916 or functional variants of the forgoing comprising up to 20 amino acid substitutions in the framework region. In an embodiment, the SABR (i.e., antibody, antibody derivatives, antibody fragments or functional variant) requires the residue E located at position 3 of SEQ ID NO: 1-11 for binding to the SHARP-tag or the polypeptide, cell, vector, and/or composition comprising the SHARP-tag.

[0109] In an embodiment, the epitope tag, polypeptides (e.g., CAR, next generation CAR, antibodies, cytokines, chemokines etc.) and cells comprising the epitope tag(s) are recognized by an antibody, antibody fragment, antibody drug conjugate or a bispecific antibody comprising the vL fragment of an antibody (10D10) represented by SEQ ID NO: 797 and the complementary vH fragment of the antibody represented by SEQ ID NO: 922 or functional variants of the forgoing comprising up to 20 amino acid substitutions in the framework region.

[0110] In an embodiment, the epitope tag, polypeptides (e.g., CAR, next generation CAR, antibodies, cytokines, chemokines etc.) and cells comprising the epitope tag(s) are recognized by an antibody, antibody fragment, antibody drug conjugate, bispecific antibody and/or radiolabeled antibody comprising the vL fragment of an antibody (H2Mab-250) represented by SEQ ID NO: 846-847 and the complementary vH fragment of the antibody represented by SEQ ID NO: 966-970 or functional variants of the forgoing comprising up to 10 amino acid substitutions in the framework region. In an embodiment, the functional variant of H2Mab-250 is a fully human, humanized or chimeric antibody. In an embodiment, the functional variant of H2Mab-250 comprises 1, 2, 3 amino acid substitution in one or more of the CDRs provided it retains binding to the epitope represented by SEQ ID NO: 557-566 or a variant thereof. In an embodiment, the functional variant of H2Mab-250 comprises 1, 2, 3 amino acid substitution in one or more of the CDRs provided interacts with the Trp (W) residue for binding to the epitope represented by SEQ ID NO: 557-566 or a variant thereof. The Trp (W) is located at position 4 in SEQ ID NO: 557 and is located between residues I and K. In an embodiment, the SABR is any antibody, antibody fragment, variant thereof that requires the Trp (W) located at position 4 of the SHARP-tag with SEQ ID NO: 557 or a functional variant thereof. The present disclosure further provides recombinant polypeptides (e.g., synthetic antigen receptors, or SARs), cells, vectors, and compositions comprising a SHARP-tag represented by SEQ ID NO: 557-566 or a variant thereof that is specifically recognized by an antibody, antibody fragment, antibody conjugate, bispecific antibody, antibody derivative, or a variant thereof. In certain embodiments, the binding moiety (i.e., a SABR) comprises a variable light (vL) chain comprising a sequence represented by SEQ ID NOs: 846-847 and a complementary variable heavy (vH) chain comprising a sequence represented by SEQ ID NOs: 966-970, or functional variants thereof containing up to 20 amino acid substitutions within the framework regions and/or or 1-3 substitutions in one or more CDRs, provided such variants retain specific binding to the SHARP-tag represented by SEQ ID NO: 557-566 or a variant thereof.

[0111] As used herein, the term “CDR” or “complementarity determining region” is intended to mean the non-contiguous antigen combining sites found within the variable region of both heavy and light chain polypeptides. These particular regions have been described by Kabat et al., J. Bio. Chem. 252:6609-6616 (1977); Kabat et al., U.S. Dept. of Health and Human Services, “Sequences of proteins of immunological interest” (1991); Chothia et al., J. Mol. Bio. 196:901-917 (1987); and MacCallum et al., J. Mol. Bio. 25 262:732-745 (1996), where the definitions include overlapping or subsets of amino acid residues when compared against each other. CDRs sequences of the disclosure may follow the definition by AbM used by Oxford Molecular's AbM antibody modelling software. See, generally, e.g., Protein Sequence and Structure Analysis of Antibody Variable Domains. In: Antibody Engineering Lab Manual (Ed.: Duebel, S. and Kontermann, R., Springer-Verlag, Heidelberg). Kabat, Chothia, MacCallum, Contact, IGMT and AbM are within the scope of the present disclosure. Nevertheless, application of either definition to refer to a CDR of an antibody or grafted antibodies or variants thereof is intended to be within the scope of the term as defined and used herein. As used herein, the different CDRs of an antibody could be also defined by a combination of the different definitions. For example, vHCDR1 could be defined based on Kabat and VHCDR2 could be defined based on Chothia, IGMT or Contact. The amino acid residues which encompass the CDRs as defined by Kabat, Chothia, MacCallum of the above cited references are as follows:

CDR DEFINITIONS

| | Kabat | Chothia | MacCallum |
|---|---|---|---|
| VHCDR1 | 31-35 | 26-32 | 30-35 |
| VHCDR2 | 50-65 | 53-55 | 47-58 |
| VHCDR3 | 95-102 | 96-10 | 193-101 |
| VLCDR1 | 24-34 | 26-32 | 30-36 |
| VLCDR2 | 50-56 | 50-52 | 46-55 |
| VLCDR3 | 89-97 | 91-96 | 89-96 |

(Residue Numbers correspond to the identified reference).

[0112] In some embodiments, an antibody or antibody fragment described herein (e.g., SABR) may comprise one or more mutations (e.g., amino acid insertions, deletions, or substitutions) relative to a CDR, vH, vL, heavy chain, or light chain sequence provided in Tables 2 and Table 3. In some embodiments, an antibody or antibody fragment described herein may comprise 1, 2, 3, 4, 5, 6, 7, 8, 9, 10, or more mutations (e.g., amino acid insertions, deletions, or substitutions) relative to a CDR, VH, VL, heavy chain, or light chain sequence provided in Table 2 and Table 3. In some embodiments, an antibody or antibody fragment described herein may be at least 60%, at least 70%, at least 80%, at least 90%, at least 95%, or at least 99% identical to a CDR, VH, VL, heavy chain, or light chain sequence provided in Table 2 and Table 3.

[0113] In some embodiments, the antibody or antibody fragment of the present disclosure comprises a heavy chain complementarity determining region 1 (CDR-H1) (according to the IMGT definition system), a heavy chain complementarity determining region 2 (CDR-H2) (according to the Kabat definition system), a heavy chain complementarity determining region 3 (CDR-H3) (according to the Kabat definition system), a light chain complementarity determining region 1 (CDR-L1) (according to the Kabat definition system), a light chain complementarity determining region 2 (CDR-L2) of (according to the Kabat definition system), and a light chain complementarity determining region 3 (CDR-L3) (according to the Kabat definition system).

[0114] In some embodiments, the antibody, the antibody fragment or the SAR of the present disclosure comprises a heavy chain variable region (vH) containing no more than 25 amino acid variations (e.g., no more than 25, 24, 23, 22, 21, 20, 19, 18, 17, 16, 15, 14, 13, 12, 11, 10, 9, 8, 7, 6, 5, 4, 3, 2, or 1 amino acid variation) in the framework regions as compared with the vH comprising the amino acid sequence of SEQ ID NO: 848-967. Alternatively or in addition (e.g., in addition), the antibody, the antibody fragment or the SAR of the present disclosure comprises a light chain variable region (vL) containing no more than 25 amino acid variations (e.g., no more than 25, 24, 23, 22, 21, 20, 19, 18, 17, 16, 15, 14, 13, 12, 11, 10, 9, 8, 7, 6, 5, 4, 3, 2, or 1 amino acid variation) in the framework regions as compared with the vL comprising the amino acid sequence of SEQ ID NO: 722-847. In some embodiments, the single domain antibody (e.g., vHH, FHVH), the antibody fragment or the SAR of the present disclosure comprises a vHH or FHVH domain containing no more than 25 amino acid variations (e.g., no more than 25, 24, 23, 22, 21, 20, 19, 18, 17, 16, 15, 14, 13, 12, 11, 10, 9, 8, 7, 6, 5, 4, 3, 2, or 1 amino acid variation) in the framework regions as compared with the vHH or FHVH comprising the amino acid sequence of SEQ ID NO: 580-607, 1081-1163 and 1164-1172.

[0115] In some embodiments, the antibody, the antibody fragment or the SAR of the present disclosure comprises a heavy chain comprising an amino acid sequence least 75% (e.g., 75%, 80%, 85%, 90%, 95%, 98%, or 99%) identical to the amino acid sequence of SEQ ID NO: 848-967. In some embodiments, the antibody, the antibody fragment or the SAR of the present disclosure comprises a light chain comprising an amino acid sequence least 75% (e.g., 75%, 80%, 85%, 90%, 95%, 98%, or 99%) identical to the amino acid sequence of SEQ ID NO: 722-847. In some embodiments, the antibody, the antibody fragment or the SAR of the present disclosure comprises a vHH or FHVH comprising an amino acid sequence least 75% (e.g., 75%, 80%, 85%, 90%, 95%, 98%, or 99%) identical to the amino acid sequence of SEQ ID NO: 580-607, 1081-1163 and 1164-1172.

[0116] In an embodiment, the drug (e.g., an antibody, antibody drug conjugate etc.) binds to an epitope (i.e., SHARP-tag) derived from an endogenous protein. In an embodiment, the drug binds to the extracellular domain of an endogenous protein. In an embodiment, the drug binds to an epitope located in the N-terminal 6, 7, 8, 9, 10, 11, 12, 13, 14, 15, 16, 17, 18, 19, 20, 21, 22, 23, 24, 25 or 30 amino acid residues of the extracellular domain of an endogenous protein. In an example embodiment, an epitope tag (i.e., SHARP-tag) located in the N-terminal region of the extracellular domain of an endogenous protein is represented by SEQ ID NO: 550-579, 692-707, 712-720 or a variant thereof with 1, 2, 3, 4 or 5 amino acid substitutions. In an embodiment, the drug binds to an epitope located in the C-terminal 6, 7, 8, 9, 10, 11, 12, 13, 14, 15, 16, 17, 18, 19, 20, 21, 22, 25, or 30 amino acid residues of the extracellular domain of an endogenous protein. In an example embodiment, an epitope tag (i.e., SHARP-tag) located in the C-terminal region of the extracellular domain of an endogenous protein is represented by SEQ ID NO: 708-711 or a variant thereof with 1, 2, 3, 4 or 5 amino acid substitutions. In an embodiment, the amino acid residues are numbered based on the mature proteins that lack the signal peptide. In an embodiment, the drug binds to an epitope that is in the juxta membrane 6, 7, 8, 9, 10, 11, 12, 13, 14, 15, 16, 17, 18, 19, 20, 21, 22, 23, 24, 25, 30, 35, 40, 50 or 60 amino acid residues of the extracellular domain of an endogenous protein. In an embodiment, the juxta membrane region is the region located on the extracellular side of the transmembrane region of a protein. In an example embodiment, an epitope tag (i.e., SHARP-tag) located in the juxta membrane region of the extracellular domain of an endogenous protein is represented by SEQ ID NO: 557-579 or a variant thereof with 1, 2, 3, 4 or 5 amino acid substitutions. In an embodiment, an epitope tag (i.e., SHARP-tag) is in or derived from the unfolded region of an endogenous protein. In an embodiment, an epitope tag (i.e., SHARP-tag) is in or derived from the random coil or unstructured region of an endogenous protein. In an embodiment, the tag is in or derived from the loops connecting secondary structure elements within an endogenous protein. In one embodiment, the epitope (i.e., SHARP-tag) comprises, consists of, or overlaps with an amino acid sequence located at or near the N-terminus, C-terminus, juxta membrane, hinge, stalk, or linker regions of an endogenous protein, wherein the sequence corresponds to a contiguous stretch of amino acids selected from the group consisting of residues 1-6, 1-7, 1-8, 1-9, 1-10, 1-11, 1-12, 1-15, 1-20, 1-25, 1-30, 1-50; 2-8, 2-9, 2-10, 2-11, 2-12, 2-15, 2-20, 2-25, 2-30, 2-50; 3-9, 3-10, 3-11, 3-12, 3-15, 3-20, 3-25, 3-50; 4-10, 4-15, 4-20, 4-25, 4-30, 4-50; 5-11, 5-15, 5-20, 5-25, 5-30, 5-50; 6-12, 6-15, 6-20, 6-25, 6-30, 6-50; and 7-13, 7-15, 7-20, 7-20, 7-50, 8-14, 8-20, 8-25, 8-50, 9-15, 9-20, 9-25, 9-30, 9-50, 10-16, 10-20, 10-25, 10-30, 10-50, 11-17, 11-25, 11-30, 11-50, 12-18, 12-25, 12-30, 13-19, 13-25, 13-30, 14-20, 14-25, 14-30, 15-21, 15-25, 15-30, 15-50, 20-50, 25-50, 30-50, 35-50, or 40-50. In an embodiment, the endogenous protein is listed in Table 1. The disclosure also provides recombinant polynucleotides encoding recombinant polypeptide comprising the epitope tags (i.e., SHARP-tag) described herein. Examples of TAG-SAR comprising the SHARP-tags described herein are provided in SEQ ID NO: 7708-8703.

[0117] In one aspect, the epitope tag is identical in composition to a sequence present in an endogenous human protein. In one aspect, the epitope tag is identical in composition to a sequence present in the extracellular domain of an endogenous protein. In an embodiment, the epitope tag (i.e., SHARP-tag) is in the extracellular region of an endogenous protein. In an embodiment, the endogenous protein is not an intracellular protein. In an embodiment, the endogenous protein is a human protein. In an embodiment, the human protein is human CD79b. In an embodiment, the endogenous protein is a monkey protein. In an embodiment, the monkey protein is CD79b. In one aspect, the epitope tag is identical in composition to a sequence present at the N-terminus or near the N-terminus of the extracellular domain of an endogenous mature protein or polypeptide. A mature protein or polypeptide refers to a protein or polypeptide that lacks the signal peptide. In one aspect, the epitope tag is identical in composition to a sequence present at the C-terminus or near the C-terminus of the extracellular domain of an endogenous protein. In one aspect, the epitope tag is identical in composition to a sequence present in the juxta membrane region of the extracellular domain of an endogenous protein. In one aspect, the endogenous protein is a Type I or a Type II transmembrane protein. In one aspect, the epitope tag is identical in composition to a sequence present within the N-terminal 5, 6, 7, 8, 9, 10, 11, 12, 13, 14, 15, 16, 17, 18, 19, 20, 21, 22, 23, 24, 25, 26, 27, 28, 29 or 30 residues of the extracellular domain of a mature endogenous human protein, optionally wherein the protein is a Type I transmembrane protein. In one aspect, the epitope tag is identical in composition to a sequence present within the C-terminal 5, 6, 7, 8, 9, 10, 11, 12, 13, 14, 15, 16, 17, 18, 19, 20, 21, 22, 23, 24, 25, 26, 27, 28, 29 or 30 residues of the extracellular domain of an endogenous protein, optionally wherein the endogenous protein is a Type II transmembrane protein. In one aspect, the epitope tag is identical in composition to a sequence present within the juxta membrane 5, 6, 7, 8, 9, 10, 11, 12, 13, 14, 15, 16, 17, 18, 19, 20, 21, 22, 23, 24, 25, 26, 27, 28, 29 or 30 residues of the extracellular domain of an endogenous protein, optionally wherein the endogenous protein is a human protein.

[0118] In an embodiment, the endogenous protein is not a nuclear protein. A nuclear protein is a protein found in the cell nucleus. In an embodiment, the endogenous protein is not human La protein. In an embodiment, the epitope tag (i.e., SHARP-tag) has less than 50% (e.g., 40%, 30%, 20%, 10%, 5%, 1%) sequence identity to a peptide present in the human La protein. In an embodiment, the epitope tag is not a human La protein epitope (e.g., E5B9 or E7B6). In an embodiment, the endogenous protein is not an autoantigen. As used herein, the term “autoantigen” refers to an endogenous (self-derived) antigen that is recognized by the immune system of the host, leading to an autoimmune response. In an embodiment, antibodies against the endogenous protein or the epitope tag are not associated with any autoimmune disease. In an embodiment, the endogenous protein and/or the epitope tag does not bear homology to a viral protein. In an embodiment, the endogenous protein is not expressed in both epithelial and mesenchymal cells. In an embodiment, the endogenous protein is not expressed in both the cytoplasm and cell membrane. In an embodiment, the endogenous protein is not known to be localized in the nucleus. In an embodiment, the endogenous protein is not known to and/or believed to act as a transcription factor. In an embodiment, the endogenous protein is not involved in the normal development of organs and tissues, optionally wherein the tissue is kidney or breast. In an embodiment, mutations in the endogenous protein are not linked to a congenital disease, optionally wherein the disease is lacrimo-auriculo-dento-digital (LADD) syndrome, Alpert syndrome or syndromic craniosynostosis. In an embodiment, the endogenous protein is not human FGFR2 protein. In an embodiment, the epitope tag is not a wild type or a mutant FGFR2 epitope. In an embodiment, the epitope is less than 10 amin acids in length. In an embodiment, the epitope tag (i.e., SHARP-tag) lacks two consecutive Val residues. In an embodiment, mutations in the epitope or the sequence comprising the epitope tag (i.e., SHARP-tag) have not been linked to development of any human disease. In an embodiment, mutations in the epitope or in the sequence comprising the epitope tag (i.e., SHARP-tag) have not been linked to increased risk of the development of a cancer, optionally wherein the cancer is endometrial, breast, melanoma, and/or cholangiocarcinoma. In an embodiment, mutations in the epitope or in the sequence comprising the epitope tag (i.e., SHARP-tag) have not been linked to increased risk of a congenital disease, optionally wherein the disease is lacrimo-auriculo-dento-digital (LADD) syndrome, Alpert syndrome and/or syndromic craniosynostosis. In an embodiment, the sequence comprising the epitope tag (i.e., SHARP-tag) is not found to be mutated in patient who is at an increased risk of a congenital disease and/or a cancer, optionally wherein the disease is Alpert syndrome or syndromic craniosynostosis and cancer is endometrial, breast, melanoma, and/or cholangiocarcinoma. In an embodiment, the sequence comprising the epitope tag (i.e., SHARP-tag) or a variant thereof is not a mutation hot-spot for any known somatic or a germline mutation. In an embodiment, the sequence comprising the epitope tag (i.e., SHARP-tag) or a variant thereof is not derived from the region of an endogenous protein that is a mutation hot-spot for any known somatic or a germline mutation. In an embodiment, the sequence comprising the epitope tag (i.e., SHARP-tag) or a variant thereof is not derived from the region of an endogenous protein that is a mutation hot-spot for any known mutation linked to a human disease, optionally wherein the disease is a congenital disease or a cancer. “As used herein, a ‘mutation hot spot’ refers to one or more amino acid residues or nucleotide positions within a gene or protein that are recurrently mutated across independent biological samples. In an embodiment, epitope tag does not comprise, consist of, or contain any sequence represented by SEQ ID NOs: 450-455 or a variant with at least 80% sequence identity thereto. In an embodiment, the tag sequence exhibits less than 80% sequence identity to any one of SEQ ID NOs: 450-455, as determined by BLAST using default parameters.

[0119] In an embodiment, the endogenous protein is expressed on hematopoietic cells. In an embodiment, the endogenous protein is expressed in lymphoid cells. In an embodiment, the endogenous protein is expressed on B-lymphoid cells. In an embodiment, the endogenous protein is expressed on T-lymphoid cells. In an embodiment, the endogenous protein is expressed on plasma cells. In an embodiment, the endogenous protein is expressed preferentially and/or selectively on hematopoietic cells. In an embodiment, the endogenous protein is expressed preferentially and/or selectively on lymphoid cells. In an embodiment, the endogenous protein is expressed preferentially and/or selectively on B lymphoid cells. In an embodiment, the endogenous protein is expressed preferentially and/or selectively on T lymphoid cells. In an embodiment, the endogenous protein is expressed on B lymphocytes and/or plasma cells at a level that is at least 2-fold greater than its expression on T lymphocytes. In an embodiment, the endogenous protein is expressed preferentially and/or selectively on plasma cells at a level that is at least 2-fold greater than its expression on T lymphocytes. In an embodiment, the endogenous protein is not expressed on lung, gastrointestinal, liver, kidney, heart, brain, prostate, ovarian, uterine, nerve, muscle, stomach, esophageal and/or skin cells. In an embodiment, the endogenous protein is expressed on lung, gastrointestinal, liver, kidney, heart, brain, prostate, ovarian, uterine, nerve, muscle, stomach, esophageal and/or skin cells at a level that is less than 20%, (e.g., 19% 15%, 10%, 7%, 5%, 2%, 1% or 0.5% etc.) of its expression on peripheral blood derived B lymphocytes.

[0120] In an embodiment, the expression of the endogenous protein is measured at the transcript (i.e., mRNA) level. In an embodiment, the expression of the endogenous protein is measured using quantitative PCR. In an embodiment, the expression of the endogenous protein is measured using next generation sequencing or microarrays. In an embodiment, the expression of the endogenous protein is measured at the protein level. In an embodiment, the expression of the endogenous protein is measured using flow cytometry or immunohistochemistry. In an embodiment, the endogenous protein is selected from the group consisting of CD8a, CD8b, CD4, CD19, CD20, CD22, CD23, CD30, CD33, CD38, CD45, CD56, CD70, CD79a, CD79b, CD123, CD138, CD157, CD179b, CD200R, CD229, ICAM1, CD276, CD324, FcRH5, MPL (or TPO-R), FLT3, Lym1, Lym2, CS1, BCMA, TAC1, GPRC5D, CLL1, CSF2RA, LAMP1, TSHR, TnAg, Her2, EGFR, TROP2, Nectin 4, STEAP1, STEAP2, PSMA, PSCA, NKG2D, CXCR4, TCRβ1, TCRβ2, BST1, IL1RAP, ALK, Folate Receptor 1, TAJ, ROR1, CEA, DLL3, FAP, CSFR1, PD1, PDL1, MUC16, c-MET, EpCAM and TCRgd.

[0121] In an embodiment, the endogenous protein is selected from a protein shown in TABLE 1.

TABLE 1
Example of endogenous proteins and antigens

CD19; CD5; CD123; CD22; CD30; CD171; CS-1 (CRACC, SLAMF7, CD319, and 19A24);
CD45, C-type lectin-like molecule-1 (CLL-1 or CLECL1); CD33; epidermal growth factor
receptor variant III (EGFRviii); ganglioside G2 (GD2); TNF receptor family member B cell
maturation (BCMA); Tn antigen ((Tn Ag); prostate-specific membrane antigen (PSMA);
Receptor tyrosine kinase-like orphan receptor 1 (ROR1); Fms Like Tyrosine Kinase 3 (FLT3);
Tumor-associated glycoprotein 72 (TAG72); CD38; CD44v6; a glycosylated CD43 epitope
expressed on acute leukemia or lymphoma but not on hematopoietic progenitors; a
glycosylated CD43 epitope expressed on non-hematopoietic cancers; Carcinoembryonic
antigen (CEA); Epithelial cell adhesion molecule (EPCAM); B7H3 (CD276); KIT (CD117);
Interleukin-13 receptor subunit alpha-2 (IL-13Ra2 or CD213A2); Mesothelin; Interleukin 11
receptor alpha (IL-11Ra); prostate stem cell antigen (PSCA); vascular endothelial growth
factor receptor 2 (VEGFR2); Lewis(Y) antigen; CD24; Platelet-derived growth factor receptor
beta (PDGFR-beta); Stage-specific embryonic antigen-4 (SSEA-4); CD20; Folate receptor
alpha; Receptor tyrosine-protein kinase ERBB2 (Her2/neu); Mucin 1, cell surface associated
(MUC1); epidermal growth factor receptor (EGFR); neural cell adhesion molecule (NCAM);
carbonic anhydrase IX (CA1X); tyrosinase; Fucosyl GM1; sialyl Lewis adhesion molecule
(sLe); ganglioside GM3; transglutaminase 5 (TGS5); high molecular weight-melanoma
associated antigen (HMWMAA); claudin 6 (CLDN6); thyroid stimulating hormone receptor
(TSHR); G protein coupled receptor class C group 5, member D (GPRC5D); chromosome X
open reading frame 61 (CXORF61); CD97; CD179a; anaplastic lymphoma kinase (ALK);
mammary gland differentiation antigen (NY-BR-1); Wilms tumor protein (WT1); Cancer/testis
antigen 1 (NY-ESO-1); Melanoma-associated antigen 1 (MAGE-A1); melanoma antigen
recognized by T cells 1 (MelanA or MARTI); Rat sarcoma (Ras) mutant; human Telomerase
reverse transcriptase (hTERT); human papilloma virus E6 (HPV E6); human papilloma virus
E7 (HPV E7); CD79a; CD79b; CD72; Leukocyte-associated immunoglobulin-like receptor 1
(LAIR1); C-type lectin domain family 12 member A (CLEC12A); EGF-like module-
containing mucin-like hormone receptor-like 2 (EMR2); lymphocyte antigen 75 (LY75);
Glypican-3 (GPC3); Fc receptor-like 5 (FCRL5); immunoglobulin lambda-like polypeptide 1
(IGLL1); Biotin; c-MYC epitope Tag; CD34; LAMP1 TROP2; GFRalpha4; CDH17; CDH6;
CDH19; CD200R; Slea (CA19.9; Sialyl Lewis Antigen) Fucosyl-GM1; PTK7; CDH1-CD324;
DLL3; CD276/B7H3; IL11Ra; IL13Ra2; CD179b-IGLl1; ALK, TCR-gamma-delta; NKG2D;
CD32 (FCGR2A); CSPG4-HMW-MAA; Tim1-/HVCR1; CSF2RA (GM-CSFR-alpha);
TGFbetaR2; VEGFR2/KDR; Lewis Ag; TCR-alpha chain, TCR-beta1 chain; TCR-beta2
chain; TCR-gamma chain; TCR-delta chain; FITC; Luteinizing hormone receptor (LHR);
Follicle stimulating hormone receptor (FSHR); Chorionic Gonadotropin Hormone receptor
(CGHR); CCR4; SLAMF6; SLAMF4; HIV1 envelope glycoprotein; HTLV1-Tax; CMV pp65;
EBV-EBNA3c; influenza A hemagglutinin (HA); GAD; PDL1; Guanylyl cyclase C (GCC);
KSHV-K8.1 protein; KSHV-gH protein; auto antibody to desmoglein 3 (Dsg3); autoantibody
to desmoglein 1 (Dsg1); HLA-A2; HLA-A2:01, HLA-B; HLA-C; HLA-DP; HLA-DM; HLA-
DOA; HLA-DOB; HLA-DQ; HLA-DR; HLA-G; IGE; CD99; Lym1; Lym2; RAS G12V;
Tissue Factor 1 (TF1); AFP; claudin18.2 (CLD18A2 OR CLDN18A.2); STEAP1; STEAP2,
LIV1; NECTIN-4; CRIPTO; GPA33; BST1/CD157; low conductance chloride channel;
TAJ/TNFRSF19, MPL (TPO-R), KIR3DL2, CD32b, CD229, Toso, BAFF-R, OR2H1, p95-
Her2, huTAG2, immunoglobulin kappa light chain, immunoglobulin gamma light chain,
SARS-cov2 spike glycoprotein, SARS-cov2 Receptor binding domain, CSF1R, mutant p53,
p53-R175H mutant, p53-R248Q mutant, NPM1c, mutant NPM1c, PRAME1, Melanoma-
associated antigen 4 (MAGE-A4), gp100, IL23R, MYCN, PD1, PDL1, and Myelin
Oligodendrocyte Glycoprotein (MOG).

[0122] In an example embodiment, the epitope tags derived from an endogenous protein has a sequence represented by SEQ ID NO:692-720, 550-579 or variants thereof that differ in length by 1, 2, 3, 4 or 5 amino acids and/or have conservative substitutions of 1, 2, 3, 4 or 5 amino acids. In an embodiment, the invention provides antibodies, antibody fragments, antibody drug conjugate, radio-labelled antibodies and non-immunoglobulin binding domains that bind to SEQ ID NO:692-720, 550-579 or variants thereof that differ in length by 1, 2, 3, 4 or 5 amino acids and/or have conservative substitutions of 1, 2, 3, 4 or 5 amino acids. In an embodiment, the invention provides recombinant polynucleotides, recombinant polypeptides (e.g. SAR, e.g., CAR, SIR, zSIR etc.), cells, vectors, and compositions comprising epitope tags derived from an endogenous protein with sequence represented by SEQ ID NO:692-720, 550-579 or variants thereof that differ in length by 1, 2, 3, 4 or 5 amino acids and/or have conservative substitutions of 1, 2, 3, 4 or 5 amino acids. Also provided are methods for detection, isolation, separation, enrichment, depletion, tracking and control of cells and compositions comprising recombinant proteins (e.g. SAR, e.g., CAR, SIR, zSIR etc.) comprising epitope tags derived from an endogenous protein with sequence represented by SEQ ID NO:692-720, 550-579 or variants thereof that differ in length by 1, 2, 3, 4 or 5 amino acids and/or have conservative substitutions of 1, 2, 3, 4 or 5 amino acids.

[0123] In one embodiment, the SHARP-tag does not interfere with one or more biological functions of the recombinant protein to which it is attached. Such recombinant proteins may include, for example, synthetic antigen receptors (SARs), antibodies, antibody fragments, cytokines, chemokines, or combinations thereof. The biological functions preserved in the presence of the pe SHARP-tag may include, but are not limited to, protein expression, proper folding, in vivo half-life, target binding activity, signaling activity, and/or immunogenicity.

[0124] The SHARP-tag is engineered to minimize immune recognition by the patient's immune system. It may be derived from human self-proteins but from regions typically not exposed to the immune system. Computational immunogenicity prediction tools can be used to verify that the peptide has low predicted binding affinity to common HLA class II alleles (reducing risk of helper T cell-driven antibody responses against the tag). In some embodiments, the tag sequence has been screened against known allergen or pathogen sequences to ensure it does not mimic any common viral or bacterial epitope that could lead to pre-existing immunity. The small size also contributes to low immunogenicity. By keeping SHARP-tag usage typically as a single copy, the chances for a strong anti-tag immune response are further mitigated. Nonetheless, as a precaution, patients can be monitored for anti-drug antibodies (ADAs) against SHARP-tag or SABR, and if necessary, a switch to an alternate tag variant (one of the many sequences provided) and corresponding antibody variant can be used for subsequent treatment cycles.

[0125] In one aspect, the epitope tag is non-immunogenic, hypoimmunogenic, or minimally immunogenic. In certain embodiments, the epitope tag does not induce, or induces only a minimal or reduced immune response when administered to a subject. The immune response may be humoral and/or cellular in nature. Methods for evaluating immunogenicity are well known in the art and include, without limitation, measurement of antibody production using ELISA, Western blotting, or ELISPOT, and assessment of cytokine production. The cytotoxic activity of T cells specific for cells expressing the tagged protein may be measured using cytotoxicity assays.

[0126] In various embodiments, the immune response is assessed by detecting antibodies specific to the epitope tag, or to polypeptides, vectors, cells, or compositions comprising the epitope tag. Alternatively, or additionally, the immune response may be measured by assessing the presence or expansion of T cell clones reactive against the epitope tag.

[0127] In certain embodiments, epitope tags described herein (e.g., SEQ ID NOs: 1-123, 150-167, 251-440, 631-650, 651-654, 656, 674-676, 686, and 689) elicit no immune response, or a minimal or reduced immune response, when compared to conventional epitope tags such as FLAG (e.g., SEQ ID NO: 1527) or Strep-tag (e.g., SEQ ID NO: 1532). In one aspect, a recombinant protein (e.g., a TAG-SAR) comprising an epitope tag described herein (e.g., SEQ ID NOs: 1-123) elicits no immune response or a reduced immune response compared to the same protein bearing a FLAG tag or a Strep-tag. Similarly, recombinant cells expressing such tagged proteins demonstrate no greater immunogenicity, or reduced immunogenicity, relative to cells expressing proteins with conventional epitope tags. In one aspect, the epitope tag does not induce, or induces only a minimal immune response (e.g., humoral and/or cellular) when administered by any of various routes, including oral, subcutaneous, intradermal, intravenous, or intraperitoneal administration.

[0128] In an embodiment, the presence of an epitope tag (e.g., a tagged cassette) does not significantly stimulate an immune response against cells (e.g., T cells) that are engineered to express TAG-SAR. In an embodiment, the cells comprising the TAG-SAR demonstrate in vivo persistence of at least 30%, 40%, 50%, 60%, 70%, 80%, 90%, 95%, or 99% compared to cells expressing the SAR without the tagged cassette. In vivo persistence can be measured using techniques known in the art, such as flow cytometry and/or quantitative polymerase chain reaction (qPCR). In an embodiment, the cells expressing the TAG-SAR with the tagged cassette show a humoral or cellular antibody response that is no greater than 30%, 40%, 50%, 60%, 70%, 80%, 90%, 95%, or 99% greater than the humoral or cellular immune response against cells expressing SAR without an epitope tag or tagged cassette. The humoral and cellular immune responses can be measured using techniques known in the art, such as ELISA, ELISPOT, mass spectrometry, or next-generation sequencing. In another embodiment, the presence of the tag does not significantly interfere with generating a viral vector that incorporates the nucleic acid with the tag. The titer of a viral vector with nucleic acid that incorporates the tag (e.g., TAG-SAR) is at least 30%, 40%, 50%, 60%, 70%, 80%, 90%, 95%, or 99% of a comparable viral vector with nucleic acid (e.g., SAR) that does not have a tagged cassette. The viral titer can be measured using techniques known in the art, such as qPCR or p24 ELISA.

[0129] In an embodiment, incorporation of an epitope tag (e.g., a tag cassette) does not substantially impair the expression and/or functional activity of the synthetic antigen receptor (SAR) or the cells engineered to express the SAR. In certain embodiments, a SAR comprising the tag cassette (i.e., TAG-SAR) demonstrates expression levels, when expressed in a suitable host cell, that are at least about 25%, 30%, 40%, 50%, 60%, 70%, 80%, 90%, 95%, or 99% of the expression level observed for an otherwise identical SAR lacking the tag cassette. Expression levels may be determined using any suitable method known in the art, including but not limited to quantitative reverse transcription PCR (qRT-PCR), Protein L staining, or the Topanga assay.

[0130] In an embodiment, the functional activity of the TAG-SAR is at least about 30%, 40%, 50%, 60%, 70%, 80%, 90%, 95%, or 99% of the activity observed for an untagged SAR. Activity may be assessed using any suitable assay, including but not limited to the Jurkat NFAT-GFP reporter assay, measurement of cytokine production (e.g., IFNγ, TNFα, IL-2 via ELISA), and/or cytotoxicity assays (e.g., Matador cytotoxicity assay).

[0131] In a further embodiment, the TAG-SAR retains binding to its cognate target antigen at a level that is at least about 30%, 40%, 50%, 60%, 70%, 80%, 90%, 95%, or 99% of the antigen-binding activity of an otherwise identical SAR lacking the tag cassette, Binding activity may be measured using methods known in the art, such as the Topanga binding assay. In one aspect, the inclusion of an epitope tag (e.g., a tag cassette) does not substantially elicit an immune response against the engineered cells (e.g., T cells) that express the tag. In certain embodiments, cells comprising the epitope tag or tag cassette exhibit in vivo persistence that is at least about 30%, 40%, 50%, 60%, 70%, 80%, 90%, 95%, or 99% of the persistence observed in otherwise identical cells lacking the tag or tag cassette. In vivo persistence may be assessed using techniques known in the art, including but not limited to flow cytometry or quantitative PCR (qPCR). In another aspect, the presence of the epitope tag or tag cassette does not induce a humoral or cellular immune response that exceeds the response elicited by untagged cells by more than about 30%, 40%, 50%, 60%, 70%, 80%, 90%, 95%, or 99%. The humoral and/or cellular immune response may be evaluated using methods known in the art.

[0132] In one aspect the presence of the SHARP-tag (e.g., epitope tag or the tagged cassette) does not significantly interfere with the expression and/or activity of the cells (e.g., T cells) engineered to express the tag. In one aspect the cells expressing the SHARP-tag, or the tagged cassette show activity that is at least 30%, 40%, 50%, 60%, 70%, 80%, 90%, 95% or 99% of the activity of the cells without the tagged cassette. Activity of the cells can be measured using techniques known in the art, such as Jurkat NFAT-GFP assay, cytokine production (e.g., ELISA for IFNγ, TNFα, IL2 etc) and/or measurement of cytotoxicity (e.g., Matador cytotoxicity assay).

[0133] In one aspect, the SHARP-tag (or epitope tag) is encoded by a recombinant polynucleotide. In one aspect, the epitope tag is part of a non-natural (i.e., synthetic or recombinant) protein or non-natural polypeptide. In one aspect, the epitope tag is part of a recombinant polypeptide. In one aspect, the epitope tag is part of a recombinant polypeptide that encodes for a receptor, cytokine, chemokine, ligand, antibody, cytoskeleton protein, secreted protein, membrane glycoprotein or an adhesion molecule. In one aspect, the receptor is a synthetic receptor. In one aspect, the epitope tag is part of a chimeric antigen receptor (CAR), a next generation chimeric antigen receptor (CAR), a synthetic antigen receptor (e.g., SIR, zSIR, z16SAR, uTCR-SAR, Ab-TCR, HIT, STAR, TFP, TRI-TAC, KIR-CAR or a recombinant TCR etc.). In one aspect, the epitope tag is part of a recombinant polypeptide or a recombinant protein that is expressed on a recombinant cell, i.e., a cell that is genetically engineered. In one aspect, the epitope tag is part of a recombinant polypeptide or a recombinant protein that is secreted from a recombinant cell, i.e., a cell that is genetically engineered. In an embodiment, the recombinant cell expresses a synthetic receptor (e.g., a CAR, a next generation CAR, a SAR etc.). In an embodiment, the epitope tag is a part of a recombinant protein that is co-expressed with a synthetic receptor. In an embodiment, the epitope tag is a part of a recombinant protein that is expressed on a vector, e.g., a viral vector, viral like particle, a lipid nanoparticle etc. In an embodiment, the epitope tag is a part of a recombinant protein that is expressed on packaging cells used to produce a viral vector.

[0134] In one aspect, the epitope tag comprises, contains, or consists of a linear epitope (also referred to as a sequential epitope). A linear epitope is a continuous sequence of amino acids (i.e., primary structure) that is recognized by an antibody based on its amino acid sequence, rather than its three-dimensional conformation. In one aspect, the epitope tag is not a conformational epitope, i.e., it does not rely on a specific tertiary structure for antibody recognition. In certain embodiments, the epitope tag lacks disulfide bonds, including intramolecular and intermolecular disulfide bonds, and may further lack cysteine residues. In one aspect, the epitope tag is not a mimotope.

[0135] In certain embodiments, the linear epitope is derived from the extracellular domain of an endogenous human protein or a variant thereof. In a specific embodiment, the source protein is preferentially expressed on hematopoietic cells, B lymphocytes, or plasma cells.

[0136] In an embodiment, the SAR is a single chain SAR, a double chain SAR or a multichain SAR. In an embodiment, the SAR is selected from the group consisting of CAR, SIR, HIT, STAR, Ab-TCR, zSIR, z16SAR, uTCR-SAR and/or recombinant TCR. In one embodiment, the disclosure provides a recombinant polynucleotide, the encoded recombinant polypeptide, and cells, vector and composition comprising and/or encoding such as recombinant polypeptide, wherein the recombinant polynucleotide encodes an epitope tag (or tag) comprising one or more features selected from the group consisting of the following: a) the tag is less than 50, 30, 29, 28, 27, 26, 25, 24, 23, 22, 21, 20, 19, 18, 17, 16, 15, 14, 13, 12, 11, 10, 9, 8, 7, 6 or 5 amino acids in length; b) the tag is non-immunogenic or hypoimmunogenic or minimally immunogenic, c) tag is hydrophilic and/or polar; optionally wherein the tag is non-hydrophobic; d) tag is recognized by an drug that is approved or will be approved by a regulatory agency, optionally wherein the drug is antibody or antibody fragment or antibody drug conjugate or radiolabeled antibody; e) the tag does not interfere with the binding of the SAR to its antigen; f) the treatment of the tag-expressing SAR cells results in their killing; g) treatment of the tag expressing SAR cells results in killing of the bystander cells; and/or h) the tag is derived from an endogenous protein. In an embodiment, the recombinant polynucleotide encodes a SAR. In an embodiment, the SAR is a single chain SAR (e.g., a CAR) or double chain SAR. In an embodiment, the SAR is selected from the group consisting of SIR, HIT, STAR, Ab-TCR, TFP, zSIR, z16SAR, CD16-SAR, uTCR-CAR, Link-SAR, zSAR, and/or recombinant TCR.

[0137] In some embodiments, the epitope tag comprises a peptide selected from SEQ ID NOs: 692-720, 550-579 or a variant thereof. Variants may include polypeptides having one, two, or three amino acid substitutions, deletions, or additions relative to SEQ ID NOs: 692-720, 550-579, provided the variant retains antibody recognition and/or desired properties. The disclosure further provides recombinant polynucleotides, polypeptides, expression vectors, host cells, and pharmaceutical compositions comprising one or more of the epitope tags represented by SEQ ID NOs: 692-720, 550-579 or variants thereof.

[0138] In certain embodiments, the invention provides synthetic antigen receptors (e.g., SARs or CARs) in which one or more epitopes, such as those represented by SEQ ID NOs: 674-676, are replaced with the epitope tags represented by SEQ ID NOs: 692-720, 550-579 or variants thereof. In an embodiment, the epitope tags described herein (e.g., SEQ ID NOs: 692-720, 550-579 or variants) are minimally immunogenic or hypoimmunogenic and do not substantially interfere with the expression and/or activity of the recombinant polypeptide to which they are fused. In a further embodiment, recombinant polynucleotides, polypeptides, vectors, cells, and compositions comprising the disclosed epitope tags are minimally immunogenic or hypoimmunogenic when administered to a human subject.

[0139] In an embodiment, the invention provides a SAR (e.g., CAR) comprising an epitope tag with the sequence represented by SEQ ID NO:721 or variants thereof. In an embodiment, the invention provides a cell expressing a SAR (e.g., CAR) comprising an epitope tag with the sequence represented by SEQ ID NO:721 or variants thereof. In an embodiment, the SAR is a double chain SAR. In an embodiment, the SAR is selected from the group consisting of SIR, HIT, STAR, Ab-TCR, zSIR, z16SAR, uTCR-SAR and/or recombinant TCR. In an embodiment, the SAR comprising the epitope tag with the sequence represented by SEQ ID NO:721 or variants thereof can be detected in vitro and/or in vivo using luminescence by the addition of a furimazine and LgBiT.

[0140] In one embodiment, the epitope tag comprises natural or naturally occurring amino acid residues. In another embodiment, the epitope tag comprises non-natural, non-naturally occurring, or synthetic amino acid residues. Another embodiment includes a mixture of natural and non-natural amino acid residues.

[0141] In one aspect, the present invention provides novel epitope tags, designated SHARP-tags. and functional variants thereof, as well as polynucleotides, polypeptides, expression vectors, host cells, and pharmaceutical compositions comprising such epitope tags. In certain embodiments, the epitope tag comprises a sequence selected from SEQ ID NOs: 1-123, 150-167, 251-440, 550-579, 631-650, 651-654, 656, 674-676, 686, 689, and 692-720, or a functional variant thereof. In other embodiments, the SHARP-tags consists of a sequence selected from SEQ ID NOs: 1-123, 150-167, 251-440, 550-579, 631-650, 651-654, 656, 674-676, 686, 689, and 692-720, or a functional variant thereof.

[0142] As used herein, the term “functional variant” refers to a polypeptide sequence that differs from a reference sequence (e.g., SEQ ID NO: 1-123, 150-167, 251-440, 550-579, 631-650, 651-654, 656, 674-676, 686, 689, and 692-720, or a functional variant thereof) by one or more amino acid substitutions, deletions, or insertions, but retains at least one functional property of the reference epitope tag. Such functional properties may include, but are not limited to, (i) recognition by an antibody that specifically binds the reference epitope, (ii) ability to be detected or enriched using an antibody or ligand, (iii) absence or minimization of interference with the biological function of the protein to which the tag is fused, and/or (iv) low or minimal immunogenicity. In certain embodiments, functional variants exhibit at least 70%, 80%, 85%, 90%, 95%, 98%, or 99% sequence identity to a reference sequence, and retain binding reactivity to an antibody that specifically recognizes the corresponding unmodified epitope tag. In example embodiments, the epitope tag comprises or consists of the sequence RSEDRY (SEQ ID NO: 1), RSEDRYR (SEQ ID NO: 2), RSEDRYRN (SEQ ID NO: 3), RSEDRYRNP (SEQ ID NO: 4), RSEDRYRNPK (SEQ ID NO: 5), RSEDRYRNPKG (SEQ ID NO: 6), RSEDRYRNPKGS (SEQ ID NO: 7), RSEDRYRNPKGS (SEQ ID NO: 8), ARSEDRY (SEQ ID: 46), ARSEDRYR (SEQ ID NO:47), ARSEDRYRNPK (SEQ ID NO: 5073), ARPAKSEDLYPNPK (SEQ ID NO: 689), AKSEDLY (SEQ ID NO: 645) or functional variants (including deletion, point and length mutants) thereof with 1-5 amino acid substitutions. In an embodiment, the epitope tag (SHARP-tag) comprises additional 1 to 50 amino acids (e.g., 1, 5, 10, 25 or 50) that are present at the N-terminal and/or C-terminal of any of the sequences described in this disclosure.

[0143] The invention covers SHARP-tag variants, which may be created for various reasons (e.g., to fine-tune immunogenicity, adjust affinity for SABR variants, or to create a panel of tags distinguishable by specific antibodies). In an embodiment, the variant may be a conservative substitution, for example, replacing one basic residue (lysine) with another (arginine) or one acidic residue (glutamic acid) with aspartic acid, etc., in a way that preserves overall charge pattern and hydrophilicity. Such minor changes often do not abolish antibody binding. In another embodiment, the variant may be a length variant, for example, adding one or two residues at either end (perhaps to create a unique protease site or to add a spacing residue). An N- or C-terminal glycine or serine could be appended without fundamentally changing the epitope. In another aspect, the variant may involve order shuffling or structurally similar motifs. In some cases, the core epitope might accommodate a permutation of residues or insertion of a small spacer. Any peptide sequence that retains binding by a SABR (or functional equivalent thereof) is considered a functional SHARP-tag. This can be empirically tested by ELISA or surface plasmon resonance with SABR.

[0144] As used herein the term “binds” or “recognized by” means that the SHARP-tag peptide has a T_{1/2} of at least about 2 min for dissociation from a SABR represented (e.g., Polatuzumab vedotin, a generic variant of Polatuzumab vedotin, huMA79b, 2F2, or SN8, H2Mab-250 or antibodies with SEQ ID NO: 1182-1189). In an embodiment, a SHARP-tag peptide described herein has a Kd of about 30 nM or less for the binding to its SABR (e.g., Polatuzumab vedotin, a generic variant of Polatuzumab vedotin, huMA79b, or SN8).

[0145] An antibody or antibody molecule/fragment is said to “specifically” bind to an antigen when it recognizes its target antigen within a complex mixture of proteins and/or macromolecules. Typically, the antibody is capable of specifically interacting with and/or binding to its target but does not essentially bind to another epitope or antigen. Antibodies are said to “bind to the same epitope” if the antibodies cross-compete so that only one antibody can bind to the epitope at a given point of time, i.e. one antibody prevents the binding or modulating effect of the other.

[0146] Typically, binding that is considered specific may also have a high affinity, e.g. when the binding affinity is higher than 10⁻⁶ M (in terms of K_{d}). In particular. the binding affinity may be about 10⁻⁸ to 10⁻¹¹ M (Kt), or of about 10⁻⁹ to 10⁻¹¹ M or even higher. Thus, antibody molecules with an affinity in the picomolar range (with a K_{d} of 9.9×10⁻¹⁰ M to 10⁻¹² M) are also encompassed in the present invention. If necessary, nonspecific binding of a binding site can be reduced without substantially affecting specific binding by varying the binding conditions.

[0147] An antibody according to the invention may be an isolated antibody molecule. The term “isolated antibody molecule” as used herein refers to an antibody molecule that has been identified and separated and/or recovered from a component of its natural environment. Contaminant components of its natural environment are matter that would interfere with uses for the antibody, and may include enzymes, hormones, and other proteinaceous or non-proteinaceous solutes. In some embodiments the antibody molecule is purified to greater than 95% by weight of antibody as determined by the Lowry method, such as more than 99% by weight. An isolated antibody molecule may in some embodiments be present within foreign host cells with one or more component(s) of the antibody's natural environment not being present. Typically, an isolated antibody is prepared by at least one purification step.

[0148] The disclosure presents an extensive collection of possible SHARP-tag sequences and their analogs. These may include single amino acid mutants at each position, alanine scans, or other libraries from which SABR cross-reactive sequences were identified. The flanking N- and C-terminal residues) can be altered or omitted as long as the SABR can still bind.

[0149] In an example embodiments, the SHARP-tag comprises or consists of the sequence RSEDRY (SEQ ID NO: 1) or RSEDRYR (SEQ ID NO: 2) or a variant thereof wherein the amino acid residue R (Arg) at position 1 is mutated to E, S, N, D, F or H; and/or the amino acid residue S (Ser) at position 2 is mutated to T, A, L, M, F, G, H, I, L, or T; and/or the amino acid residue D (Asp) at position 4 is mutated to S, N, G, A, T, K, L, Y, W, R, or V; and/or the amino acid residue R (Arg) at position 5 is mutated to H, P, L, T or C; and/or the amino acid residue Y (Tyr) at position 6 is mutated to M, F, H, D, A, G, I or V; and/or the amino acid residue R (Arg) at position 7 in case of SEQ ID NO: 2 is mutated to K, E, D, G, H, L, M, Q, V, W, S, F, I, Y, P, N, T or A. In an example embodiment, the SHARP-tag comprises or consists of the sequence represented by SEQ ID NO: 2 or a variant thereof wherein the residue R (Arg) at position 7 is any naturally occurring amino acid. In an embodiment, the residue R (Arg) at position 7 is not Cys (C). In an embodiment, the SHARP-tag comprises additional 1 to 50 amino acids that are present at the N-terminal and/or C-terminal of the above sequences. In an embodiment the SHARP-tag lacks a Cys (C). In an embodiment the SHARP-tag lacks a disulfide bond. In an embodiment, the SHARP-tag lacks an Asn-X-Ser/Thr motif that would create an N-linked glycosylation site. In an embodiment, the epitope is recognized by Polatuzumab vedotin, a generic variant of Polatuzumab vedotin, 2F2, SN8 antibody, or a functional variant thereof. In an embodiment, the SHARP-tag is recognized by an antibody comprising the light chain CDR1-3 represented by SEQ ID NO: 6653-6673, 7022-7042, 7391-7411, respectively, and heavy chain CDR1-3 represented by SEQ ID NO: 6778-6798, 7147-7167, and 7516-7536, respectively. In an embodiment, the antibody binds with at least 5-fold lower affinity to a mutant of SEQ ID NO: 1-45, 93-94, 97-98, 102-103, 108,110, 112-116, 118-123, 282-320, 354-377, 410-432 in which the residue Glu (E) at position 3 is mutated to any other amino acid. In an embodiment, the SHARP-tag represents any variant of SEQ ID NO: 1-45, 93-94, 97-98, 102-103, 108,110, 112-116, 118-123, 282-320, 354-377, 410-432 which binds with at least 5-fold higher affinity to the Polatuzumab vedotin, a generic variant of Polatuzumab vedotin, 2F2, or SN8 antibody as compared to a mutant of the above sequences in which the residue Glu (E) at position 3 is mutated to any other amino acid. In an embodiment, a SHARP-tag peptide (e.g., SEQ ID NO: 1-123, 150-167) may have a T_{1/2} of at least about 2 min for dissociation from a SABR represented by Polatuzumab vedotin, a generic variant of Polatuzumab vedotin, huMA79b, 2F2, or SN8, or antibodies with SEQ ID NO: 1182-1189. In an embodiment, a SHARP-tag peptide (e.g., SEQ ID NO: 1-123, 150-167) may have a Kd of about 30 nM or less for the binding to Polatuzumab vedotin, a generic variant of Polatuzumab vedotin, huMA79b, 2F2, or SN8, or antibodies with SEQ ID NO: 1182-1189.

[0150] In an embodiment, the epitope tag (SHARP-tag) comprises or consists of the sequence X₁X₂EX₃X₄X₅X₆ wherein X₁ is selected form R, E, or H; X₂ is selected form S, T or A; X₃ is selected form D, S, N, G, A, T, K, L; X₄ is selected form R or H; X₅ is selected form Y or M; and X₆ is any amino acid or no amino acid. In an embodiment, the SHARP-tag comprises or consists of the sequence X₁X₂EX₃X₄X₅X₆ wherein X₁ is selected form R, E, or H; X₂ is selected form S, T or A; X₃ is selected form D, S, N, G, A, T, K, Q, L; X₄ is R or H; X₅ is selected form Y or M; and X₅ is any naturally occurring amino acid. In an embodiment, the SHARP-tag comprises or consists of the sequence X₁X₂EX₃X₄X₅X₆ wherein X₁ is selected form R, E, or H; X₂ is selected form S, T or A; X₃ is selected form D, S, N, G, A, T, K, L; X₄ is selected form R or H; X₅ is selected form Y or M; and X₆ is selected form R, K, E, D, G, H, L, M, Q, V, W, S, F, I, Y, P, N, T or A. In an embodiment, X₆ is any amino acid except Cys (C). In an embodiment, the SHARP-tag comprises additional 1 to 50 amino acids that are present at the N-terminal and/or C-terminal of the above sequences. In an embodiment, the SHARP-tag is recognized by Polatuzumab vedotin, a generic variant of Polatuzumab vedotin, SN8 antibody, or a functional variant thereof. In an embodiment, the SHARP-tag is recognized by an antibody comprising the light chain CDR1, CDR2 and CDR3 represented by SEQ ID NO: 6653-6661; 7022-7030 and 7391-7398, respectively, and heavy chain CDR1, CDR2 and CDR3 represented by SEQ ID NO: 6778-6786, 7147-7155, and 7516-7524, respectively. In an embodiment, a SHARP-tag peptide described herein may have a T_{1/2} of at least about 2 min for dissociation from a SABR represented by Polatuzumab vedotin, a generic variant of Polatuzumab vedotin, huMA79b, or SN8, or antibodies with SEQ ID NO: 1182-1184. In an embodiment, a SHARP-tag peptide described herein may have a Kd of about 30 nM or less for the binding to Polatuzumab vedotin, a generic variant of Polatuzumab vedotin, huMA79b, or SN8, or antibodies with SEQ ID NO: 1182-1184.

[0151] In an embodiment, the SHARP-tag comprises or consists of the sequence X₁X₂EX₃X₄X₅X₆ wherein X₁ is selected form R, S, N, D, F or H; X₂ is selected form S, T, I, L, M, V, F, H, G, or A; X₃ is selected form D, G, A, Y, W, R, or V; X₄ is selected form R, H, P, L, T or C; X₅ is selected form Y, M, F, H, D, A, G, I or V; and X₆ is any amino acid or no amino acid. In an embodiment, the SHARP-tag comprises or consists of the sequence X₁X₂EX₃X₄X₅X₆ wherein X₁ is selected form R, S, N, D, F or H; X₂ is selected form S, T, I, L, M, V, F, H, G, or A; X₃ is selected form D, G, A, Y, W, R, or V; X₄ is selected form R, H, P, L, T or C; X₅ is selected form Y, M, F, H, D, A, G, I or V; and X₆ is any naturally occurring amino acid. In an embodiment, X₆ is any amino acid except Cys (C). In an embodiment, the SHARP-tag comprises or consists of the sequence X₁X₂EX₃X₄X₅X₆ wherein X₁ is selected form R, S, N, D, F or H; X₂ is selected form S, T, I, L, M, V, F, H, G, or A; X₃ is selected form D, G, A, Y, W, R, or V; X₄ is selected form R, H, P, L, T or C; X₅ is selected form Y, M, F, H, D, A, G, I or V; and X₆ is selected form R, K, E, D, G, H, L, M, Q, V, W, S, F, I, Y, P, N, T or A. In an embodiment the SHARP-tag lacks a Cys (C). In an embodiment the SHARP-tag lacks a disulfide bond. In an embodiment, the SHARP-tag lacks an Asn-X-Ser/Thr motif that would create an N-linked glycosylation site. In an embodiment, the SHARP-tag comprises additional 1 to 50 amino acids that are present at the N-terminal and/or C-terminal of the above sequences. In an embodiment, the epitope is recognized by 2F2 antibody or a functional variant thereof. In an embodiment, a SHARP-tag peptide described herein may have a T_{1/2} of at least about 2 min for dissociation from a SABR represented by 2F2 or an antibody with SEQ ID NO: 1189. In an embodiment, a SHARP-tag peptide described herein may have a Kd of about 30 nM or less for the binding to Polatuzumab vedotin, a generic variant of Polatuzumab vedotin, huMA79b, or SN8, or antibodies with SEQ ID NO: 1182-1189.

[0152] In an embodiment, the SHARP-tag comprises or consists of the sequence X₁X₂EX₃X₄X₅X₆ wherein X₁ is selected from R, E, S, N, D, F or H; X₂ is S, T, I, L, M, V, F, H, G, or A; X₃ is D, S, N, G, A, T, K, Q, L, Y, W, R, or V; X₄ is R, H, P, L, T or C; X₅ is Y, M, F, H, D, A, G, I or V; and X₆ is any amino acid or no amino acid. In an embodiment, the SHARP-tag comprises or consists of the sequence X₁X₂EX₃X₄X₅X₆ wherein X₁ is selected from R, E, S, N, D, F or H; X₂ is selected from S, T, I, L, M, V, F, H, G, or A; X₃ is selected from D, S, N, G, A, T, K, Q, L, Y, W, R, or V; X₄ is selected from R, H, P, L, T or C; X₅ is selected from Y, M, F, H, D, A, G, I or V; and X₆ is any naturally occurring amino acid. In an embodiment, the SHARP-tag comprises or consists of the sequence X₁X₂EX₃X₄X₅X₆ wherein X₁ is selected from R, E, S, N, D, F or H; X₂ is selected from S, T, I, L, M, V, F, H, G, or A; X₃ is selected from D, S, N, G, A, T, K, Q, L, Y, W, R, or V; X₄ is R, H, P, L, T or C; X₅ is selected from Y, M, F, H, D, A, G, I or V; and X₆ is selected from R, K, E, D, G, H, L, M, Q, V, W, S, F, I, Y, P, N, T or A. In an embodiment, X₆ is any amino acid except Cys (C). In an embodiment the SHARP-tag lacks a Cys (C). In an embodiment the SHARP-tag lacks a disulfide bond. In an embodiment, the SHARP-tag lacks an Asn-X-Ser/Thr motif that would create an N-linked glycosylation site. In an embodiment, the SHARP-tag comprises additional 1 to 50 amino acids that are present at the N-terminal and/or C-terminal of the above sequences. In an embodiment, the epitope is recognized by Polatuzumab vedotin, a generic variant of Polatuzumab vedotin, 2F2, SN8 antibody, or a functional variant thereof. In an embodiment, a SHARP-tag peptide described herein may have a T_{1/2} of at least about 2 min for dissociation from a SABR represented by Polatuzumab vedotin, a generic variant of Polatuzumab vedotin, huMA79b, 2F2, or SN8, or antibodies with SEQ ID NO: 1182-1189. In an embodiment, a SHARP-tag peptide described herein may have a Kd of about 30 nM or less for the binding to Polatuzumab vedotin, a generic variant of Polatuzumab vedotin, huMA79b, 2F2, or SN8, or antibodies with SEQ ID NO: 1182-1189.

[0153] In an embodiment, the SHARP-tag comprises or consists of the sequence X₁X₂EX₃X₄X₅X₆ wherein X₁ is selected from K or R; X₂ is selected from S, T, I, L, M, V, F, H, G, or A; X₃ is selected from D, S, N, G, A, T, K, Q, L, Y, W, R, or V; X₄ is selected from L, R, H, P, T or C; X₅ is selected from Y, M, F, H, D, A, G, I or V; and X₆ is any amino acid or no amino acid. In an embodiment, X₆ is any amino acid except Cys (C). In an embodiment, the SHARP-tag comprises or consists of the sequence X₁EX₂ X₃X₄X₅X₆ wherein X₁ is selected from S, T, I, L, M, V, F, H, G, or A; X₂ is selected from D, S, N, G, A, T, K, Q, L, Y, W, R, or V; X₃ is selected from L, R, H, P, T or C; X₄ is selected from Y, M, F, H, D, A, G, I or V; X₅ is P; and X₆ is any amino acid. In an embodiment, the SHARP-tag comprises or consists of the sequence X₁X₂X₃EX₄X₅X₆ wherein X₁ is selected from A, G or S; X₂ is selected from K or R; X₃ is selected from S, T, I, L, M, V, F, H, G, or A; X₄ is selected from D, S, N, G, A, T, K, Q, L, Y, W, R, or V; X₅ is selected from L, R, H, P, T or C; and X₆ is selected from Y, M, F, H, D, A, G, I or V. In an embodiment, X₆ is any amino acid except Cys (C). In an embodiment the SHARP-tag lacks a Cys (C). In an embodiment the SHARP-tag lacks a disulfide bond. In an embodiment, the SHARP-tag lacks an Asn-X-Ser/Thr motif that would create an N-linked glycosylation site. In an embodiment, the SHARP-tag comprises additional 1 to 50 amino acids that are present at the N-terminal and/or C-terminal of the above sequences. In an embodiment, the epitope is recognized by 10D10 antibody or functional variants. In an embodiment, the epitope is recognized by an antibody or antibody fragment comprising the vL region represented by SEQ ID NO: 797 and vH region represented by SEQ ID NO:922 or functional variants comprising up to 10 substitutions in the framework region.

[0154] In an example embodiment, the SHARP-tag comprises or consists of the sequence represented by SEQ ID NO: 557-566 or a variant thereof with substation, deletion or addition of 1, 2, 3, 4 or 5 amino acids. In an embodiment, the epitope is recognized by an antibody or antibody fragment comprising the vL region represented by SEQ ID NO: 846-847 and vH region represented by SEQ ID NO: 966-970 or functional variants comprising up to 10 substitutions in the framework region. In an embodiment, the SHARP-tag is recognized by an antibody or its variants (H2Mab-250) comprising the light chain CDR1, CDR2 and CDR3 represented by SEQ ID NO: 6725-6; 7094-5 and 7463-7464, respectively, and heavy chain CDR1, CDR2 and CDR3 represented by SEQ ID NO: 6845-8, 7214-8, and 7583-7587, respectively. In an embodiment, the SHARP-tag comprises a variant of SEQ ID NO: 557-566 which binds with at least 5-fold greater affinity to the antibody, or the antibody fragment as compared to a mutant in which the amino acid residue Trp (W) is replaced by Ala (A). In an embodiment, the epitope is recognized by an antibody or antibody fragment described in U.S. Ser. No. 11/981,747B1 and/or WO2022114163 or a variant with up to 10 substitutions in the framework region. In an embodiment, the antibody is H2Mab-250. In an embodiment the SHARP-tag lacks a Cys (C). In an embodiment the SHARP-tag lacks a disulfide bond. In an embodiment, the SHARP-tag lacks an Asn-X-Ser/Thr motif that would create an N-linked glycosylation site. In an embodiment, a SHARP-tag peptide described herein may have a T_{1/2} of at least about 2 min for dissociation from a SABR represented by H2Mab-250, or an antibody with vL region represented by SEQ ID NO: 846-847 and vH region represented by SEQ ID NO: 966-970. In an embodiment, a SHARP-tag peptide described herein may have a Kd of about 30 nM or less for the binding to Polatuzumab vedotin, a generic variant of Polatuzumab vedotin, huMA79b, 2F2, or SN8, or antibodies with SEQ ID NO: 1182-1189.

[0155] The sequences described herein (e.g., SEQ ID NO: SEQ ID NO: 1-123, 150-167, 251-440, 550-579, 631-650, 651-654, 656, 674-676, 686, 689, and 692-720) define the core structure of the SHARP-tag peptide and may further comprise up to two additional amino acids at the N terminus and up to two additional amino acids at the C terminus. Such additional amino acids at the ends of the core structure of the peptide usually do not necessarily influence the secondary structure of the of the peptide or specific binding of the peptide to an antibody specific for the peptide, but may serve as linker structures in the fusion protein. Accordingly, type and number of the additional amino acids may depend on the location of the peptide in the fusion protein and may vary depending on whether the peptide is located N-terminal or C-terminal or somewhere in between of the polypeptide.

[0156] The invention also provides that naturally occurring protein or an endogenous protein or its isoform can serve as marker/suicide protein on the cell surface. In an embodiment, CD79b (SEQ ID NO (DNA): 3110 and SEQ ID NO (PRT): 660) and CD79b isoform-2 (SEQ ID NO (DNA): 3106 and SEQ ID NO (PRT):656) and variants thereof with up to 30 amino acid substitutions can serve as marker/suicide proteins. The SHARP-tag is present in these naturally occurring proteins and they can be recognized by SABR (e.g., SN8, huMA79b, 2F2, Polatuzumab etc.) described herein. In an embodiment, the extracellular domain of CD79b and CD79b-isoform-2 (SEQ ID NO: 659 and 656) or their functional variants serves as SHARP-tags. In an embodiment, the extracellular domain of CD79b or a functional variant thereof is fused to another protein (e.g., a cytokine) to serve as a marker/suicide protein or a multipurpose switch. An example embodiment is provided in SEQ ID NO: 666. The CD79b protein, CD79b isoform, and CD79b-fusion proteins can be expressed in recombinant cells using either alone or co-expressed with proteins of interest (e.g., SAR) using from a single vector or separate vectors. In an embodiment, the CD79b protein, CD79b isoform, and CD79b-fusion proteins and the proteins of interest are expressed from a single polynucleotide or separate polynucleotides. In an embodiment, they are expressed from a single polypeptide or separate polypeptides. In an embodiment, the CD79b protein, CD79b isoform, and CD79b-fusion proteins serve as an accessory module and/or therapeutic control that is used to isolate, enrich, deplete, track or control the expression and/or activity of the recombinant cell. Examples of constructs encoding a SAR along with CD79b protein, CD79b isoform, and CD79b-fusion proteins are presented in SEQ ID NO:4797, 4911 and 4988.

[0157] In one aspect, the invention provides an epitope tag that is 5, 6, 7, or 8 amino acids in length. In another aspect, the invention provides an epitope tag that is at least 6 amino acids in length and, in certain embodiments, up to 16 amino acids in length. In various embodiments, the epitope tag is at least 5, 6, 7, 8, 9, 10, 11, 12, 13, or 14 amino acids in length, and at most 16, 17, 18, 19, 20, 21, 25, or 30 amino acids in length. The SHARP-tag may comprise a linear sequence of amino acids that is accessible for antibody recognition and may be designed to minimize interference with the function, expression, or stability of the fusion protein to which it is attached. In an embodiment the tag is recognized by an antibody that is approved by a regulatory agency (e.g., FDA) for in vivo administration. In an embodiment the tag is recognized by a drug (e.g., an antibody) that is in pre-clinical or clinical development, optionally for in vivo administration to a subject. Optionally, the subject is a human subject. In one aspect, the invention provides a tag that is recognized by an antibody drug conjugate. In an embodiment, the antibody drug conjugate is Polatuzumab or Polatuzumab vedotin (CAS Registry Number 1313206-42-6). In an embodiment, Polatuzumab vedotin has an International Nonproprietary Names number (INN) of 9714 and PubChem SID 252166614. In an embodiment, the antibody drug conjugate has the formula C₆₆₇₀H₁₀₃₁₇N₁₇₄₅O₂₀₈₇S₄₀. In an embodiment, the variant is recognized by Polatuzumab or Polatuzumab vedotin, monoclonal antibody SN8 (Thermofisher Scientific Catalog #Catalog #604-490), CD79b-2F2, huMA79b, Polatuzumab or Polatuzumab vedotin or a variant thereof.

[0158] In an embodiment, the drug is administered at a dose of between 0.1 mg/kg to 10 mg/kg. In an embodiment, the drug (e.g., antibody, antibody drug conjugate) is administered at a dose of 1.8 mg/kg intravenously. In an embodiment, the drug (e.g., antibody, antibody drug conjugate) is administered at a dose of between 0.1 mg/kg to 10 mg/kg intravenously. The drug can be administered via intravenous, subcutaneous, intradermal, intraperitoneal, intrathecal, intrapleural, oral, nasal, or intraventricular routes. In another embodiment, the drug is administered using an auto-injector. In another embodiment, the subject receives a single dose of the drug. In another embodiment, the subject receives multiple doses of the drug. The drug is administered at a dose ranging from 0.1 to 10 mg/kg. In another embodiment, the tag is non-immunogenic. In another embodiment, the tag is non-immunogenic to a human subject. The tag comprises a sequence of 5, 6, 7, 8, 9, 10, 11, 12, 13, 14, 15, or 16 amino acid residues. The tag may comprise a sequence identical to one present in an endogenous protein. Another embodiment includes a tag with a sequence that has 80-99% identity to a sequence in an endogenous protein (e.g., 80%, 85%, 90%, 92%, 95%, 96%, 97%, 98%, 99%, or 99.5%). In one embodiment, the tag comprises a sequence that is 80-99% identical to a sequence present in an endogenous protein (e.g., 80%, 85%, 90%, 92%, 95%, 96%, 97%, 98%, 99%, or 99.5%). In one embodiment, the endogenous protein is a human protein. The tag may be derived from a sequence located at or near the N-terminus of an endogenous protein. In another embodiment, the tag is derived from a sequence located within the N- or C-terminal 7, 8, 9, 10, 11, 12, 13, 14, 15, 16, 17, 18, 19, 20, 21, 22, 23, 24, 25, 26, 27, 28, 29, 30, 31, 32, 33, 34, 35, 36, 37, 38, 39, 40, 41, 42, 43, 44, 45, 46, 47, 48, 49, or 50 amino acid residues of an endogenous protein. In another embodiment, the endogenous protein is a transmembrane protein. In one aspect, the epitope (or tag) comprises the sequence RSEDRY (SEQ ID NO: 1) or a variant thereof and has additional 1 or more amino acid residues at the N and/or C-termini. In one aspect, the epitope comprises or consist of the sequence RSEDRYR (SEQ ID NO: 2) or a variant thereof and has additional 1 or more amino acid residues at the N and/or C-termini. In one aspect, the epitope comprises or consists of the sequence KSEDLY (SEQ ID NO: 650) or a variant thereof and has additional 1 or more amino acid residues at the N and/or C-termini. In an embodiment, the SHARP-tag comprises or consists of the sequence RSEX₁X₂Y (SEQ ID NO: 93) and has additional 1 more amino acid residues at the N and/or C-termini; wherein X₁ is D, S, N, G, A, T, K, L and X₂ is R or H. In an embodiment, the SHARP-tag comprises the sequence with SEQ ID NO:1-123, 251-440, 631-650, 674-676, 686 or 689 and has additional 1 more amino acid residues at the N and/or C-termini.

[0159] In one embodiment, the invention provides a recombinant construct comprising a polynucleotide encoding a polypeptide that includes one or more SHARP-tags described herein. The recombinant construct may be contained within an expression vector, introduced into a host cell, or formulated in a pharmaceutical composition. In certain embodiments, the polypeptide comprises a single SHARP-tag; in other embodiments, the polypeptide comprises multiple SHARP-tags, such as two or more copies of a SHARP-tag.

[0160] In one aspect, the multiple SHARP-tags are identical in amino acid sequence. In another aspect, the multiple tags are non-identical, each comprising a distinct amino acid sequence. In some embodiments, the recombinant construct further comprises one or more additional tags or functional domains known in the art, including, but not limited to: FLAG tag (e.g., SEQ ID NO: 1527); Strep-tag (e.g., SEQ ID NO: 1532); Poly histidine tag (His-tag); Myc tag; Rituximab tag; RQR8; CD34 tag; Masking peptide (e.g., SEQ ID NO: 1203); Cleavable linkers such as MMP-cleavable (SEQ ID NO: 1204), PSA-cleavable (SEQ ID NO: 1205), or TEV-cleavable (SEQ ID NO: 1206); or Masking domain (e.g., SEQ ID NO: 1202). Such tags may be used individually or in combination, depending on the desired function (e.g., detection, enrichment, in vivo modulation, or regulated activation).

[0161] In one embodiment, when a polypeptide comprises two or more SHARP-tags, the tags are separated by a spacer region comprising one or more amino acid residues. The spacer may be a naturally occurring sequence or an artificial linker. In various embodiments, the inter-tag spacer comprises at least 1, 2, 3, 4, 5, 6, 7, 8, 10, 12, 15, 20, 25, 50, 75, 100, 200, 300, 400, 500, 600, 700, 800, 900, or 1000 amino acids. In another aspect, the spacer comprises a peptide linker, which may be flexible, rigid, cleavable, or masking in nature. In specific embodiments, the linker is: a flexible linker, such as SEQ ID NO: 1207; a non-flexible linker, such as SEQ ID NO: 1208; a cleavable linker, such as SEQ ID NOs: 1204-1206; a masking peptide, such as SEQ ID NO: 1203. In one aspect, the linker is selected from SEQ ID NOs: 1203-1208. The linker may be of any suitable length, including ranges of 1-500 or 1-1000 amino acids. In certain embodiments, the SHARP-tag itself may function as a modular linker to connect two or more functional protein domains or may serve as an adaptor domain that facilitates interaction with other molecular components (e.g., antibodies, ligands, or regulatory domains). These embodiments support methods for expressing, purifying, tracking, or regulating the activity of engineered polypeptides in research, diagnostic, or therapeutic applications.

[0162] The present invention provides recombinant polynucleotides encoding one or more of the SHARP-tags described herein, as well as recombinant polypeptides comprising one or more such tags. In certain embodiments, the recombinant polypeptide is expressed in a host cell, and the invention further provides cells that express polypeptides bearing one or more SHARP-tags. The invention also encompasses soluble proteins or polypeptides comprising the disclosed SHARP-tags.

[0163] In various embodiments, the invention provides methods for the detection, isolation, purification, enrichment, depletion, or regulation of polypeptides, proteins, or cells that comprise one or more of the disclosed SHARP-tags. In certain embodiments, the invention provides methods for modulating or controlling the activity of tagged polypeptides or proteins (e.g., synthetic antigen receptors), and/or of cells expressing such tagged proteins. In additional aspects, the invention provides methods of treatment comprising administration of nucleic acids, polypeptides, vectors, viral vectors, envelopes, cells, and pharmaceutical compositions that comprise one or more of the disclosed SHARP-tags.

[0164] In some embodiments, the recombinant polynucleotides encode polypeptides comprising a single epitope tag. In other embodiments, the polynucleotides encode polypeptides comprising two or more epitope tags, which may be identical or distinct in sequence. The one or more epitope tags may be positioned at the N-terminus, C-terminus, internal regions, or within the extracellular or intracellular domains of the polypeptide. The tagged polypeptides may be naturally occurring proteins that have been engineered to include the tag(s), or fully recombinant proteins designed to include the tag(s) for functional or regulatory purposes.

[0165] The epitope tags described herein, including their variants and tag cassettes, may be incorporated into chimeric antigen receptors (CARs), synthetic antigen receptors (SARs), or next-generation CAR platforms such as SIR, zSIR, uTCR-SAR, Ab-TCR, and KIR-CAR. In such constructs, the epitope tags may function as detection elements, regulatory modules, linkers, or adaptors. These tags may be used to detect, isolate, purify, eliminate, or regulate the activity of antigen-binding domains (e.g., antibodies, scFVs), fusion proteins, viral vectors, or engineered immune receptors including CARs, SARs, and TCRs.

[0166] The use of such tags for detection, purification, or regulation of recombinant molecules is further supported by the technologies and teachings of international patent applications PCT/US2017/024843, PCT/US2017/052344, PCT/US2017/025602, PCT/US2017/042248, PCT/US2017/064379, PCT/US2018/053247, PCT/US2019/035096, PCT/US2019/044255, PCT/US2020/014237, PCT/US21/22643, PCT/US2021/022641, PCT/US22/17177, and PCT/US24/10592, each of which is incorporated herein by reference in its entirety.

[0167] In certain embodiments, the epitope-tagged polypeptide or protein described herein corresponds to or encodes a receptor, ligand, cytokine, chemokine, transmembrane protein, secreted protein, cytosolic protein, or other recombinant protein, including but not limited to antigen-binding receptors. In specific embodiments, the antigen-binding receptor is a Synthetic Antigen Receptor (SAR). As used herein, the term “synthetic antigen receptor” or SAR refers to both conventional chimeric antigen receptors (CARs) and next-generation engineered receptor platforms. In each case, the epitope tag may be incorporated without substantially affecting expression, structure, activity, or immunogenicity, as described in prior sections.

[0168] In one aspect, the invention provides tagged synthetic antigen receptors (TAG-SARs) comprising one or more epitope tags described herein. In certain embodiments, the extracellular antigen-binding domain of the SAR—such as a variable light chain (vL), variable heavy chain (vH), single-domain antibody (vHH), or single-chain variable fragment (scFv)—is modified by insertion or fusion of an epitope tag. The epitope tag enables tracking, detection, sorting, depletion, and/or regulation of TAG-SAR-expressing cells in vitro and in vivo, without impairing SAR functionality.

[0169] The present disclosure further provides recombinant cells, including but not limited to immune cells and stem cells, that comprise or express one or more TAG-SARs. Such recombinant cells may be used for therapeutic, diagnostic, or manufacturing purposes. In various embodiments, the recombinant cells include immune cells (e.g., T cells, NK cells, NKT cells, monocytes/macrophages, B cells, or dendritic cells) or stem cells (e.g., hematopoietic stem cells, embryonic stem cells, induced pluripotent stem cells). The recombinant cells may also include genetically engineered variants thereof and other cell types suitable for cell-based therapy, including muscle, nerve, heart, liver, skin, and epithelial cells.

[0170] In specific embodiments, the SAR comprises a single-chain receptor construct (e.g., a conventional CAR or TFP), or a multichain synthetic receptor system (e.g., SIR, zSIR, Ab-TCR, cTCR, HIT, or STAR). The epitope tags described herein can be incorporated into any of these formats to enable improved detection, selection, modulation, and safety control of engineered immune or stem cell products for use in immunotherapy or regenerative medicine.

[0171] In certain embodiments, the synthetic antigen receptor (SAR) is configured as a single-chain construct. A single-chain SAR typically comprises an extracellular antigen-binding domain operably linked via an optional hinge or connector region to a transmembrane domain or membrane-associated domain. The construct may further include an intracellular signaling domain comprising one or more effector or costimulatory domains (e.g., CD3ζ, CD28, 4-1BB). One or more epitope tags, as described in preceding sections (e.g., SEQ ID NOs: 692-698), may be incorporated into the extracellular portion to generate a TAG-SAR, enabling enhanced detection, sorting, or depletion.

[0172] In alternative embodiments, the SAR is configured as a double-chain receptor comprising two distinct polypeptide chains. Each chain includes an extracellular domain operably linked, directly or via a hinge domain, to a transmembrane domain and optionally to an intracellular domain. One or both chains may contain an antigen-binding domain. For example, one chain may encode a variable light (vL) region and the other a variable heavy (vH) region of an antibody; alternatively, the chains may comprise complementary variable domains of a T cell receptor, such as Vα/Vβ or Vγ/Vδ pairs. The intracellular domains may include effector functions (e.g., CD3ζ) or may serve as scaffolds for recruitment of endogenous signaling adaptors (e.g., CD3z, DAP10, DAP12). Representative double-chain SARs include SIR, Ab-TCR, zSIR, zCD16-SAR-uTCR-SAR, Hybrid-chain SAR (HC-SAR), and recombinant TCR constructs. As with single-chain formats, one or more epitope tags may be incorporated into the extracellular region of one or both chains to facilitate functional control and tracking of TAG-SAR-expressing cells.

[0173] In some embodiments, SAR constructs—whether single or double chain—further comprise one or more Autonomous Antigen Binding Domains (AABDs), which are non-scFv-based binding domains. AABDs may include single-domain antibodies, designed ankyrin repeat proteins (DARPins), fibronectin domains, or other modular targeting moieties.

[0174] In additional aspects, the SARs described herein comprise at least one extracellular component and optionally at least one intracellular component, connected via a hydrophobic transmembrane domain. In certain embodiments, the SAR is configured as a fusion protein, wherein one or more epitope tag cassettes are positioned (a) at the N-terminus of the extracellular binding domain, (b) within the binding domain itself, or (c) between the extracellular domain and the transmembrane domain. The modular design allows for flexibility in detection, tracking, regulation, or depletion of engineered cells.

[0175] Further embodiments of the TAG-SARs provide flexible, multi-tagged fusion proteins. For example: In one configuration, the fusion protein comprises (from N- to C-terminus): an extracellular binding domain, a single tag cassette, a hinge-containing connector region, a transmembrane segment, and an optional intracellular domain. In another configuration, the fusion protein comprises: an extracellular binding domain, a first connector, a tag cassette, a second hinge-containing connector, a transmembrane domain, and an intracellular component. In additional embodiments, multiple tag cassettes are interleaved with connector domains, e.g., an extracellular domain followed by tag cassette 1→connector 1→tag cassette 2→connector 2 (hinge)→transmembrane→intracellular signaling. In extended embodiments, three or more tag cassettes are incorporated in sequence, each flanked by connector domains, to enable precise detection or control of the SAR construct. In double-chain TAG-SARs, one or both polypeptide chains may independently follow any of the above-described domain designs.

[0176] In certain other TAG-SAR embodiments, the fusion protein comprises from amino-terminus to carboxy-terminus: a tag cassette, an extracellular binding domain, a connector region comprising a hinge, a hydrophobic portion, and an optional intracellular component comprising an effector domain and/or a costimulatory domain. In still other TAG-SAR embodiments, the fusion protein comprises from amino-terminus to carboxy-terminus: an extracellular scFv or scTCR binding domain comprising a variable region linker containing a tag cassette disposed between the variable regions (e.g., at or closer to the N-terminal end of the variable region linker, at or closer to the C-terminal end of the variable region linker, or imbedded closer to the middle of the variable region linker), a connector region comprising a hinge, a hydrophobic portion, and an optional intracellular component comprising an effector domain and/or a costimulatory domain.

[0177] Examples of different configurations of SAR are provided in Tables A1-27 of provisional application. The SHARP-tag can replace the Linker region or AABD.

[0178] The tagged fusion protein may be cell-bound (e.g., expressed on a cell surface) or in soluble form. In certain embodiments, nucleic acid molecules encoding TAG-SAR fusion proteins may be codon optimized (e.g., human codon optimized) to enhance or maximize expression in certain types of cells, such as T cells. In still further embodiments, TAG-SAR may further comprise a functional component (e.g. an immunostimulatory moiety, cytokine, immune modulator, immunoglobulin protein, or the like).

[0179] A TAG-SAR may have at least two different tag cassettes. In some embodiments, a first tag cassette can provide a stimulation signal and a distinct second tag cassette might be used to associate with a detection reagent or associate with an antibody-toxin conjugate or with an antibody-imaging agent conjugate. In further embodiments, the two or more first tag cassettes may be in different areas of a TAG-SAR. In certain embodiments, a first tag cassette in the connector region and a second tag cassette is located at the amino-terminus or internal or both of a TAG-SAR. In certain embodiments, a tag cassette comprises from about five to about 500 amino acids, or from about six to about 100 amino acids, or from about seven to about 50 amino acids, or from about six to about 20 amino acids. In some embodiments, a tag cassette has seven to eleven amino acids. Preferably, a tag cassette is non-immunogenic, hypoimmunogenic or minimally immunogenic. Essentially, a tag cassette can function as a handle or beacon to allow for the identification, enrichment, isolation, promotion of proliferation, activation, tracking, or elimination of cells expressing a TAG-SAR.

[0180] In certain embodiments, a tag cassette is located within a connector region of a fusion protein of this disclosure. For example, a connector region may further comprise a linker module adjacent to a tag cassette, wherein the linker module comprises a flexible linker. Exemplary flexible linkers are provided in SEQ ID NO: 1330-1331 and 1453. Additional flexible linkers are known in the art.

[0181] A single chain fusion protein comprising one or more tag cassettes as described herein will be capable of associating with a cognate binding partner, wherein the cognate binding partner is heterologous to the host or cell expressing a fusion protein comprising a tag cassette as described herein. In certain embodiments, a tag or a tag cassette present in a TAG-SAR of this disclosure has Polatuzumab vedotin, 2F2, SN8 or huMA79b as a cognate binding partner, or is recognized by antibodies specific for a CD79b. In certain embodiments, a tag or a tag cassette present in a TAG-SAR of this disclosure has H2Mab-250 as a cognate binding partner or is recognized by antibodies specific for a Her2. In certain embodiments, the cognate binding partner (e.g., receptor, protein, antibody) may be soluble, part of a matrix composition, or conjugated to a solid surface (e.g., plate, bead). Exemplary solid surfaces include beads and particles (e.g., micro and nano), such as magnetic beads and particles. In single chain TAG-SAR fusion protein embodiments, a protein complex can form between a fusion protein and a cognate tag cassette binding partner, which is a result of binding between the tag cassette and the binding partner. In certain embodiments, a TAG-SAR comprises a scFv or scTCR binding domain where the tag cassette is located within the variable region linker (between the binding domain subunits). In other embodiments, a TAG-SAR has a tag cassette located at the amino-terminus of the binding domain. In such protein complexes or fusion protein structures, a TAG-SAR binding domain will retain its target specificity or its specific target binding affinity.

[0182] A connector (or linker) region comprising a hinge in a fusion protein according to the present disclosure may be located (a) immediately amino-terminal to a hydrophobic portion, (b) interposed between and connecting a tag cassette (e.g., SHARP-tag) and an effector domain, (c) immediately carboxy-terminal to a binding domain, or (d) interposed between and connecting a linker module and an effector domain.

[0183] A connector (or linker) region can be comprised of a hinge only, linker modules only, a hinge and linker modules, or a hinge, one or more linker modules and one or more tag cassettes. Examples of different locations where a linker region containing a tag of the disclosure can be located in a SAR are provided in Tables A1-27 of PCT/US24/10592.

[0184] Hydrophobic Portion. A hydrophobic portion contained in a fusion protein of the present disclosure (e.g., TAG-SAR) will allow a fusion protein of this disclosure to associate with a cellular membrane such that a portion of the fusion protein will be located extracellularly (e.g., tag cassette, connector domain, binding domain) and a portion will be located intracellularly (e.g., an optional effector domain).

[0185] Effector Domain. An optional effector domain contained in a fusion protein of the present disclosure (e.g., TAG-SAR) will be an intracellular component and capable of transmitting functional signals to a cell. In some embodiments, an effector domain of a TAG-SAR of the instant disclosure is CD3z and CD28, is CD3z and 4-1BB, or is CD3z, CD28 and 4-1BB.

[0186] Binding Domain. As described herein, a TAG-SAR fusion protein of the present disclosure comprises a binding domain that specifically binds a target. A binding domain may be any peptide that specifically binds a target of interest. Sources of binding domains include antibody variable regions from various species (which can be in the form of antibodies, scFVs, scFVs, Fabs, scFv-based grababody, or soluble vH domain or domain antibodies), including human, rodent, avian, or ovine. Additional sources of binding domains include variable regions of antibodies from other species, such as camelid, nurse sharks, spotted ratfish, or lamprey. These antibodies can form antigen-binding regions using only a heavy chain variable region, i.e., these functional antibodies are homodimers of heavy chains only (referred to as “heavy chain antibodies”).

[0187] An alternative source of binding domains of this disclosure includes sequences that encode random peptide libraries or sequences that encode an engineered diversity of amino acids in loop regions of alternative non-antibody scaffolds, such as scTCR, designed ankyrin repeat proteins (DARPins), fibronectin binding domains (adnectins or monobodies), cysteine-knot miniproteins, tetratricopeptide repeat domains, leucine-rich repeat domains, lipocalin domains, V-like domains, C-type lectin domains, mAb2 or Fcab™, armadillo repeat proteins, affilin, affibody, avimers, knottins, fynomers, atrimers, cytotoxic T-lymphocyte associated protein-4 or the like. Binding domains of this disclosure can be generated as described herein or by a variety of methods known in the art. In some embodiments, a binding domain is a single chain Fv fragment (scFv) that comprises vH and vL regions specific for a target of interest. In certain embodiments, the VH and vL regions are human. Exemplary vH and vL regions are provided in Tables 2 and 3. In certain other embodiments, a tag cassette is a part of or is located within a (GlyₙSer)-based linker used to link the vH and vL domains of a binding domain. In still further embodiments, a (GlyₙSer)-based linker may be used to connect one or more tag cassettes to the N-terminal end of a TAG-SAR binding domain.

### Host Cells and Nucleic Acids

[0188] In certain aspects, the present disclosure provides nucleic acid molecules that encode any one or more of the TAG-SAR described herein. Such nucleic acid molecules can be inserted into an appropriate vector (e.g., viral vector or non-viral plasmid vector) for introduction in a host cell of interest (e.g., hematopoietic progenitor cell, T cell).

[0189] As used herein, the term “recombinant” or “non-natural” refers to an organism, microorganism, cell, nucleic acid molecule, or vector that includes at least one genetic alteration or has been modified by introduction of an exogenous nucleic acid molecule, wherein such alterations or modifications are introduced by genetic engineering.

[0190] Genetic alterations include, for example, modifications introducing expressible nucleic acid molecules encoding proteins, fusion proteins or enzymes, or other nucleic acid molecule additions, deletions, substitutions or other functional disruption of a cell's genetic material. Additional modifications include, for example, non-coding regulatory regions in which the modifications alter expression of a gene or operon. In certain embodiments, a cell, such as a T cell, obtained from a subject may be converted into a non-natural or recombinant cell (e.g., a non-natural or recombinant T cell) by introducing a nucleic acid that encodes a TAG-SAR as described herein and whereby the cell expresses a cell surface located TAG-SAR.

[0191] A vector that encodes a core virus is referred to herein as a “viral vector.”

[0192] In certain embodiments, a viral vector is used to introduce a non-endogenous nucleic acid sequence encoding a TAG-SAR specific for a target.

[0193] Other vectors also can be used for polynucleotide delivery including DNA viral vectors, including, for example adenovirus-based vectors and adeno-associated virus (AAV)-based vectors; and vectors derived from herpes simplex viruses (HSVs).

[0194] In certain embodiments, hematopoietic progenitor cells or embryonic stem cells are modified to comprise a non-endogenous nucleic acid molecule that encodes a TAG-SAR of this disclosure. In certain embodiments, the host T cell transfected to express a TAG-SAR of this disclosure is a functional T cell, such as a virus-specific T cell, a tumor antigen specific cytotoxic T cell, a naive T cell, a memory stem T cell, a central or effector memory T cell, or a CD4+ CD25+ regulatory T cell.

[0195] Diseases that may be treated with cells expressing TAG-SAR as described in the present disclosure include cancer, infectious diseases (viral, bacterial, protozoan infections), immune diseases (e.g., autoimmune), or aging-related diseases (e.g., senescence). Adoptive immune and gene therapy are promising treatments for various types of cancer. A TAG-SAR of this disclosure may be administered to a subject in cell-bound form {e.g., gene therapy of target cell population (mature T cells {e.g., CD8+ or CD4+ T cells) or other cells of T cell lineage)). In a particular embodiment, cells of T cell lineage expressing TAG-SAR administered to a subject are syngeneic, allogeneic, or autologous cells. In other embodiments, TAG-SAR may be administered to a subject in soluble form.

[0196] Pharmaceutical compositions including TAG-SAR of this disclosure may be administered in a manner appropriate to the disease or condition to be treated (or prevented) as determined by persons skilled in the medical art. An appropriate dose, suitable duration, and frequency of administration of the compositions will be determined by such factors as the condition of the patient, size, type and severity of the disease, particular form of the active ingredient, and the method of administration. The present disclosure provides pharmaceutical compositions comprising cells expressing a TAG-SAR as disclosed herein and a pharmaceutically acceptable carrier, diluents, or excipient. Suitable excipients include water, saline, dextrose, glycerol, or the like and combinations thereof.

[0197] An advantage of the instant disclosure is that TAG-SAR expressing cells administered to a patient can be depleted using the cognate binding partner to a tag cassette. In certain embodiments, the present disclosure provides a method for depleting a T cell expressing a TAG-SAR by using an antibody specific for the tag cassette, using a cognate binding partner specific for the tag cassette, or by using a second T cell expressing a CAR and having specificity for the tag cassette. In certain embodiments, a tag cassette allows for immunodepletion of a T cell expressing a TAG-SAR of this disclosure. Elimination of engineered T cells may be accomplished using depletion agents specific for a tag cassette. For example, if a P11 tag (SEQ ID NO: 674) is used, then Polatuzumab vedotin, SN8 or 2F2 antibody may be used. Similarly, if a Tag with SEQ ID NO: 557-566 is used, then H2Mab-250 or its variants may be used.

[0198] In certain other embodiments, cells expressing a TAG-SAR of this disclosure can be identified, sorted, enriched or isolated by binding to antibodies having specificity to a tag cassette (e.g., anti-tag antibodies), or by other proteins that specifically bind a tag cassette (e.g., SN8, 2F2, huMA79b binding to the P7, P8, P9, P10 or P11), which are conjugated to beads, a cell culture plate, agarose, or any other solid surface matrix. In certain embodiments, such cells are sorted, enriched or isolated by using an affinity column.

[0199] In certain embodiments, the present disclosure provides a method for selectively activating a T cell by contacting a non-natural or recombinant T cell expressing a TAG-SAR with a binding domain specific for a tag cassette. In an embodiment, the binding domain is attached to a solid surface or as part of a biocompatible matrix (e.g., alginate, basement membrane matrix (Matrigel®), biopolymer). The recombinant T cell comprises an exogenous nucleic acid molecule encoding a TAG-SAR fusion protein of this disclosure. For example, a T cell expressing a TAG-SAR may be activated with beads coated or conjugated with a cognate binding partner (e.g., antibody) specific for the tag cassette. For example, if the tag cassette is a P11-16 (SEQ ID NO: 1-123, 674-676) then appropriate antibodies (e.g., SN8, 2F2, huMA79b) or antibody-coated beads can be used to induce T cell activation. Similarly, if the tag cassette has a sequence of SEQ ID NO:557-566 or a variant thereof, then HuMab-250 or HuMab-250-coated beads can be used to induce T cell activation. In certain embodiments, the method comprises activating ex vivo recombinant T cells expressing a TAG-SAR of this disclosure and is optionally further expressing a chimeric antigen receptor (CAR). Such activated T cells are useful in the disease treatment methods described herein. In an embodiment, the activation occurs in vitro. In an

[0200] In another aspect, the present disclosure provides a method for selectively promoting proliferation of a recombinant T cell expressing a TAG-SAR of this disclosure. In certain embodiments, the method comprises selective ex vivo proliferation of T cells expressing a TAG-SAR using a tag binding partner, such as an antibody. In further embodiments, the method comprises expanding functional T cells (e.g., virus-specific, TAA (tumor-associated antigen) specific CTL, or specific T cell subsets, such as naive T cells, memory stem T cells, central or effector memory T cells, CD4+ CD25+ regulatory T cells) with a tag binding partner, such as an antibody, which may optionally be done in the presence of a costimulatory molecule binding partner (such as an anti-CD27 or antiCD28 antibody). In certain embodiments, anti-tag binding partners may be used to activate a TAG-SAR transduced hematopoietic stem cell, embryonic stem cell, or tissue stem cell (e.g., neural stem cell) to self-renew, proliferate or differentiate into one or more desired phenotype for therapeutic use.

[0201] In still further embodiments, a TAG-SAR allows for selective promotion of T cell proliferation in vivo when expressing a TAG-SAR of this disclosure. In certain embodiments, a T cell expressing a SAR comprising a tag cassette allows for expansion of the SAR T cells in vivo when contacting cells expressing a ligand {e.g., including T cell suppressor cell ligands PD-L1, PD-L2). Such expanded T cells are useful in the disease treatment methods described herein. In certain embodiments, proliferation or expansion of cells expressing TAG-SAR as disclosed herein is induced in vivo, which may be induced with a tag cassette binding partner (such as an anti-tag antibody) and optionally a costimulatory molecule binding partner (such as an anti-CD27 or antiCD28 antibody).

[0202] In certain further embodiments, cells expressing TAG-SAR as disclosed herein are activated in vivo, such as at the site of a tumor. For example, a composition (e.g., alginate, basement membrane matrix (Matrigel®), biopolymer, or other matrix) or a carrier {e.g., microbead, nanoparticle, or other solid surface) comprising a tag cassette binding partner (such as an anti-tag antibody or SABR) and a costimulatory molecule binding partner (such as an anti-CD27 or antiCD28 antibody) may be used to locally activate at the site of a tumor (e.g., a solid tumor) a T cell expressing a TAG-SAR as disclosed herein.

[0203] In certain embodiments, recombinant cells expressing a TAG-SAR may be detected or tracked in vivo by using antibodies that bind with specificity to a tag cassette (e.g., anti-Tag antibodies), or by other cognate binding proteins that specifically bind the tag cassette sequence (e.g., SN8, 2F2 or huMA79b binding to tags with SEQ ID NO: 1-123, 674-676 etc), which binding partners for the tag cassette are conjugated to a fluorescent dye, radio-tracer, iron-oxide nanoparticle or other imaging agent known in the art for detection by X-ray, CT-scan, MRI-scan, PET-scan, ultrasound, flow-cytometry, near infrared imaging systems, or other imaging modalities (see, e.g., Yu et al., Theranostics 2:3, 2012).

[0204] In further embodiments, cells expressing TAG-SAR of the instant disclosure may be used in diagnostic methods or imaging methods, including methods used in relation to the indications or conditions identified herein.

[0205] In another aspect, the disclosure provides novel design of uni-specific, bispecific, and multi-specific SARs (e.g., SIR, Ab-TCR, etc.) comprising one or more hybrid TCR constant chains or functional variants thereof, including variants from non-human species (e.g., mouse, cat, dog, monkey, etc.). In some embodiments, the HC-SAR are TAG-SAR.

[0206] The disclosure provides novel viral envelope proteins for pseudotyping of lentiviral vectors. Examples of viral envelope proteins include modified baboon envelope (mBaEV) and modified HERV-W1 envelope proteins and are provided in SEQ ID NO (DNA): 3680-3706, 3708, 3725-3732, 3749, 3756 and SEQ ID NO (PRT): 1230-1256, 1258, 1275-1282, 1299 and 1306 of the present disclosure. In an embodiment, the modified BaEV envelope glycoprotein of the present disclosure is not the BaEV/TR envelope glycoprotein, which is represented by SEQ ID NO: (PRT): 1218. In an embodiment, the modified BaEV envelope glycoprotein of the present disclosure lacks one or more (e.g., 1, 2, 3, 4, 5, 6, 7, 8, 9, 10, 11, 12, 13 etc.) carboxy-terminal amino acid residues of BaEV envelope glycoprotein represented by SEQ ID NO: (PRT): 1218.

[0207] In an embodiment, the modified BaEV envelope glycoprotein of the present disclosure adds at least one (e.g., 1, 2, 3, 4, 5 6, 7, 8, 9, 10, 11, 12, 13, 14, 15, 20, 25 etc.) amino acid to the carboxy terminus of the BaEVRless envelope described in WO2013045639 and which is represented by SEQ ID NO (PRT): 1211. In an embodiment, the modified BaEV envelope glycoprotein of the present disclosure adds at least two amino acids to the carboxy terminus of the BaEVRless envelope (SEQ ID NO (PRT): 1211). In an embodiment, the modified BaEV envelope glycoprotein of the present disclosure adds more than one amino acid residues (e.g., 2, 5, 10, 50, 99 amino acid residues) to the carboxy terminus of the BaEVRless envelope glycoprotein (SEQ ID NO (PRT): 1211). In an embodiment, the modified BaEV envelope glycoprotein of the present disclosure is at least one amino acid longer than the BaEVRless envelope glycoprotein (SEQ ID NO (PRT):1211. In an embodiment, the modified BaEV envelope glycoprotein of the present disclosure is more than one amino acid (e.g., 2, 3, 4, 5, 6, 7, 8, 9, 10, 15, 20, or 99 amino acid residues) longer than the BaEVRless envelope glycoprotein (SEQ ID NO (PRT): 1211. In an embodiment, the modified envelope glycoprotein of the present disclosure does not comprise the TR domain, which is represented by SEQ ID NO (PRT): 1219.

[0208] In an embodiment, the modified BaEV envelope glycoprotein of the present disclosure has a cytoplasmic domain that has a non-aromatic amino acid, a basic, an acid, a neutral, an aromatic, a polar, a negative charged, or a positively charged residue at position 23 of the cytoplasmic domain. In an embodiment, the modified BaEV envelope glycoprotein of the present disclosure has a cytoplasmic domain that has any amino acid residue at position 23 of the cytoplasmic domain. In an embodiment, the modified BaEV envelope glycoprotein of the present disclosure has a cytoplasmic domain wherein the amino acid residue at position 23 is any amino acid other than Val (V). In an embodiment, the modified BaEV envelope glycoprotein of the present disclosure has a cytoplasmic domain wherein the residue at position 23 is any amino acid other than Val (V), the residue at position 24 is any amino acid other than Leu (L) or Ser (S), residue at position 25 is any amino acid other than Thr (T), residue at position 26 is any amino acid other than Q, residue at position 27 is any amino acid other than Q, residue at position 28 is any amino acid other than Y, residue at position 29 is any amino acid other than Q residue at position 30 is any amino acid other than V, residue at position 31 is any amino acid other than L, and/or residue at position 32 is any amino acid other than R. In an embodiment, the first amino acid of the cytoplasmic domain is calculated from Glycine at residue 525 of SEQ ID NO (PRT): 1210 or 1211.

[0209] In an embodiment, the modified BaEV envelope glycoprotein of the present disclosure has a cytoplasmic domain that is at least 23 amino acid residues in length and does not comprise the TR domain, which is represented by SEQ ID NO (PR):1274.

[0210] In another aspect, the disclosure provides SARs comprising novel polynucleotides, polypeptides targeting specific antigens. In one aspect the antigen is human CD79b. Examples of novel antigen binding domains (e.g., vL and vH) targeting human CD79b and SAR incorporating such antigen binding domains are provided in Tables 2 and 3. In one aspect, the CD79b SAR comprises a vL domain represented by SEQ ID NO (DNA):4623-4628 and SEQ ID NO (PRT): 2173-2178 or a functional variant thereof and a complementary vH domain represented by SEQ ID NO (DNA): 4623-4632 and SEQ ID NO (PRT): 2179-2182 or a functional variant thereof. In one aspect, the vL domain of a double chain SAR targeting human CD79b is operably linked via an optional linker to a first signaling chain comprising an Ig-like linker domain derived from human TCRβ constant chain that is fused in frame to a module comprising the hinge domain, transmembrane domain and cytosolic domain of human CD3z or a functional variant thereof. In one aspect, the first signaling chain is represented by SEQ ID NO (DNA): 4635 or 4636 and SEQ ID NO (PRT): 2185 or 2186 or a functional variant thereof. In one aspect, the first signaling chain is represented by SEQ ID NO (DNA): 4643 or 4644 and SEQ ID NO (PRT): 2193 or 2194 or a functional variant thereof. In one aspect, the vH domain of a double chain SAR targeting human CD79b is operably linked via an optional linker to a second signaling chain comprising an Ig-like linker domain derived from human TCRα constant chain that is fused in frame to a module comprising the hinge domain, transmembrane domain and cytosolic domain of human CD16a or a functional variant thereof. In one aspect, the second signaling chain is represented by SEQ ID NO (DNA): 4637 or 4638 and SEQ ID NO (PRT): 2187 or 2188 or a functional variant thereof. In one aspect, both chains of the double chain SAR targeting human CD79b comprise an N-terminal signal peptide (e.g., SEQ ID NO (PRT): 3170 and 3171). In one aspect, the two chains of a double chain SAR targeting human CD79b are joined via a sequence encoding a furine cleavage site (SEQ ID NO (DNA):3906 and SEQ ID NO (PRT): 1456, a Ser-Gly linker (e.g., SEQ ID NO (DNA): 3903 and SEQ ID NO: (PRT):1453) and a cleavable linker (e.g., P2A; SEQ ID NO (DNA):3900 and SEQ ID NO (PRT): 1450) or a functional variant thereof. In one aspect, the double chain SAR targeting human CD79b is represented by SEQ ID NO (DNA):4648-4671 and SEQ ID NO (PRT): 2198-2221. In one aspect, the double chain SAR targeting human CD79b is represented by SEQ ID NO (DNA):4672-4695 and SEQ ID NO (PRT): 2222-2245 or a functional variant thereof.

[0211] In one aspect, the CD79b SAR comprises a vL domain represented by SEQ ID NO (DNA):4623-4628 and SEQ ID NO (PRT): 2173-2178 and a complementary vH domain represented by SEQ ID NO (DNA): 4623-4632 and SEQ ID NO (PRT): 2179-2182. In one aspect, the vL domain of a double chain SAR targeting human CD79b is operably linked via an optional linker to a first signaling chain comprising an Ig-like linker domain derived from human TCRβ constant chain that is fused in frame to a module comprising the hinge domain, transmembrane domain and cytosolic domain of human CD3z. In one aspect, the first signaling chain is represented by SEQ ID NO (DNA): 4635 or 4636 and SEQ ID NO (PRT): 2185 or 2186. In one aspect, the first signaling chain is represented by SEQ ID NO (DNA): 4643 or 4644 and SEQ ID NO (PRT): 2193 or 2194. In one aspect, the vH domain of a double chain SAR targeting human CD79b is operably linked via an optional linker to a second signaling chain comprising an Ig-like linker domain derived from human TCRα constant chain that is fused in frame to a module comprising the hinge domain, transmembrane domain and cytosolic domain of CD3z. In one aspect, the second signaling chain is represented by SEQ ID NO (DNA): 4645 or 4646 and SEQ ID NO (PRT): 2195 or 2196 or a functional variant thereof. In one aspect, both chains of the double chain SAR targeting human CD79b comprise an N-terminal signal peptide (e.g., SEQ ID NO (PRT): 3170 and 3171). In one aspect, the two chains of a double chain SAR targeting human CD79b are joined via a sequence encoding a furine cleavage site (SEQ ID NO (DNA):3906 and SEQ ID NO (PRT): 1456, a Ser-Gly linker (e.g., SEQ ID NO (DNA): 3903 and SEQ ID NO: (PRT):1453) and a cleavable linker (e.g., P2A; SEQ ID NO (DNA):3900 and SEQ ID NO (PRT): 1450) or a functional variant thereof. In one aspect, the double chain SAR targeting human CD79b is represented by SEQ ID NO (DNA):4696-4719 and SEQ ID NO (PRT): 2246-2269 or a functional variant thereof.

[0212] In one aspect, the CD79b SAR comprises a vL domain represented by SEQ ID NO (DNA):4623-4628 and SEQ ID NO (PRT): 2173-2178 and a complementary vH domain represented by SEQ ID NO (DNA): 4623-4632 and SEQ ID NO (PRT): 2179-2182. In one aspect, the vL domain of a double chain SAR targeting human CD79b is operably linked via an optional linker to a first signaling chain comprising a human TCRβ constant chain. In one aspect the human TCRβ constant chain is human codon optimized and comprises a S57C mutation. In one aspect, the first signaling chain comprising human TCRβ constant chain is represented by SEQ ID NO (DNA): 4639 or 4640 and SEQ ID NO (PRT): 2189 or 2190 or a functional variant thereof that can dimerize with the complementary TCRα constant chain. In one aspect, the vH domain of a double chain SAR targeting human CD79b is operably linked via an optional linker to a second signaling chain comprising a human TCRα constant chain. In one aspect the human TCRα constant chain is human codon optimized and comprises a T48C mutation. In one aspect, the second signaling chain comprising human TCRα constant chain is represented by SEQ ID NO (DNA): 4641 or 4642 and SEQ ID NO (PRT): 2191 or 2192 or a functional variant thereof that can dimerize with the complementary TCRβ constant chain. In one aspect, the both chains of the double chain SAR targeting human CD79b comprise an N-terminal signal peptide (e.g., SEQ ID NO (PRT): 3170 and 3171). In one aspect, the two chains of a double chain SAR targeting human CD79b are joined via a sequence encoding a furine cleavage site (SEQ ID NO (DNA):3906 and SEQ ID NO (PRT): 1456, a Ser-Gly linker (e.g., SEQ ID NO (DNA): 3903 and SEQ ID NO: (PRT):1453) and a cleavable linker (e.g., P2A; SEQ ID NO (DNA):3900 and SEQ ID NO (PRT): 1450) or a functional variant of the forgoing. In one aspect, the double chain SAR targeting human CD79b is represented by SEQ ID NO (DNA):4720-4743 and SEQ ID NO (PRT): 2270-2293 or a functional variant thereof. In one aspect, the TCRβ constant chain of the double chain SAR targeting human CD79b is replaced by a hybrid chain comprising the Ig like linker domain and connecting peptide of TCRβ fused in frame to the transmembrane and cytosolic domain of human TCRγ chain. An example of a hybrid TCRβ and TCRγ chain is represented by SEQ ID NO (DNA):4622 and SEQ ID NO (PRT):2172 or a functional variant thereof that can dimerize with the complementary human TCRα chain.

[0213] In another aspect, the SAR targeting human CD79b is represented by SEQ ID NO (DNA):4744-4750, 4752, 4898, 4857, 5060-5067, 5069-5071, 5073 and SEQ ID NO (PRT): 2294-2300, 2302, 2448, 2407, 2610-2617, 2619-2621, 2623, or a functional variant thereof. In another aspect, the SAR targeting human CD79b is represented by SEQ ID NO (DNA): 5068 and SEQ ID NO (PRT): 2618 or a functional variant thereof.

[0214] In one aspect, the SAR of the disclosure e.g., a SAR targeting human CD79b, is co-expressed with an accessory module. In one aspect, the accessory module encodes for human IL2, IL12 or IL15. In one aspect, the human IL2, IL12 or IL15 are membrane anchored. Examples of accessory modules are provided in SEQ ID NO (PRT): 665-673, 679-684, 1781-1805, 2622 and SEQ ID NO (DNA):3115-3123, 3129-3134, 4231-4255 and 5072.

[0215] Also provided herein are polypeptides encoding any of the epitopes and SAR (e.g., CD79b SAR) described herein. Also provided are one or more vectors comprising the polynucleotides described herein. Also provided herein are cells (e.g., T, NK, NKT, iPSC, hematopoietic stem cells) transformed with one or more vectors comprising one or more polynucleotide that encode any of the epitope tags and SAR (e.g., CD79b SAR) described herein. In one aspect, the cells are autologous. In one aspect, the cells are allogeneic. In one aspect, the cells are obtained from umbilical cord. In one aspect, the cells are obtained from peripheral blood or bone marrow. In one aspect, the cells are obtained from a donor who has been administered a mobilizing agent (e.g., a CXCR antagonist, e.g., Mavorixafor, Plerixafor, and/or a cytokine, e.g., G-CSF, GM-CSF).

[0216] In another aspect, the disclosure provides a double chain antigen receptor which shows activation by a soluble ligand. In an embodiment, the receptor is not a natural receptor, e.g., a natural TCR. In an embodiment, the receptor is a synthetic or a non-natural receptor. In an embodiment, the receptor is a synthetic antigen receptor (SAR). In an embodiment, the receptor has the design of a SIR, cTCR, Ab-TCR, zSIR, HIT, STAR, z16SAR, z16SAR. In an embodiment, the receptor comprises at least one extracellular domain and at least one hydrophobic domain. In an embodiment, the receptor is a dimer of two polypeptide chains. In an embodiment, the receptor comprises vL and vH fragments as the antigen binding domain. In an embodiment, the vL and vH fragments are present on two polypeptide chains of the double chain receptor and form a Fv fragment that can bind to the cognate ligand. In an embodiment, the ligand is a peptide or polypeptide. In an embodiment, the peptide is between 6-11, 6-13, 5-10, 4-10, 7-16, 8-17 amino acid residues in length. In an embodiment the peptide forms a linear epitope. In an embodiment the peptide lacks a cysteine residue.

[0217] Also provided herein are pharmaceutical compositions that include any of the mammalian cells described herein and a pharmaceutically acceptable carrier. Also provided herein are kits that include any of the pharmaceutical compositions described herein.

[0218] Also provided herein are pharmaceutical compositions that include any of the nucleic acids described herein that encode any of the epitope tags, single chain, double chain and multi-chain SARs and/or accessory modules described herein, or any of the sets of nucleic acids described herein that together encode any of the single chain, double chain and multi chain SARs and/or accessory modules described herein, and a pharmaceutically acceptable carrier. Also provided herein are kits that include any of the pharmaceutical compositions described herein.

[0219] Also provided are methods of treatment and/or prevention of disease by using any of the polynucleotides, polypeptides, vectors and compositions described herein. In one aspect, the CD79b SAR of the disclosures are used for the treatment of patients with leukemia and lymphoma. In one aspect, the CD79b SAR of the disclosures are used for the treatment of patients with autoimmune disorders (e.g., Lupus, idiopathic myositis, myasthenia gravis, rheumatoid arthritis etc.) and/or allergic disorders (e.g., asthma).

[0220] The disclosure also provides a method of generating a cell therapy product comprising the steps of administering a mobilizing agent (e.g., a CXCR4 antagonist, e.g., Plerixafor and/or a cytokine, e.g., G-CSF or GM-CSF), collecting blood/bone marrow, isolating immune effector cells, transforming them with a polynucleotide comprising an immune receptor and a safety switch comprising a tag (e.g., a tag described herein), optionally expanding the cells, administering them to a subject with dose of 1 million to 1000 million cells/kg in single or multiple doses. In an embodiment, the cell dose is 10 to 1000 million cells/kg in single or multiple doses. In an embodiment, the cell dose is 50 to 5000 million cells/kg in single or multiple doses. In an embodiment, the cell dose is 50 to 10000 million cells/kg in single or multiple doses.

[0221] The invention provides a cell-based method to determine the potency and/or titer of a vector encoding a SAR (e.g., a SIR, a HC-SIR, Ab-TCR etc) by infecting T cells or a T cell line with impaired or abolished expression of one or more TCR constant chain. In an embodiment, the TCR constant chain is selected from the group consisting of constant chain of TCR α, β1, β2, γ, or δ. In an embodiment, the vector is a viral vector, a viral like particle, or a lipid nanoparticle. In an embodiment, the T cell line is a Jurkat cell line. In an embodiment, the Jurkat cell line has impaired and/or abolished expression of a TCR constant chain selected from the group consisting of constant chain of TCR α, β1, β2, γ, or δ. In an embodiment, the Jurkat cells are engineered to express a reporter (e.g., EGFP), optionally wherein the reporter is expressed under an NFAT driven promoter. In an embodiment, the method comprises exposing a T cell or T cell line that has impaired and/or abolished expression of a TCR constant chain selected from the group consisting of constant chain of TCR α, β1, β2, γ, or δ with a vector under conditions that lead to transduction of the cell with the vector, optionally culturing the cells for a time interval ranging from 1 h to 7 days, measuring the expression and/or activity of the SAR in the transduced cells. The expression and/or activity of the SAR can be measured using methods known in the art, including but not limited to Protein L staining, antibody staining, Topanga assay, JNG-NFAT-GFP assay, cytokine production, cytotoxicity assay and qPCR etc.

[0222] The invention also provides a broadly applicable method to detect the expression of a fusion protein, (e.g., a SAR) based on staining with an antibody, antibody fragment or a non-immunoglobulin antigen binding domain raised or directed against the antigen binding domain(s) of the SAR. In an embodiment, the SAR is a CAR (e.g., a second-generation CAR, a third generation CAR, an armored CAR etc.), a next generation CAR (e.g., a SIR, HIT, STAR, Ab-TCR, TFP, zSIR, z16SAR, CD16-SAR, HC-SAR etc.). In an embodiment, the antigen binding domain of the SAR comprises of an scFv, a vL/vH fragment, Fab, (Fab′)2, camelid vHH domain or a non-immunoglobulin antigen binding scaffold (e.g., D-domain, DARPIN, Centyrin etc). In an embodiment, the antibody is directed to an immunoglobulin or an antibody or an antibody fragment (e.g., Fab, (Fab′)2 etc.). In an embodiment, the antibody is not an anti-ideotype antibody.

[0223] In one aspect, the present disclosure provides methods and compositions for detecting a target antigen (e.g., an epitope tag and/or a SAR). In various embodiments, the detection is mediated by an antibody or antibody-derived binding molecule that specifically binds to the target antigen. Antibodies suitable for flow cytometric applications include monoclonal antibodies, polyclonal antibodies, and antibody fragments or derivatives thereof.

[0224] In one embodiment, the antibody is a monoclonal antibody that recognizes a single epitope on the antigen. In another embodiment, the antibody is a polyclonal antibody, which recognizes multiple epitopes on the target antigen. Monoclonal antibodies may be produced using hybridoma technology, phage display, or recombinant expression systems.

[0225] In certain embodiments, the antibody is a recombinant antibody, including chimeric antibodies, humanized antibodies, or fully human antibodies. In yet another embodiment, the antibody is a bispecific antibody or multi-specific antibody capable of recognizing two or more epitopes or antigens.

[0226] In some embodiments, antibody fragments are used instead of full-length antibodies. These include: (i) Fab fragments (antigen-binding fragment); (ii) F(ab′)2 fragments (bivalent antigen-binding); (iii) scFv fragments (single-chain variable fragments); (iv) nanobodies (VHH) derived from camelid species; and (v) other engineered fragments such as dsFv, diabodies, triabodies, and minibodies. Such fragments may retain antigen specificity while offering advantages such as improved tissue penetration or reduced background.

[0227] Target Regions of Antibodies include Anti-H+L: Antibodies directed against both the heavy and light chains of target immunoglobulins, often used for secondary detection. Anti-Fab: Antibodies specific to the Fab region of immunoglobulins, useful in detecting antigen-binding regions without recognizing Fc. Anti-F(ab′)2: Antibodies directed against F(ab′)2 fragments, offering selective recognition while avoiding Fc-mediated effects.

[0228] Antibodies used in flow cytometry may be derived from or raised in various species, including but not limited to mouse, rat, hamster, rabbit, goat, sheep, human, and camelid (e.g., llama, alpaca). Species selection may be based on compatibility with detection reagents (e.g., anti-species secondary antibodies) or reduction of cross-reactivity.

[0229] Antibodies may be of various isotypes depending on the species of origin. For example: (i) Mouse: IgG1, IgG2a, IgG2b, IgG3, IgM, IgA; (ii) Rat: IgG1, IgG2a, IgG2b, IgG2c, IgM; (iii) Rabbit: IgG; and (iv) Human: IgG1, IgG2, IgG3, IgG4, IgM, IgA. Isotype information is relevant for appropriate secondary antibody selection and understanding Fc-mediated effects.

[0230] Antibodies may be supplied or purified as whole serum (unpurified polyclonal antibody), affinity-purified (e.g., protein A/G or antigen-specific), IgG fraction (partially purified), or ascites fluid (hybridoma-derived). Highly purified and low-endotoxin formulations are preferred for certain in vivo or clinical applications.

[0231] To minimize background staining and improve specificity, antibodies may be: (i) isotype control-matched; (ii) species-adsorbed (e.g., mouse anti-human antibody adsorbed against mouse proteins); and/or (iii) Fc receptor-blocked or used in conjunction with Fc-blocking agents. Such adsorption improves signal-to-noise ratio in flow cytometry, particularly in multi-color or cross-species panels.

[0232] For detection, antibodies may be conjugated to: (i) fluorophores, such as FITC, PE, APC, PerCP, Alexa Fluor dyes (e.g., Alexa Fluor 488, 647), Brilliant Violet dyes (e.g., BV421), etc.; (ii) metal isotopes (for CyTOF/mass cytometry); (iii) enzymes (e.g., HRP or alkaline phosphatase for rare flow formats); (iv) biotin, with subsequent detection using fluorophore-labeled streptavidin; or (v) DNA barcodes (for multiplexed detection). Antibodies may be directly conjugated to the label or used with secondary reagents specific to the primary antibody species and isotype. The antibodies or fragments described herein may be used to: (i) detect surface, intracellular, or secreted antigens; (ii) quantify antigen expression; (iii) enrich or deplete cell populations by FACS or MACS; (iv) analyze immune cell phenotypes; and (v) assess functional states (e.g., activation, exhaustion). Flow cytometry may be performed on live or fixed cells, and intracellular staining may involve permeabilization protocols.

[0233] The present invention also relates to a method of isolating the fusion protein of the invention. Such a method comprises contacting the fusion protein with an antibody of the invention, preferably under conditions allowing formation of a complex between the antibody and the peptide comprised in the fusion protein. Thereby, binding of the fusion protein and the antibody is enabled. This contacting step, also referred to as capture step, may be conducted by contacting a sample, for example a solution, comprising the fusion protein with the antibody.

[0234] The sample to be contacted with the tag specific antibody can be any type of sample comprising a fusion protein of the invention and can be processed to separate the polypeptide. Preferably the sample is a solution, for example a lysate of a host cell or a body fluid, comprising the fusion protein of the invention, or a supernatant, such as a supernatant obtainable by centrifugation of a liquid comprising a host cell comprising or capable of expressing fusion protein of the invention, wherein the host cell is capable of secreting or otherwise transporting the fusion protein of the invention to the liquid.

[0235] The antibody used in the method of the present invention for isolation and/or purification can be used in solution or immobilized. To immobilize the antibody, the antibody can be bound to a sample carrier, solid support, or matrix. This immobilization step can occur prior to or after the binding of the antibody to the peptide comprised in the fusion protein. Methods for immobilizing antibodies and parts thereof are well-known to the person skilled in the art and any method that allows immobilization without impairing binding properties can be used.

[0236] If the antibody of the present invention is not immobilized to a solid support, then the method may comprise a further step of isolating the complex, for example by using a specific binding partner for the complex, such as a secondary antibody that is specific for example for the complex or for the antibody or for a detectable label, such as an affinity tag, that is conjugated to the antibody. The secondary binding partner can be in solution or can be immobilized or immobilizable to a solid support.

[0237] In an optional further step following the capture step, the solid support comprising the immobilized antibody bound to the fusion protein is washed to remove unbound and unspecifically bound constituents. Optionally, in a further step, the fusion protein can be eluted to obtain the isolated fusion protein. Elution of the fusion protein bound to the immobilized antibody can be achieved by methods known in the art. For example, the fusion protein can be eluted by competitive elution with an epitope peptide as described herein in isolated form. This isolated epitope peptide will then be in competition with the fusion protein to bind the immobilized tag-specific antibody. If the isolated peptide is added in surplus concentration, the reaction balance of the binding will be shifted to the binding of the immobilized antibody with the isolated epitope tag. This results in the release of the fusion protein. The epitope peptide used for elution may be the same epitope peptide that is comprised in the fusion protein. The epitope peptide used for elution may also be a different peptide than the epitope peptide comprised in the fusion protein. If the epitope peptide used for elution is a different one, it is preferred that the epitope peptide used for elution has a higher binding affinity to the antibody than the epitope peptide comprised in the fusion protein. Additional steps for further purifying the released polypeptide can optionally be added, such as method steps well-known to the skilled person.

[0238] The fusion protein may also remain immobilized to the solid support, such as (magnetic) beads, and processed further in downstream application such as mass spectrometry, without the elution step. The fusion protein may comprise a linker with a cleavage site that can be cleaved with an appropriate means, for example a protease, to remove the peptide. Thereby the polypeptide of the fusion protein may be released from the immobilized antibody, and the polypeptide can be obtained in its native form. For this embodiment, the nucleic acid sequence encoding the fusion protein should not only comprise a sequence encoding the epitope tag but also a sequence encoding a linker with a breakable site, for example a cleavage site recognized by a protease. The release step by enzymatic cleave can replace or follow the elution step.

[0239] Where the fusion protein of the invention comprises an antibody moiety, the present invention also envisions a method of isolating the target of the antibody moiety of the invention. In principle, this method can be carried out as described above for the isolation of a fusion protein. The method may comprise the additional step of contacting the fusion protein with a specific target of the antibody moiety comprised in the fusion protein. This contacting step may be conducted prior to or after contacting the fusion protein with the antibody that binds to the peptide tag comprised in the fusion protein, with the latter alternative being preferred. In a preferred method, first the antibody specific for the peptide tag is immobilized on the solid support, and then the fusion protein is immobilized via binding to the antibody that is specific to the peptide tag, followed by binding the target of the antibody moiety of the fusion protein to the fusion protein. Elution can be carried out as described above. The specific target may be a cell. For example, a cell surface receptor on the cell, such as CD62L The antibody moiety of the fusion protein may be specific to a structure on the cell, such as CD62L, The antibody moiety of the fusion protein may be a single domain antibody.

[0240] The present invention also envisions that detection and isolation of a fusion protein of the invention can be combined. Accordingly, the present invention envisions a method of detection and isolation of a fusion protein of the invention comprising a method of detection of the invention and a method of isolation and/or purification of the invention.

[0241] Combination of both methods may thus be carried out by using one antibody conjugated to a detectable label for detection, and another antibody conjugated to a solid support for isolation of the same fusion protein. Both antibodies may be any antibody of the invention. This combination may have the advantage that only one tagged fusion protein has to be generated and detection and isolation carried out with the same transgenic construct/cell. Sometimes, it may be desired that both antibodies have an identical sequence or at least an identical antigen-binding site.

[0242] Combination of both methods can also be carried out by using the same antibody and two different peptides for detection and purification. This has the advantage, that only one antibody has to be produced which, depending on the application, can be conjugated to a detectable label or a solid support. Combination of both methods can also be carried out by using two peptides and two antibodies. The fusion protein of interest may comprise a peptide having a high affinity to a given antibody. The present invention further relates to a system comprising one peptide tag and two antibodies or two peptide tags and one antibody or two peptide tags and two antibodies as described herein.

[0243] The present invention also relates to a complex comprising (a) fusion protein and (b) an antibody, wherein the fusion protein is a fusion protein of the invention and/or wherein the antibody is an antibody of the invention.

### Additional Description and Exemplary Embodiments of the Invention

[0244] In some embodiments, the epitope present on the extracellular protein is referred to as adaptor while the epitope present on the SAR is referred as adaptor binding domain. However, the two domains can be switched. Thus, in some embodiments, the extracellular polypeptide (i.e., SAR adaptor) may comprise a tag (e.g., SEQ ID NO: 1-11) that interacts with the scFv (i.e., adaptor binding domain) present on the signaling chain of the SAR. In other embodiments, the extracellular polypeptide (i.e., SAR adaptor) may comprise an antigen binding domain (e.g., scFv domain) that interacts with the epitope tag (i.e., adaptor binding domain) present on the signaling chain of the SAR.

[0245] In some aspects, the SAR of the disclosure includes an adaptor binding domain (e.g., P6, P7, P8, P9, P10, P11, P14, P16 etc.) that allows it to bind to an extracellular polypeptide or SAR adaptor. The immune cells expressing such SAR constructs can be redirected to different target cells via the use of different SAR adaptors (i.e., different antigen binding domains (e.g., antibodies. antibody fragments, vHH, FHVH etc.) fused to the adaptors). Exemplary adaptors and adaptor binding domains are provided herein.

[0246] The disclosure provides useful configuration and location for incorporation of adaptors (e.g., a tag or an epitope tag, e.g., Tag1-11 e.g., SEQ ID NO: 1-11 etc.) in a SAR. The disclosure provides useful configurations and locations for incorporation of multiple adaptors. The disclosure provides SAR constructs comprising 1, 2, 3 or more adaptors, e.g., adaptors comprising P7-16 or other protein interaction domains described herein. In an embodiment, the SARs comprise two or more adaptors of the same type (e.g., two P11 domains, two P13 domains etc.). In other embodiments, the SARs comprise two or more adaptors of different types (e.g., one P11 and one P13, or one P11 and one Q domain or one P11 and one RZIP domain or one P11 and one Strep-tag domain etc.).

[0247] The disclosure provides several configurations and designs for construction of SARs with AABDs (autonomous antigen binding domains) comprising one or more adaptor binding domain (e.g., a tag or an epitope tag, e.g., P8, P9, P11, P13, e.g., SEQ ID NO: 1-11 etc.). In an embodiment, the disclosure provides that a useful location for attachment of a tag to a SAR is at or near the N-terminus of one or more fragments comprising its antigen binding domain (e.g., vL, vH, scFv, AABD, vHH, FHVH, SVH, SVL, non-immunoglobulin antigen binding scaffold, Va, Vb, Vg, Vd, svd-TCR etc.) via an optional linker. Examples of such SAR are provided in SEQ ID NO: 4757-4759, 4761-4762. Tables A1-27 of PCT/US24/10592 provide schematic representation of various single chain and double chain SAR. One or more tags can be located in any of the linker regions (L) shown in these schematics. Furthermore, due to their relatively small size, the tags of the disclosure can be positioned between the different fragments comprising a SAR. In an embodiment, the tag is located C-terminus to the signal peptide; i.e., between the signal peptide and the antigen binding domain (e.g., scFv, vHH domain). In another embodiment, the tag in the linker region between the vL and vH (or vH and vL) fragments comprising an scFv of a SAR (e.g., SEQ ID NO:4754). In another embodiment, the tag is located between the scFv region and the hinge domain of a SAR (e.g., a CAR). In yet another embodiment, the tag is located between the hinge domain and the transmembrane domain of a SAR.

[0248] In an embodiment, the SAR is a double chain SAR (e.g., a SIR, Ab-TCR, zSIR, z16-SAR, TCR etc.). In an embodiment, one or more tags are located C-terminal to one or both signal peptides of a double chain SAR; i.e., between the signal peptide and the antigen binding domain (e.g., vL, vH, scFv, AABD, vHH, FHVH, SVH, SVL, non-immunoglobulin antigen binding scaffold, Va, Vb, Vg, Vd, svd-TCR etc.) (see SEQ ID NO: 4818-4827), In an embodiment, one or more tags are located N-terminal to one or more signaling chains of a double chain SAR. In an exemplary embodiment, the one or more tags are located between the vL fragment and TCRb constant chain and/or vH domain and TCRa constant domain of a double chain SIR (e.g., SEQ ID NO: 4892-4894). In an exemplary embodiment, the one or more tags are located between the different fragments comprising a hybrid chain of a hybrid chain SAR, e.g., between the TCRa and TCRb chains or between TCRb and TCRg chains or between TCRb and IgCL domains or between TCRa and IgG-CH1 domain etc. Similarly, a tag can be located between the TCR linker domains and the CD3z chain of an SIR or between Ig-like linker domain (e.g., IgCL and IgG-CH1) and CD3z domain of a zSIR or z16 SIR, In an embodiment, one or more tags can be located at any location (e.g., N-terminus, C-terminus or internal) of a polypeptide.

[0249] In an embodiment, the SAR is a single chain SAR. In another embodiment, the SAR is a multi-chain (e.g., double chain or triple chain) SAR. In an embodiment, an optional linker is present between the adaptor binding domain (tagged cassette) of the SAR and one or more fragments comprising its antigen binding domain. In an embodiment, the epitope tag serves as the linker between one or more fragments of a SAR. In an embodiment, the disclosure provides that a useful location for attachment of an adaptor binding domain (e.g., tag) to a SAR is at the N-terminus or near the N-terminus of an Ig linker, an Ig like linker or a long linker (e.g. linker more than 25 amino acids in length) which, in turn, is attached to a signaling chain (e.g., connecting peptide of a TCRα, TCR β, TCRγ, TCRδ etc.), The disclosure provides useful configuration and location for incorporation of adaptors (tags) in a SAR. The disclosure also provides useful configurations and locations for incorporation of multiple adaptors binding domains (tags). The disclosure provides SAR constructs comprising 1, 2, 3 or more adaptor binding domains, e.g., adaptor binding domains comprising SHARP-tag (e.g., P11, P13 or P16) or other protein interaction domains described herein. In an embodiment, the SARs comprise two or more adaptor binding domains of the same type. In other embodiments, the SARs comprise two or more adaptor binding domains of different types. In an embodiment, the two or more adaptor binding domains are located on the same polypeptide chain of the SAR. In an embodiment, the two or more adaptor binding domains are located on the same polypeptide chain of the SAR and are separated from each other by linkers. In exemplary embodiments, the linker can be a flexible linker or protease cleavable linker. In an embodiment, the two or more adaptor binding domains are located on different polypeptide chains of a multi-chain SAR (e.g., a double chain SIR).

[0250] Examples of SAR encoding nucleic acids targeting P11 and CD19 is represented by SEQ ID NO (DNA):8715-8716. Examples of SAR encoding nucleic acids targeting P13, CD19 and CD22 are represented by SEQ ID NO (DNA):8847 and 8849. The immune cells expressing these SARs can be used to target CD19 and/or BCMA expressing cells but can be redirected to target other antigens in combination with suitable antibody, antibody fragments and AABD (e.g., non-immunoglobulin antigen binding scaffolds) comprising a P11 domain.

[0251] Epitopes and recombinant polypeptides comprising one or more epitopes can be incorporated in antibodies, antibody fragments, non-immunoglobulin antigen binding scaffolds, cytokines, chemokines, biologicals, recombinant proteins, viral envelopes as epitope tags, linkers and adaptors and can be an be used to detect, isolate, purify, eliminate and/or regulate the activity of their fusion partners. Methods and compositions comprising Epitopes and recombinant polypeptides comprising one or more epitopes are described in WO2021055349 which is incorporated in its entirety by reference herein.

[0252] Conditionally active therapeutic proteins comprising epitope tags are presented in WO2012033953A1, which is incorporated by reference herein. In an embodiment, the epitope is inserted into an endogenous protein using gene targeting approaches (e.g., CRISPR/Cas9).

[0253] The present invention provides methods and compositions useful for treatment of a disease (e.g., cancer, autoimmune, infectious, degenerative disease etc.) and/or for initiating or modulating immune responses. In some embodiments, the present invention provides cellular therapeutics (e.g., immune cells) comprising a constitutive expression construct, which comprises a promoter operably linked to a gene of interest. In some embodiments, the present invention provides cellular therapeutics (e.g., immune cells) comprising (i) an antigen binding receptor, wherein the antigen binding receptor comprises an antigen-binding domain, a transmembrane domain, and a cytosolic signaling domain, and (ii) a constitutive or inducible expression construct, which comprises a promoter operably linked to a gene of interest. Among other things, the present invention encompasses the recognition that a combination of a cellular therapeutic described herein and one or more additional therapies (e.g., one or more additional cellular therapeutics (e.g., CAR-T cell, CAR-NK cell, TCR-T cell, TIL cell, allogenic NK cell, and autologous NK cell), antibody-drug conjugate, an antibody, and/or a polypeptide described herein), can lead to improved induction of beneficial immune responses, for example a cellular response (e.g., T-cell activation).

[0254] In general, a cellular therapeutic described herein can be produced from an immune cell, e.g., a cell useful in or capable of use in adoptive cell therapy. The article of manufacture can comprise a container and a label or package insert on or associated with the container. Kits are also provided that are useful for various purposes, e.g., for treatment of a target antigen-positive disease or disorder described herein, optionally in combination with the articles of manufacture.

[0255] In some embodiments, provided are methods for regulating and/or depleting SAR-expressing engineered immune cells from a subject administered with said cells. Depletion can be by inhibition or elimination. Regulation can be positive or negative control.

[0256] In one aspect, a method for depleting engineered immune cells expressing a SAR comprising an epitope tag specific for a monoclonal antibody (e.g., SN8, 2F2, Polatuzumab-vedotin, Polivy etc.) comprises contacting said engineered immune cell with a monoclonal antibody specific for the epitope tag. In some embodiments, a method for depleting from a subject administered with engineered immune cells expressing a TAG-SAR comprising an epitope tag specific for a monoclonal antibody comprises administering to the subject a monoclonal antibody specific for the epitope tag. In these embodiments, administration of the monoclonal antibody specific for the epitope tag present in the extracellular domain of the TAG-SAR to the subject eliminates, regulates or inhibits the activity of engineered TAG-SAR-expressing immune cells from the subject. In one aspect, depletion of engineered TAG-SAR expressing immune cells allows for recovery of an endogenous population of TAG-SAR-expressing cells.

[0257] In one aspect, the disclosure relates to a method for promoting recovery of endogenous antigen-expressing cells in a subject administered with engineered immune cells expressing at cell surface a TAG-SAR that target one or more antigens expressed on endogenously expressing cells comprising an epitope tag specific for an antigen binding agent (e.g., monoclonal antibody, vHH domain, antibody fragment, non-immunoglobulin antigen binding scaffold etc.), the method comprising administering an antigen binding agent (e.g., monoclonal antibody, vHH domain, antibody fragment, non-immunoglobulin antigen binding scaffold etc.) specific for the epitope tag to the subject.

[0258] In some embodiments, the antigen binding agent used in the method for depleting TAG-SAR-expressing engineered immune cells are selected from SN8, CD79b-2F2, Polatuzumab-vedotin, Polivy, a P11-specific CAR or a P11-specific next generation CAR and combinations thereof (e.g., SEQ ID NO: 646, 915). In some embodiments, said epitope specific for a monoclonal antibody (SHARP-tag) is Tag-1-123 (SEQ ID NO: 1-123; 3101-3114; 3124-3128, 3136-3141) or a mutant or a variant thereof and the antigen binding agent specific for the epitope is SN8, 2F2, Polatuzumab-vedotin, 10D10 or a SAR (e.g., SEQ ID NO: 646, 915). In some embodiments, the amount of epitope-specific mAb administered to the subject is sufficient to eliminate at least 20%, 30%, 40%, 50%, 60%, 70%, 80% or 90% of the SAR-expressing immune cell in the subject. In an embodiment, the monoclonal antibody is administered at a dose of 0.1-10 mg/kg intravenously. In an embodiment, the monoclonal antibody is administered at a dose of 1-2 mg/kg intravenously. In an embodiment, the monoclonal antibody is administered by any route including but not limited to subcutaneous, intradermal, intraperitoneal, intraventricular, intrapleural, intracerebral and intrathecal route.

[0259] In some embodiments, the antibody is conjugated to an agent.

[0260] In some embodiments, the agent is a drug or a radioligand. In some embodiments, the drug is selected from the group consisting of: auristatin E, auristatin F, monomethyl auristatin D (MMAD), monomethyl auristatin F (MMAF), monomethyl auristatin E (MMAE), or venetoclax.

[0261] In some embodiments, the antibody and the drug are conjugated via a linker.

[0262] In some embodiments, the linker is a cleavable linker. In some embodiments, the linker is a pH-sensitive linker, a glutathione-sensitive linker, or a protease-cleavable linker. In some embodiments, the cleavable linker is selected from the group consisting of: N-succinimidyl 4-(2-pyridyldithio)pentanoate (SPP), N-succinimidyl 3-(2-pyridyldithio)butanoate (SPDB), Sulfo-SPDB, valine-citrulline (Val-cit), acetyl butyrate, CL2A, maleimidocaproyl (MC), and Mal-EBE-Mal.

[0263] In some embodiments, the linker is a non-cleavable linker. In some embodiments, the non-cleavable linker is selected from the group consisting of: N-succinimidyl 4-(N-mal eimidomethyl)cyclohexane-1-carboxylate (SMCC) and maleimidom ethyl cyclohexane-1-carboxylate (MCC), MC-VC-PAB.

[0264] In some embodiments, the ratio of the antibody to the drug is between 1:1 and 1:10. In some embodiments, the ratio of the antibody to the agent is 1:4.

[0265] In some embodiments, the agent is a radioisotope. In some embodiments, the radioisotope is selected from the group consisting of: Iodine-131, Rhenium-188, Yttrium-90, Bismuth-213, and Actinium-225.

[0266] The present disclosure further provides molecular conjugates that comprise an antibody described herein (e.g., SABR) which is linked through a chemical linker to an agent. Any of the conjugates described herein may be synthesized using methods known in the art. See, e.g., Yao et al., Int J Mol Sci. 2016 Feb. 2; 17(2).

[0267] The ADCs comprising an antibody conjugated to a drug are advantageous to use therapeutically, in part because the drugs (e.g., chemotherapeutic drugs) are toxic and can be targeted to particular cell types expressing cell surface antigen (e.g., SHARP-tag-expressing cancer cells). By conjugating the drug or radio-isotope to the antibody, the toxicity of the antibody may be reduced by at least 20%, at least 30%, at least 40%, at least 50%, at least 60%, at least 70%, at least 80%, at least 90%, at least 99%, compared to the drug or radio-isotope in its free from.

[0268] The present disclosure further provides compositions comprising an antibody that binds to an antigen, or a tag provided herein (e.g., an antibody that binds to a SHARP-tag). In some embodiments, the pharmaceutical composition further comprises a pharmaceutically acceptable carrier. The components of the pharmaceutical compositions also are capable of being co-mingled with the molecules of the present disclosure, and with each other, in a manner such that there is no interaction which would substantially impair the desired pharmaceutical efficacy.

[0269] The present disclosure further provides for the administration of an antibody described herein, a conjugate comprising an antibody described herein, or a composition thereof (e.g., a pharmaceutical composition) to a subject.

[0270] A “subject” to which administration is contemplated refers to a human (i.e., male or female of any age group, e.g., pediatric subject (e.g., infant, child, or adolescent) or adult subject (e.g., young adult, middle-aged adult, or senior adult)) or a non-human animal. In some embodiments, the subject is a companion animal (e.g., a pet or service animal). “A companion animal,” as used herein, refers to pets and other domestic animals. In some embodiments, the administration occurs more than once.

[0271] The disclosure also provides novel accessory modules that can be co-expressed with the recombinant polypeptides (e.g., SARs) of the disclosure. The disclosure provides vectors comprising nucleic acids encoding polypeptides for a) membrane anchored low-affinity variants of cytokines with epitope tags (e.g., IL-2 and/or IL-15); b) membrane anchored cytokines with epitope tags; and c) multi-purpose gene switches with epitope tags that serve suicide, survival, and marker functions.

[0272] A “multipurpose switch” or “multipurpose gene” encodes for a protein that provide suicide, survival, and marker functions. In an embodiment, all the above functions are provided by a single polypeptide chain. In example embodiments, nucleic acids encoding multipurpose switches include CD8SP2-P11QP11-IL2-SythCD28TM (SEQ ID NO: 3115) and IL15-CD79b-Iso2-TM-CP4 (SEQ ID NO: 3116) etc.

[0273] “Suicide gene”, “suicide switch” or a “Kill-switch” encodes for a protein which possesses an inducible capacity to lead to cellular death. Examples of suicide genes include HSV-TK, iCaspase 9, tEGFR, CD20, tCD19, tHer2, tBCMA, RQR8, CD79b-Iso2 (SEQ ID NO: 3106), CD8SP2-CD79b-Iso2 (SEQ ID NO: 3107), CD8SP2-CD79b-FL (SEQ ID NO: 3108), CD8SP2-P16QP16-8 (SEQ ID NO: 3112), CD8SP2-P13QP13-8 (SEQ ID NO: 3114) etc. In an embodiment, any gene that encodes for a SHARP-tag described herein can serve as a suicide gene or a kill-switch.

[0274] A “survival gene”, “survival switch” or a “Life-switch” encodes for a protein that provides a pro-survival signal to a cell. Examples of survival genes include membrane anchored form of IL2 and membrane anchored form of IL15.

[0275] The disclosure also provides a therapeutic controls/accessory module comprising epitope tags described herein that serves as “suicide genes”, “Kill switch”, or a “multi-purpose switch”. Examples of nucleic acids encoding “Kill switch” are CD79b-Iso2 (SEQ ID NO: 3106), CD8SP2-CD79b-Iso2 (SEQ ID NO: 3107), CD8SP2-CD79b-FL (SEQ ID NO: 3108), CD8SP2-P16QP16-8 (SEQ ID NO: 3112), CD8SP2-P13QP13-8 (SEQ ID NO: 3114) etc.

[0276] Multiple switches, suicide switches and survival switches are described in PCT/US22/17177, which is incorporated in its entirety by reference herein.

[0277] The disclosure provides multi-purpose gene switches that serve suicide, survival, and marker functions. In an exemplary embodiment, a multipurpose switch serves as a life-death (or survival-suicide) switch for the purpose of adoptive cell therapy when ectopically expressed in a cell. In an embodiment, the multipurpose switch has the following formula: SP-D1-L1-D2-L2-D3-L3-D4 or SP-D2-L1-D1-L2-D3-L3-D4; where SP is an optional signal peptide that allows cell surface transport of the multipurpose switch and is cleaved to yield the mature peptide, D1 is receptor binding domain which binds to a receptor that promotes cell survival, D2 is a marker/suicide domain that comprise one or more epitope tags described herein, D3 is a hinge domain/stalk domain that allows the D1 and D2 domains to be projected away from the surface of the target cell, D4 is a membrane associating domain (e.g., a transmembrane domain or a membrane anchoring domain) that anchors the molecular switch to the cell membrane and L1, L2 and L3 are optional linker domains.

[0278] In an embodiment, the multipurpose switch comprises an in-frame fusion of a first module (D1) comprising a receptor-binding domain to a second module (D2) that serves as a marker/suicide-switch and a third module (D3) that serves as a hinge/stalk domain and a fourth module (D4) that serves as a membrane associating domain. In an embodiment, the D2, D3 and D4 modules are derived from the same endogenous protein. In an embodiment, the D2, D3 and D4 module are derived from different endogenous proteins. In an embodiment, D3 and D4 are derived from the same endogenous protein. In an embodiment, D3 and D4 are derived from the different endogenous proteins.

[0279] In an embodiment, the first module (D1) binds to a receptor that is expressed on cell surface, i.e., it binds to the extracellular domain of a receptor. In an embodiment, the first module (D1) binds to a receptor which when bound transmits a pro-survival and/or proliferative signal to the cell. In an embodiment, the first module binds to the receptor in cis (i.e., bind to the receptor expressed on the same cell as the cell expressing the molecular switch). In an embodiment, the first module binds to the receptor in trans (i.e., bind to receptor expressed on a cell other than the cell expressing the molecular switch). In an embodiment, the first module binds to the receptor in cis and in trans. In an embodiment, the first module (D1) comprises the receptor binding domain of a cytokine, a chemokine, a ligand, or a variant or a fragment thereof. Exemplary cytokines, chemokines and ligands include, but are not limited to, one of the following: IL-1α, IL-1β, IL-2, IL-3, IL-4, IL-5, IL-6, IL-7, IL-8, IL-9, IL-10, IL-11, IL-12, IL-13, IL-14, IL-15, IL-16, IL18, IL-19, IL20, IL-21, IL-22, IL-23, IL27, IL-28, CD40L, 4-1BBL, CD30L, OX40L, FLT3-L, APRIL, BAFF, RANTES, MIP, Erythropoietin, Thrombopoietin, SCF (stem cell factor), G-CSF, GM-CSF and M-CSF etc. In an embodiment, the first module is an antibody, an antibody fragment (e.g., scFv, vL, vH, Fab etc.), a single domain antibody (e.g., vHH, FHVH etc.) or a non-immunoglobulin antigen binding module that can bind to a receptor. In exemplary embodiments, the receptor is selected from one of the following: IL-1R, IL2R, IL-3R, IL-4R, IL-5R, IL-6R, IL-7R, IL-8R, IL-9R, IL-10R, IL-11R, IL-12R, IL-13R, IL-15R, IL-18R, IL-19R, IL-20R, IL-21R, IL-22R, IL-23R, IL-27R, IL-28R, CCR1, CCR3, CCR5, MIP-1R, PF4 receptor, Erythropoeitin-Receptor (Epo-R), TPO-R/MPL, GSF-R, c-Kit, and M-CSF receptor.

[0280] In an embodiment, a multipurpose switch serves as a life-death switch for the purpose of adoptive cell therapy when ectopically expressed in a cell. In an embodiment, the multipurpose switch comprises an in-frame fusion of a first module comprising a receptor-binding domain to a second module that serves as a kill-switch and a third module that serves as a membrane anchoring module. In an embodiment, the first module binds to a receptor that is expressed on cell surface, i.e., it binds to the extracellular domain of a receptor. In an embodiment, the first module binds to a receptor which when bound transmits a pro-survival and/or proliferative signal to the cell. In an embodiment, the first module binds to the receptor in cis (i.e., bind to the receptor expressed on the same cell as the cell expressing the molecular switch). In an embodiment, the first module binds to the receptor in trans (i.e., bind to receptor expressed on a cell other than the cell expressing the molecular switch). In an embodiment, the first module binds to the receptor in cis and in trans. In an embodiment, the second and the third modules are derived from the same endogenous protein. In an embodiment, the second and the third module are derived from different endogenous proteins. In an embodiment, the second module comprises of the extracellular domain of an endogenous protein (e.g., CD79b) or an epitope tag or a SHARP-tag (e.g., P11, P13, P16 etc.) thereof. In an embodiment, the extracellular domain of an endogenous protein (e.g., CD79b) or a tag (e.g., P11, P13, P16 etc.) thereof comprise the epitopes described herein. In an embodiment, there are multiple copies of the epitope tag present in the multipurpose switch. In an embodiment, the second module can be used to induce death of the cells expressing the molecular switch. In an embodiment, the second module can be used to induce death of the cells expressing the molecular switch when bound by an agent. In an exemplary embodiment, the agent that induces death of cells expressing the molecular switch when bound to the second module is a SABR. In an embodiment, the SABR is an antibody, a single domain antibody, a non-immunoglobulin antigen binding domain, an antibody drug conjugate, a bispecific antibody, or a fragment thereof. In an embodiment, the second module can be used to selectively enrich or deplete cells expressing the molecular switch. In an embodiment, the second module can be used to selectively detect, enrich and/or deplete cells expressing the molecular switch when bound by an agent. In an exemplary embodiment, the agent that can be used to selectively detect, enrich and/or deplete the cells expressing the molecular switch when bound to the second module is a SABR, i.e., an antibody, a single domain antibody, a non-immunoglobulin antigen binding domain or a fragment thereof. In an embodiment, the molecular switch is used to selectively detect, enrich and/or deplete cells ex vivo. In an embodiment, the molecular switch is used to selectively deplete cells in vivo. In an embodiment, the SABR (i.e., an antibody, antibody drug conjugate, bispecific antibody, a non-immunoglobulin antigen binding domain or a fragment thereof) that is used to detect, deplete, or enrich cells expressing the molecular switch has been approved for human administration by the US FDA or an equivalent regulatory agency in another country. Agents that have been approved by the US FDA for human administration are known in the art and include, but are not limited to, Polatuzumab (Polivy) etc. In an embodiment, the agent that is used to detect, deplete, or enrich cells expressing the molecular switch is approved by the FDA for ex vivo clinical use. An example of such agent is an antibody against CD34 that has been approved by the FDA to be used in conjunction with the clinically approved CliniMACS CD34 system (Miltenyi). In an embodiment, multipurpose switches are encoded by nucleic acids represented by CD8SP2-P13QP13-IL2-SythCD8TM (SEQ ID NO: 3115) and IL15-CD79b-Iso2-TM-CP4 (SEQ ID NO: 3116) etc. These multipurpose switches when expressed in immune cells (e.g., T cells or NK cells etc.) provides them with a survival signal by binding to the IL2 or IL15 receptor through the N-terminal module comprising IL2 or IL15. The second module of this multipurpose switch comprises the extracellular domain of CD79b or P11QP11 which is recognized by P11-binding agents (e.g., SN8 or Polatuzumab) and can be used for the detection, selective depletion and/or enrichment of transgene (e.g., SAR) expressing cells. The extracellular domain of CD79b or CD79b isoform 2 comprising the second module can be also used for selective suicide of transgene (e.g., SAR) expressing cells by the use of the epitope-targeted agents (e.g., SABR), such as an antibody or an antibody drug-conjugates targeting the SHARP-tag (e.g., SEQ ID NO: 674, 557 etc.). The third module in this molecular switch comprises of the hinge and/or transmembrane domain of CD79b-Isoform 2 and serves to anchor the switch to the cell membrane. In an embodiment, the second module is a synthetic module comprising one or more copies of a SHARP-tag described here. In an embodiment, the epitope is present in the extracellular domain of an endogenous protein. An example of a synthetic module comprising two or more copies of an epitope is P11QP11, a module harboring a CD34 epitope and two P11 epitopes. The P11QP11 module allows selection with the clinically approved CliniMACS® CD34 system (Miltenyi Biotec, Germany). As the multipurpose switches are modular in format, one module can be replaced with a different module. Thus, the IL2 module can be replaced by a different cytokine (e.g., IL15, IL18, IL21 etc.). These multipurpose proteins provide a pro-survival signal through their cytokine moiety (e.g., IL2, IL15, IL18, IL21 etc.) but can be used to kill-off the cells by the use of an agent (e.g., an antibody) that binds to the second module, thereby acting as a suicide gene that allow selective deletion of administered T cells in the face of toxicity. The second module (e.g., P11QP11 etc.) can be also used as a marker for measurement of transduction and to allow selection of transduced cells. The second module can be replaced by any of the SHARP-tags described herein (e.g., SEQ ID NO: 1-123, 150-167, 251-440, 550-579, 631-650, 651-654, 656, 674-676, 686, 689, and 692-720).

[0281] The multipurpose switch expression cassettes are compact in size and can be easily packaged in viral vectors. They are much more manageable size than the expression cassettes encoding individual marker, suicide, and survival genes, which would require separate promoters. They have the added advantage of comprising survival, suicide, and marker gene elements with sensitivity at least equal to that demonstrated by the individual genes.

[0282] In an embodiment, the second module (D2) is a synthetic module comprising one or more copies of an epitope or a mimotope. In an embodiment, the epitope is present in the extracellular domain of an endogenous protein. The polynucleotide encoding the multipurpose switches of the disclosure may comprise or consist of a variant of the sequence shown as SEQ ID No. 3115-3116, which has at least 70%, 80% or 90% identity with the sequence shown as SEQ ID No. 3115-3116, as long as it encodes for a polypeptide that retains the functional activity of the polypeptide encoded by SEQ ID No. 3115-16.

[0283] The multipurpose molecular switches of the disclosure can be in the form of a fusion protein, in which the polypeptide is fused to a protein of interest (POI). The fusion protein may comprise a self-cleaving peptide (e.g., P2A or F2A) between the polypeptide encoding the multipurpose switch and the protein of interest. The protein of interest is a molecule for expression at the surface of a target cell. The POI may exert a therapeutic or prophylactic effect when the target cell is in vivo. The POI may be a SAR (e.g., a CAR, SIR, zSIR, HIT, STAR, cTCR, Ab-TCR, TFP, TAC, KIR-CAR, recombinant TCR etc.) or an endogenous TCR.

[0284] The disclosure also provides a nucleic acid sequence capable of encoding a multipurpose switch encoding polypeptide or fusion protein of the disclosure.

[0285] The nucleic acid, when expressed by a target cell, causes the encoded multipurpose switch polypeptide to be expressed at the cell-surface of the target cell. Where the nucleic acid encodes both the multipurpose switch polypeptide and POI (for example as a fusion protein), it should cause both the polypeptide of the disclosure and the POI to be expressed at the surface of the target cell. The nucleic acid sequence may be RNA or DNA, such as cDNA. The disclosure also provides a vector which comprises a nucleic acid sequence of the multipurpose molecular switch. The vector may also comprise a transgene of interest, i.e., a gene encoding a POI (e.g., a SAR).

[0286] The vector should be capable of transfecting or transducing a target cell, such that they express the polypeptide encoding the multipurpose switch and optionally a protein of interest.

[0287] The vector may be a non-viral vector such as a plasmid. The vector may be a viral vector, such as a retroviral or lentiviral vector. The vector may comprise a nucleic acid encoding the polypeptide and a nucleic acid comprising the POI as separate entities, or as a single nucleotide sequence. If they are present as a single nucleotide sequence, they may comprise one or more internal ribosome entry site (IRES) sequences between the two encoding portions to enable the downstream sequence to be translated. In an embodiment, the multipurpose molecular switch and the POI may be expressed from a single vector using separate promoters. In another embodiment, the multipurpose switch and the POI may be expressed from separate vectors.

[0288] The disclosure also provides a cell which expresses a multipurpose switch polypeptide of the disclosure. The cell may co-express the multipurpose switch polypeptide and a POI (e.g., a SAR) at the cell surface. The disclosure also comprises a cell population which comprises a cell according to the disclosure. The disclosure provides a method for measuring transduction with a transgene of interest (which encodes a protein of interest POI, e.g., a SAR), which comprises the step of transducing a population of cells with a vector which co-expresses the multipurpose switch polypeptide of the disclosure and the protein of interest (e.g., a SAR) and detecting expression of the multipurpose switch on the surface of cells, wherein the proportion of cells expressing the multipurpose switch polypeptide of the disclosure corresponds to the proportion of cells transduced with the transgene of interest.

[0289] The disclosure also provides a method for selecting cells expressing a POI (e.g., a SAR) which comprises the following steps:
[0290] (i) detecting expression of the multipurpose switch on the surface of cells transfected or transduced with a vector of the disclosure which comprises a nucleotide sequence encoding the POI (e.g., a SAR); and
[0291] (ii) selecting cells which are identified as expressing the multipurpose switch.

[0292] Cells may be identified and/or sorted by methods known in the art such as FACS or Miltenyi cliniMACS® system.

[0293] The disclosure also provides a method for preparing a purified population of cells enriched for cells expressing a POI (e.g., SAR) which comprises the step of selecting cells expressing a POI (e.g., a SAR) from a population of cells using the method described above.

[0294] The disclosure also provides a method for tracking transduced cells in vivo which comprises the step of detection of expression of the polypeptide of the disclosure at the cell surface. Cells may be tracked in vivo by methods known in the art such as bioluminescence imaging. For such applications, the polypeptide of the disclosure may be engineered to be co-expressed with a detectable protein, such as luciferase or a luciferase fragment, such as HiBIT (e.g., SEQ ID NO: 721). The HiBIT tag can be used to detect the cells using complementation assay with LgBIT that is known in the art.

[0295] The disclosure also provides a method for deleting cells transduced by a vector according to the disclosure, which comprises the step of exposing the cells to an agent that binds to the multipurpose switch polypeptide. In an embodiment, the agent binds to the D2 domain of the multipurpose switch polypeptide. In an embodiment, the agent is an antibody (e.g., SN8, 2F2, Polatuzumab, huMA79b or H2Mab-250) and cells are exposed to the antibody in the presence of complement. In an embodiment, the agent is an antibody drug conjugate (e.g., Polatuzumab-vedotin or Polivy etc.). In an embodiment, the multipurpose switch comprises CD79b or the variants or fragments thereof and the agent is SN8, 2F2, Polatuzumab-vedotin (Polivy), or huMA79b. In an embodiment, the multipurpose switch comprises a SHARP-tag represented by SEQ ID NO: 557-566 or a functional variant thereof and the agent is H2Mab-250 or a functional variant or a derivative thereof.

[0296] When the multipurpose switch polypeptide of the disclosure is expressed at the surface of a cell, binding of the SABR (e.g., SN8, 2F2, huMA79b, Polatuzumab-vedotin or H2Mab-250 etc.) to the D2 domain of the polypeptide causes lysis of the cell. More than one molecule of agent (e.g., Polatuzumab-vedotin) may bind per multipurpose switch polypeptide expressed at the cell surface. Deletion of cells may occur in vivo, for example by administering the agent (e.g., Polatuzumab-vedotin, SN8 etc.) to a patient.

[0297] A technical challenge with the next generation SAR constructs (e.g., SIR, zSIR, Ab-TCR, HIT, STAR etc.) is the lack of an easy method for their detection, isolation, purification, or depletion. The addition of the kill switches on the CAR constructs have been described but suffer from the problems of interfering with the SAR binding to its target antigen and/or off-target signaling. The applicant has discovered that cytokines (e.g., IL2 and 1L15 etc.) can be fused in frame to the membrane anchored form of a molecule (e.g., CD79b) or a fragment thereof (e.g., P11 etc.) without interfering with their binding and signaling activity. The disclosure provides cytokines (e.g., IL2 and IL15 etc.) and their low affinity variants fused to a membrane anchored molecule (e.g., CD79b, P11QP11). The fusion construct may also comprise one or more additional epitope tags (e.g., SEQ ID NO: 1-123, 150-167, 251-440, 550-579, 631-650, 651-654, 656, 674-676, 686, 689, and 692-720 etc.) that can be used for detection, isolation, purification and or depletion of the cells expressing them, including SAR expressing cells. These epitope tags can be used for detection, isolation, purification and or depletion of the immune cells (e.g., SAR-expressing NK or T cells) using the methods described in PCT/US2021/022641.

[0298] Adoptive transfer of genetically modified T cells is an attractive approach for generating desirable immune responses, such as an anti-tumor immune response. The disclosure provides a method for treating and/or preventing a disease in a subject, which comprises the step of administering a cell according to the disclosure to the subject. The method may comprise the step of administering a population of cells to a subject. The population of cells may be enriched for cells expressing a transgene of interest using a method described above. The method may involve the following steps:
[0299] (i) taking a sample of cells, such as a blood sample from a patient,
[0300] (ii) extracting the T-cells,
[0301] (iii) transducing or transfecting the T cells with a vector of the disclosure which comprises a nucleic acid sequence encoding the multipurpose switch and a transgene (e.g., SAR) of interest,
[0302] (iv) expanding the transduced cells ex-vivo
[0303] (v) returning the cells to the patient.
   The transduced cells may possess a desired therapeutic property such as enhanced tumor specific targeting and killing.

[0304] The invention further provides a method for isolating a tag suitable for biotechnology, genetic engineering and cell and gene therapy applications. The method involves the steps comprising of one or more of the following a) obtaining the sequence of an endogenous protein(s) and its isoforms; b) optionally analyzing the sequence(s) to determine the type of the protein; c) optionally determine the location of the signal peptide and transmembrane domain; d) determine the sequence of the N-terminal, C-terminal, juxta membrane, hinge, stalk, linker regions of the protein; e) optionally analyzing the secondary structure of the protein; f) select the regions of the protein that are located i) C-terminal to the signal peptide in the case of type I transmembrane protein or a membrane anchored protein, ii) near the C-terminal of a type II protein, iii) in the juxta membrane region of a protein facing the extracellular side, iv) unfolded region of the protein, v) random coil or unstructured region of a protein, vi) in the loops connecting secondary structure elements within a protein; vii) hinge, stalk, connecting peptide or linker regions of a protein; viii) extracellular region of a protein; ix) various combination of i) to viii); g) optionally check the hydrophilicity and polarity of the regions; h) optionally check that the region is not a mutational hot spot and/or is not associated with a congenital or acquired disease; i) optionally check whether the region identified above is recognized by a drug that is approved by a regulatory agency and/or is in clinical development; j) optionally generate recombinant polypeptides (e.g., SAR) incorporating the one or more copies of the regions identified above as tags; k) optionally check the expression and/or activity of the tagged polypeptide using appropriate assays; 1) optionally develop an antibody or a binding reagent against the tag; m) optionally check the ability of the antibody or the binding reagent to recognize the tag and/or the tagged polypeptide.

[0305] In some embodiments, the invention relates to a recombinant DNA construct comprising sequences encoding a SAR as defined above. In some embodiments, the SAR comprises an extracellular domain, wherein said extracellular binding domain comprises at least one SABR-specific epitope (SHARP-tag) to be bound by an epitope-specific mAb or SABR for in vitro cell sorting and/or in vivo cell depletion of T cells expressing said SAR.

[0306] According to one aspect, the invention relates to a method for in vitro sorting the recombinant fusion protein (e.g., TAG-SAR)-expressing immune cell, comprising contacting a population of said engineered immune with a SABR (preferably monoclonal Antibodies or mAbs) to collect only cells expressing the recombinant fusion protein (e.g., TAG-SAR).

[0307] In some embodiments, the invention relates to a method for in vitro sorting SAR-expressing immune cell, wherein said TAG-SAR comprises at least one extracellular binding domain comprising at least one SHARP-specific epitope as described above, comprising contacting a population of said immune cells with a monoclonal antibody specific for said SHARP-specific epitope to collect only said TAG-SAR-expressing immune cell.

[0308] In some embodiments, the methods described herein apply to all proteins comprising the SHARP-tag. The methods also apply to all host cells expressing a protein comprising a SHARP-tag

[0309] In some embodiments, the invention relates to a method for in vitro sorting TAG-SAR-expressing immune cells, wherein said TAG-SAR comprises at least one extracellular binding domain comprising at least one SHARP-tag, comprising contacting a population of said immune cells with an epitope-specific SABR specific for said SHARP-tag, selecting the cells that bind to the SABR to obtain a population of cells enriched in TAG-SAR-expressing immune cell.

[0310] In some embodiments, said SABR (e.g., monoclonal antibody) specific for said SHARP-tag epitope is conjugated to a fluorophore and the step of selecting the cells that bind to the monoclonal antibody is done by Fluorescence Activated Cell Sorting (FACS).

[0311] In some embodiments, said SABR (e.g., monoclonal antibody) specific for said SHARP-tag is conjugated to a magnetic particle and the step of selecting the cells that bind to the monoclonal antibody is done by Magnetic Activated Cell Sorting (MACS).

[0312] In some embodiments, the extracellular binding domain of the SAR comprises a SHARP-tag of SEQ ID NO 1-123, 150-167, 251-440, 550-579, 631-650, 651-654, 656, 674-676, 686, 689, and 692-720.

[0313] In some embodiments, the extracellular binding domain of the SAR comprises a SHARP-tag of SEQ ID NO 1-123, 252-252, 557-566 and the antibody used to contact the population of immune cells is Polatuzumab vedotin, 2F2, SN8 or hu.MA79b or H2Mab-250 or functional variant thereof.

[0314] In some embodiments, the population TAG-SAR-expressing immune cells obtained when using the method for in vitro sorting TAG-SAR-expressing immune cells described above, comprises at least 70%, 75%, 80%, 85%, 90%, 95% of SAR-expressing immune cells. In some embodiments, the population TAG-SAR-expressing immune cells obtained when using the method for in vitro sorting TAG-SAR-expressing immune cells described above, comprises at least 85% TAG-SAR-expressing immune cells.

[0315] In some embodiments, the population of TAG-SAR-expressing immune cells obtained when using the method for in vitro sorting SAR-expressing immune cells described above shows increased cytotoxic activity in vitro compared with the initial (non-sorted) cell population using the protocol described here. In a preferred embodiment, said cytotoxic activity in vitro is increased by 10%, 20%, 30% or 50%.

[0316] Preferably, the SABR (e.g., mAbs) are previously bound onto a support such as a column or on beads such as routinely realized by the skilled in the art.

[0317] According to a favored embodiment, immune cells are T-cells, NK cells, NKT cells, monocytes, or macrophages.

[0318] According to the invention, cells to be administered to the recipient may be enriched in vitro from the source population.

[0319] Methods of expanding source populations are well known in the art, and may include selecting cells that express an antigen such as SHARP-tag, using combinations of density centrifugation, immuno-magnetic bead purification, affinity chromatography, and fluorescent activated cell sorting, known to those skilled in the art.

[0320] In an embodiment, the method used for sorting cells expressing a SHARP-tagged protein (e.g., TAG-SAR) is the Magnetic-Activated Cell Sorting (MACS).

[0321] Amongst other technique, FACS is a technique of choice to purify cell populations of known phenotype as very high purity of the desired population can be achieved, or when the target cell population expresses a very low level of the identifying marker, or when cell populations require separation based on differential marker density.

[0322] In an embodiment of the invention, the mAb used in the method for sorting T cells expressing the SAR is chosen 2F2, SN8, huMA79b, 10D10 or H2Mab-250 or a variant.

### Method for Depleting SHARP-Tagged-Expressing Immune Cells

[0323] By “in vivo depletion” is meant in the present invention the administration of a treatment to a mammalian organism aiming to stop the proliferation of SHARP-tag-expressing immune cells (e.g., TAG-SAR) by inhibition or elimination.

[0324] One aspect of the invention is related to a method for in vivo depleting an engineered immune cell expressing a TAG-SAR comprising an SHARP-tag as previously described, comprising contacting said engineered immune cell or said TAG-SAR-expressing immune cell with at least one epitope-specific SABR or mAbs. Another aspect of the invention relates to a method for in vivo depleting immune TAG-SAR-expressing immune cell which comprises a SHARP-tag by contacting said engineered immune cell with epitope-specific antibodies. The method, however, can apply to a cell that expresses any protein that comprises a SHARP-tag on its extracellular domain.

[0325] Preferably, said immune cells are T-cells and/or the SABR are monoclonal antibodies.

[0326] According to one embodiment, the in vivo depletion of immune engineered cell is performed on engineered immune cell which has been previously sorted using the in vitro method of the present invention. In this case, this will be the same infused mAb used.

[0327] According to an embodiment, the SHARP-tag is a CD79b peptide antigen (e.g., SEQ ID NO: 1-123, 150-167, 251-440) and the epitope-specific mAb is Polatuzumab, SN8, 2F2, H2Mab-250 or a functional variant thereof.

[0328] According to an embodiment, the SHARP-tag is a Her2 peptide antigen (e.g., SEQ ID NO: 557-566) and the epitope-specific mAb is H2Mab-250 or a functional variant thereof.

[0329] In some embodiments, the invention relates to a method for in vivo depleting an engineered immune cell expressing a TAG-SAR comprising an SHARP-tag (SAR-expressing immune cell) as previously described, in a patient comprising contacting said TAG=SAR-expressing immune cell with at least one epitope-specific SABR (e.g., mAb).

[0330] In an embodiment of the invention, the mAb used in the method for depleting an engineered immune cell expressing a TAG-SAR is chosen amongst Polatuzumab vedotin, 2F2, huMA79b, SN8 and H2Mab-250.

[0331] In some embodiments, the step of contacting said engineered immune cell or said SAR-expressing immune cell with at least one epitope-specific mAb comprises infusing the patient with epitope-specific SABR (e.g., mAb), preferably Polatuzumab vedotin, 2F2, huMA79b, SN8 or H2Mab-250 or their variants. In some embodiments, the amount of SABR (mAb) administered to the patient is sufficient to eliminate at least 20%, 30%, 40%, 50%, 60%, 70%, 80% or 90% of the TAG-SAR-expressing immune cell in the patient.

[0332] In some embodiments, the step of contacting said engineered immune cell or said TAG-SAR-expressing immune cell with at least one epitope-specific mAb or SABR comprises infusing the patient with 1-2 mg/Kg of Polatuzumab vedotin, once or several times, preferably once weekly.

[0333] In some embodiments, when immune cells expressing a SAR comprising an SHARP-tag (CAR-expressing immune cells) are depleted in a CDC assay using epitope-specific mAb, the amount of viable SAR-expressing immune cells decreases, preferably by at least 10%, 20%, 30%, 40%, 50%, 60%, 70%, 80% or 90%. Preferably the CDC assay is the assay disclosed in Example 3, Example 4 or Example 7.4. In some embodiments, said SHARP-tag is a SEQ ID NO: 1-123, preferably SEQ ID NO 1, 2, 3, 50-59 and the epitope-specific mAbs is Polatuzumab vedotin.

[0334] To one particular embodiment, the in vivo depletion of SAR-engineered immune cells is performed by infusing bi-specific antibodies or bispecific T cell engager.

[0335] According to another particular embodiment, the infused bi-specific mAb is able to bind both the SHARP-tag (e.g., tag, e.g., P7, P8, P9, P10, P11 etc.) borne on engineered immune cells expressing and to a surface antigen on an effector and cytotoxic cell.

[0336] According to a particular embodiment, a cytotoxic drug is coupled to the epitope-specific mAbs or SABR which are used in to deplete TAG-SAR-expressing immune cells, By combining targeting capabilities of monoclonal antibodies with the cancer-killing ability of cytotoxic drugs, antibody-drug conjugate (ADC) allows a sensitive discrimination between healthy and diseased tissue when compared to the use of the drug alone.

[0337] According to another particular embodiment, the epitope-specific mAb or SABR to be infused is conjugated beforehand with a molecule able to promote complement dependent cytotoxicity (CDC). Therefore, the complement system helps or complements the ability of antibodies to clear pathogens from the organism. When stimulated by one of several, is triggered an activation cascade as a massive amplification of the response and activation of the cell-killing membrane attack complex.

[0338] In some embodiments of the invention, the epitope-specific mAb or SABR used in the method for sorting and depleting an engineered immune cell expressing a SAR is the same and is chosen amongst Polatuzumab vedotin, 2F2, SN8, huMA79b and H2Mab-250.

[0339] In some embodiments of the invention, different antibodies are used for sorting and depleting the cells. SARs and immune cells comprising them have been extensively disclosed and can be prepared by the skilled person according to known methods.

[0340] The different methods described above involve expressing SAR at the surface of a cell. As a non-limiting example, said SAR can be expressed by introducing the latter into a cell. SARs can be introduced as transgene encoded by one plasmid vector. Said plasmid vector can also contain a selection marker which provides for identification and/or selection of cells which received said vector.

[0341] In another embodiment, isolated cell or immune cell expressing a SAR as described herein obtained by the different methods or cell line derived from said isolated cell as previously described can be used as a medicament. In another embodiment, said medicament can be used for treating pathologies such as cancer in a patient in need thereof.

[0342] In certain embodiments of the present invention, cells are administered to a patient in conjunction with (e.g., before, simultaneously or following) any number of relevant treatment modalities, including but not limited to treatment with agents such as antiviral therapy, cidofovir and interleukin-2, Cytarabine (also known as ARA-C) or natalizumab treatment for MS patients or efaliztimab treatment for psoriasis patients or other treatments for PML patients. In further embodiments, the T cells of the invention may be used in combination with chemotherapy, anti-androgen agents, radiation, immunosuppressive agents, such as cyclosporin, azathioprine, methotrexate, mycophenolate, and FK506, antibodies, or other immunoablative agents such as CAMPATH, anti-CD3 antibodies or other antibody therapies, cytoxin, fludaribine, cyclosporin, FK506, rapamycin, mycophenolic acid, steroids, FR901228, cytokines, and irradiation.

[0343] The article of manufacture can comprise a container and a label or package insert on or associated with the container. Suitable containers include, for example, bottles, vials, syringes, etc. Articles of manufacture and kits comprising combinatorial therapies described herein are also contemplated.

[0344] Package insert refers to instructions customarily included in commercial packages of therapeutic products that contain information about the indications, usage, dosage, administration, contraindications and/or warnings concerning the use of such therapeutic products. In some embodiments, the package insert indicates that the composition is used for treating a target antigen-positive cancer or a target antigen-positive viral infection. Additionally, the article of manufacture may further comprise a second container comprising a pharmaceutically acceptable buffer, such as bacteriostatic water for injection (BWFI), phosphate-buffered saline, Ringer's solution and dextrose solution. It may further include other materials desirable from a commercial and user standpoint, including other buffers, diluents, filters, needles, and syringes.

[0345] Kits are also provided that are useful for various purposes, e.g., for treatment of a target antigen-positive disease or disorder described herein, optionally in combination with the articles of manufacture. Kits of the disclosure include one or more containers comprising a tag and/or SAR effector cell composition (or unit dosage form and/or article of manufacture), and in some embodiments, further comprise another agent (such as the agents described herein) and/or instructions for use in accordance with any of the methods described herein. The kit may further comprise a description of selection of individuals suitable for treatment. A kit for detection or purification of a fusion protein may comprise a nucleic acid or a nucleic acid expression construct encoding a peptide/epitope tag as defined herein, which may be present in the fusion protein. The nucleic acid may comprise a site, such as a cleavage or recombination site, that facilitates genetically fusing a polypeptide to the peptide/epitope tag. A nucleic acid sequence encoding the peptide/epitope tag may be operably linked to sequence elements that contain information regarding to transcriptional and/or translational regulation. The kit may also comprise an antibody of the invention, optionally conjugated to a detectable label described herein, preferably an optically detectable label or an affinity tag. Alternatively or additionally, the kit may comprise a detectable moiety that can be conjugated to the antibody of the invention. The kit may also comprise buffers and reagents necessary for the isolation/purification and/or detection methods of the present invention. The kit may also comprise buffers and reagents necessary to introduce the nucleic acid or the nucleic acid expression construct comprised in the kit into a host cell. The kit may also comprise at least one (secondary) specific binding partner as described herein or a (further) specific binding partner that specifically binds the (secondary) specific binding partner as described herein. The kit may also comprise a solid support comprising the antibody of the invention immobilized or attached to the solid support. The kit may also comprise an isolated peptide as described herein suitable for competitive elution of a fusion protein bound to an antibody of the invention, or other means for elution of the fusion protein, such as a proteinase. Instructions supplied in the kits of the disclosure are typically written instructions on a label or package insert (e.g., a paper sheet included in the kit), but machine-readable instructions (e.g., instructions carried on a magnetic or optical storage disk) are also acceptable.

[0346] The instructions relating to the use of the SAR effector cell compositions generally include information as to dosage, dosing schedule, and route of administration for the intended treatment. The containers may be unit doses, bulk packages (e.g., multi-dose packages) or sub-unit doses. Kits may also include multiple unit doses of the SAR and pharmaceutical compositions and instructions for use and packaged in quantities sufficient for storage and use in pharmacies, for example, hospital pharmacies and compounding pharmacies.

[0347] The invention is further described by reference to the following experimental examples. These examples are provided for purposes of illustration only and are not intended to be limiting unless otherwise specified. Thus, the disclosure should in no way be construed as being limited to the following examples, but rather, should be construed to encompass any and all variations which become evident as a result of the teaching provided herein.

### Examples

[0348] Cells were cultured at 37° C., in a 5% CO₂ humidified incubator. The cell lines were obtained from ATCC, NIH AIDS reagent program or were available in the laboratory. Jurkat cell line (clone E6-1) engineered with a NFAT-dependent EGFP (or GFP) reporter gene and named JNG was a gift from Dr. Arthur Weiss at University of California San Francisco and have been described to study CAR-signaling ((Wu, C Y et al., Science 350:293-302, 2015). Jurkat cells were maintained in RPMI-1640 medium supplemented with 10% FBS. NK92MI cells were obtained from ATCC and were maintained as per the instructions provided. NK92 cells were also obtained from ATCC and maintained in RPMI medium with 20% FBS and 200 U/mL of hIL2. T2 cells were from ATCC.

### Generation of Lentiviral Vectors Encoding SARs

[0349] The SAR constructs were cloned in the lentiviral, retroviral or sleeping beauty transposon vectors. Exemplary vectors are provided in SEQ ID NO: 1-6. Other vectors that can be used for generating SARs of the disclosure are known in the art. The psPAX2 vector was a gift from Didier Trono (Addgene plasmid #12260). The pLP/VSVG envelope plasmid and 293FT cells were obtained from Invitrogen (Thermofisher Scientific). The retroviral transfer vector MSCVneo, MSCVhygro, and MSCVpac and the packaging vector pKAT have been described previously (PCT/US2018/53247). The methods for generation of SAR (e.g., 2^{nd} generation CARs, SIRs, Ab-TCR and TFP etc.), the generation and use of GGS-NLuc fusion proteins, and the generation and use of luciferase (e.g., GLuc and Luc146-1H2) reporter cell lines for measurement of cellular cytotoxicity using the Matador assays have been described (PCT/US2017/024843, PCT/US2017/025602, PCT/US2017/052344, PCT/US2017/064379 and PCT/US2018/53247), which are incorporated in their entirety by reference herein.

[0350] The sequences comprising the antigen binding domains of SAR are codon optimized and synthesized artificially using publicly available software (e.g. Thermofisher or IDT) and commercial vendors (e.g. IDT). The resulting fragments are PCR amplified and cloned in different vectors containing the different SAR backbones using standard Molecular Biology techniques. In general SAR constructs are typically cloned in a lentiviral vector. The sequences of the SIR constructs are confirmed using automated sequencing.

### Lentivirus and Retrovirus Vectors

[0351] Lentiviruses were generated in 293FT cells by transfection of transfer plasmids encoding the different SAR constructs and 2^{nd} or 3^{rd} generation packaging plasmids using polyethylene amine (PEI) essentially as described previously (Natarajan et al, Scientific Reports, 10:2318) and PCT/US2018/53247.

### Infection of T Cells, NK Cells and PBMC

[0352] Buffy coat cells were obtained from healthy de-identified adult donors from the Blood Bank at Children Hospital of Los Angeles and used to isolate peripheral blood mononuclear cells (PBMC) by Ficoll-Hypaque gradient centrifugation. PBMC were either used as such or used to isolate T cells or NK cells using magnetic microbeads (Miltenyi Biotech) and following the manufacturer's instructions. PBMC or isolated T cells were re-suspended in XVIVO medium (Lonza) supplanted with 10 ng/ml CD3 antibody, 10 ng/ml CD28 antibody and 100 IU recombinant human-IL2. Cells were cultured at 37° C., in a 5% CO2 humidified incubator. Cells were activated in the above medium for 1 day prior to infection with lentiviral vectors. In general, primary cells (e.g., T cells) were infected in the morning using spin-infection (1800 rpm for 90 minutes at 37° C. with 300 μl of concentrated virus that had been re-suspended in XVIVO medium in the presence of 8 g/ml of Polybrene® (Sigma, Catalog no. H9268). The media was changed in the evening and the infection was repeated for two more days for a total of 3 infections. After the 3rd infection, the cells were pelleted and resuspended in fresh XVIVO media containing 10 ng/ml CD3 antibody, 10 ng/ml CD28 antibody and 100 IU recombinant human-IL2 and supplemented with respective antibiotics (if indicated) and place in the cell culture flask for selection, unless indicated otherwise. Cells were cultured in the above medium for 10-15 days in case no drug selection was used and for 20-30 days in case drug-selection was used. For infection of JNG and cancer cell lines, approximately 500,000 cells were infected with 2 ml of the un-concentrated viral supernatant in a total volume of 3 ml with Polybrene® (Sigma, Catalog no. H9268). Then next morning, the cells were pelleted and resuspended in the media with respective antibiotics, where appropriate, and place in the cell culture flask for selection.

[0353] Antibodies, peptides and drugs: Digitonin was purchased from Sigma (Cat. no D141) and a stock solution of 100 mg/ml was made in DMSO. A diluted stock of 1 mg/ml was made in PBS. Final concentration of digitonin used for cell lysis was 30 g/ml unless indicated otherwise. Polatuzumab vedotin (Polivy) was from Genentech/Roche.

### FACS Analysis for Detecting Expression of SAR.

[0354] Biotinylated protein L was purchased from GeneScript (Piscataway, NJ), reconstituted in phosphate buffered saline (PBS) at 1 mg/ml and stored at 4° C. Streptavidin-APC (SA1005) was purchased from Thermofisher Scientific.

[0355] FACS was done using FACSVerse analyzer from BD Biosciences.

### Cell Death Assay

[0356] To measure cell death, Matador assay based on ectopic cytosolic expression of Glue, NLuc or thermostable beetle luciferase (LucPPe or Luc146-1H2; SEQ ID NO: 3528)) was utilized as described in PCT/US2017/052344 “A Non-Radioactive Cytotoxicity Assay”.

### Assay to Detect the Expression of Antigens on Target Cells and to Determine the Antigen Binding Activity of Various of Antigen Binding Moieties Used in the Construction of the SARs.

[0357] The expression of antigens on target cells was determined by bioinformatics in combination with immunostaining with antibodies or a highly sensitive antigen detection assay (Malibu Glo assays) as described in PCT/US2017/025602 and incorporated herein in its entirety by reference. This assay involves the fusion of a GLuc or NLuc reporter fragment to the antigen binding domain of an antibody, a scFv, a vHH or any other antigen binding fragment or any receptor and ligand. The fusion construct also carried several epitope tags for detection using flow cytometry. This assay was also used to detect the presence of tags on the TAG-Cells expressing the different TAG-polypeptides, including TAG-SAR constructs.

ELISA to Identify the Sequence Recognized by Polatuzumab, huMA79b, and 2F2.

[0358] A large panel of tagged fusion constructs were generated in which different tags recognized by Polatuzumab vedotin (SHARP-tags or Pola tags) (e.g., SEQ ID NO: 1-11) were fused in frame between an scFv domain (e.g., hu-mROO5-1) and a 4×FLAG-×2STREP-8×His cassette. Examples of such constructs are provided in Table 5 (SEQ ID NO (DNA): 5075-5457 and SEQ ID NO (PRT): 2625-3007). Expression constructs for different antibodies were also constructed. SHARP-tags (or Pola tag) supernatants and antibody supernatants were generated by transfecting 293FT cells with the SHARP-tags/antibody constructs. Forty-eight hours post-transfection supernatants were collected, filtered and stored at −20° C. for storage. The day before ELISA, SHARP-tags (PolSHARP-tag) containing supernatants were diluted 1:1 in carbonate bicarbonate buffer pH 9.6 to coat a 384-well clear microplate (Cat No. 464718, Thermofisher) with 50 μL/well of diluted supernatant. The plate was sealed with an adhesive strip and incubated at 4° C. for overnight. Next morning, each well was aspirated and washed with wash buffer (0.05% Tween20 in PBS). The process was repeated 2 times for a total of 3 washes. The plate was blocked by adding 50 μL block buffer (2% BSA in PBS) to each well. The plate was covered and incubated at 37° C. for 1 hour. The aspiration/wash step was repeated, and 50 μL/well of antibody containing supernatants were added in triplicate. The plate was covered and incubated at 37° C. for 1 hour. The aspiration/wash step was repeated followed by addition of 50 L/well anti-human IgG-HRP (Cat No. sc-2453, SCBT) at 1:5000 dilution in reagent diluent (1% BSA in PBS). The plate was covered and incubated at 37° C. for 1 hour. The aspiration/wash step was repeated. TMB (3,3′,5,5′ tetramethyl-benzidine) substrate was prepared by mixing hydrogen peroxide and TMB in 1:1 ratio and added 25 μL to each well. The plate was incubated at room temperature in dark until blue color was developed in the wells followed by addition of 25 μL/well of stop solution (2 N H₂SO₄) to each well. The absorbance was measured at 450 nm using BioTek synergy H4 plate reader. As shown in Table 5, SHARP-tags showed differential binding to supernatants containing huMA79b antibody (SEQ ID NO: 1182 and 1183) and CD79b-2F2-CY antibody (SEQ ID NO: 1189). In general, SHARP-tags (e.g., P8, P9, P11, P13, P14, P16 etc.) showed significantly higher binding with huMA79b antibodies as compared to CD79b-2F2-CY antibody. The sequences RSEDRY (SEQ ID NO: 1) RSEDRYR (SEQ ID NO: 2) were determined to be sufficient for binding by huMA79b antibody (SEQ ID NO: 1182 and 1183) and CD79b-2F2-CY antibody (SEQ ID NO: 1189). We also generated mutations of SHARP-tags (e.g., RSEDRYR, ARSEDRYR, ARSEDRYRNPK) and tested several point mutants for binding with huMA79b (SEQ ID NO: 1182 and 1183) and CD79b-2F2-CY (SEQ ID NO: 1189) antibodies. The following mutants based on SEQ ID NO: 1 or 2 were recognized by huMA79b and/or (SEQ ID NO: 1182 and 1183) and CD79b-2F2-CY (SEQ ID NO: 1189) in ELISA: R1E, R1S, R1N, R1D, R1F, R1H, S2T, S2A, S2L, S2V, S2M, S2F, S2G, S2H, S2I, D4S, D4N, D4G, D4A, D4T, D4K, D4L, D4W, D4R, D4V, D4Y, R5H, R5P, R5L, R5T, R5C, Y6M, Y6F, Y6H, Y6D, Y6A, Y6G, Y6I, and Y6V. In addition, mutants in which R (Arg) at position 7 of SEQ ID NO: 2 is mutated to a number of different amino acids (e.g., K, E, D, G, H, L, M, Q, V, W, S, F, I, Y, P, N, T or A) were recognized by huMA79b and CD79b-2F2-CY antibodies. Therefore, R (Arg) at position 7 can be mutated to any amino acid or any naturally occurring amino acid to be recognized by huMA79b and CD79b-2F2-CY antibodies or their variants. The following mutants based on SEQ ID NO: 1 or 2 were recognized by huMA79b antibody (SEQ ID NO: 1182 and 1183) or its variants: R1E, R1H, S2T, S2A, D4S, D4N, D4G, D4A, D4T, D4K, D4L, R5H and Y6M. In addition, mutants in which R (Arg) at position 7 in case of SEQ ID NO: 2 is mutated to several different amino acids (e.g., K, E, D, G, H, L, M, Q, V, W, S, F, I, Y, P, N, T or A) were recognized by huMA79b antibody and its variants. The following mutants based on SEQ ID NO: 1 or 2 were recognized by 2F2 antibody (SEQ ID NO: 1189) or its variants: R1E, R1S, R1N, R1D, R1F, R1H, S2T, S2A, S2L, S2M, S2F, S2G, S2H, S2V, S2I, D4G, D4A, D4W, D4R, D4V, R5H, R5P, R5L, R5T, R5C, Y6M, Y6F, Y6H, Y6D, Y6A, Y6G, Y6I, and Y6V. In addition, mutants in which R (Arg) at position 7 in case of SEQ ID NO: 2 is mutated to several different amino acids (e.g., K, E, D, G, H, L, M, Q, V, W, S, F, I, Y, P, N, T or A) were recognized by 2F2. The single point mutants of R7K, R7S, R7F, R7Y, R7A, R7I, R7P, R7N, and R5H showed nearly equivalent binding to huMA79b and CD79b-2F2-CY antibodies, but mutants D4S, D4N, D4G, D4K, D4T, D4Q, D4A showed higher binding affinity with huMA79b antibodies. In contrast, mutants Y6D, Y6A, Y6G, Y6F, Y6H, D4W, D4Y, S2A, S2F, S3H, S3I, S3G, S3L, S3M, S3T, R1S, R1H, R1D, R1S, R5P, R5L, R5T, R5C showed higher binding affinity with CD79b-2F2-CY antibody.

[0359] The above experiment further demonstrated the ability of huMA79b antibody (SEQ ID NO (PRT): 1182 and 1183 and SEQ ID NO (DNA): 3632-3633) and CD79b-2F2-CY antibody (SEQ ID NO (PRT): 1189 and SEQ ID NO (DNA): 3639) to recognize the SHARP-tags (or SHARP-tags). A number of variants of huMA79b and CD79b-2F2-CY antibody are generated and are represented by SEQ ID NO:1184 and SEQ ID NO: 1185-1188, respectfully. Additional variants of will be generated by replacing the variable regions (vL and vH) of huMA79b antibody with vL fragments represented by SEQ ID NO: 774-782, 790, 792-794, 808-818, 2173-2178 and the complementary vH fragment represented by SEQ ID NO:899-907, 915, 917-919, 937-941, 2179-2182 or variants of the forgoing sequences comprising up to 10 amino acid substitutions in the framework region. Similarly, additional variants of 2F2 will be generated by replacing the variable regions (vL and vH) of 2F2 antibody with vL fragments represented by SEQ ID NO: 783-789 and 791 and the complementary vH fragment represented by SEQ ID NO: 908-914 and 916 or variants of the forgoing sequences comprising up to 10 amino acid substitutions in the framework region. These antibody variants will be tested in the ELISA and found to bind to the recombinant polypeptides comprising SHARP-tags (e.g., SEQ ID NO: 1-10). Finally, ELISA was repeated using the Antibody (SN8) (Cat No. sc-18902, Santa Cruz). 384 well plates were coated overnight with the SN8 antibody at working concentration 5 μg/mL in carbonate bicarbonate buffer pH 9.6. Plates were washed, blocked with blocking buffer and after washes, 50 μl of supernatants containing the recombinant polypeptides (e.g., SEQ ID NO (PRT): 2643, 2663 and 2664) comprising the different SHARP-tags were added. After washes, the bound recombinant polypeptides were detected by the addition of Mouse anti DDDDK-Tag mAb (Cat No. AE024, ABclonal Technology). The absorbance (OD 450 nm) value for control supernatant was 0.084, while it increased to 0.330, 0.441 and 0.134 for supernatants comprising SHARP-tag comprising polypeptides with SEQ ID NO (PRT): 2643, 2663 and 2664, respectively, demonstrating specific binding.

### ELISA

[0360] Peptides (e.g., P8, P9, P10, P11) were synthesized by GenScript. Peptides were diluted to the working concentration 2 μg/mL in sodium carbonate buffer pH 9.6. A 384-well white plate (Cat No. 460372; Thermofisher) was coated at 4° C. overnight with 50 μL/well of diluted antigen. Plates were washed, blocked and then 50 μl of control medium or supernatant containing Malibu-Glo reagent (110323-BBeT2) was added. After washes, 50 μL of 1:400 CTZ in PBS was added and luminescence was read for 10 sec. Results showed increase in light production in peptide-coated wells in which supernatant containing the Malibu-Glo reagent was added as compared to control wells with the P11 peptide showing the highest nearly a 30-fold increase.

[0361] The peptides (e.g., P8, P9, P10, P11 etc.) were coated as above and ELISA was done using huMA79b (SEQ ID NO: 1182) and 2F2 (SEQ ID NO: 1189) antibody supernatants. The OD values using huMA79b (SEQ ID NO: 1182) were 0.103 for control peptide (SEQ ID NO: 1209) and increased to 0.125, 0.892, 0.271, 2.851, and 3.116 for peptides with SEQ ID NO; 47, 48, 49, 5, 11, respectively. The OD values using 2F2 (SEQ ID NO: 1189) antibody were 0.069 for buffer alone, 0.074 for control peptide and 0.074, 0.094, 0.132, 0.108 and 1.865 for peptides with SEQ ID NO: 47, 48, 49, 5, 11, respectively. These results confirm that isolated SHARP-tags can be recognized by SABRs.

### Induction of NFAT Promoter Driven GFP Expression.

[0362] A number of different single chain and multi chain SAR constructs with different structure (e.g., 2^{nd} generation CAR, double chain SIR, one and half chain SIR, zSIR, Ab-TCR, z16SAR, MC-SIR, MC-zSIR, MC-z16SAR etc.) targeting different antigens were constructed. While some constructs targeted a single antigen, others targeted more than one antigen or two different epitopes of a single antigen.

[0363] The different SARs were stably expressed in Jurkat NFAT-GFP cells by lentiviral mediated gene transfer, followed by selection with puromycin or blasticidin. No drug selection was used in case the construct lacked an antibiotic resistance gene. The Jurkat-NFAT-GFP cells are engineered in such a way that the IL-2 promoter, which carries NFAT binding sites, is cloned upstream of the GFP gene. These cells have been used to study signaling via TCR and CAR. The SAR-expressing Jurkat-NFAT-GFP are cocultured for 4-24 hours with the target antigen-expressing cell line (described above) and their ability to bind to the target antigen is assayed by measuring induction of GFP expression using Flow Cytometry. Cellular supernatant is collected and assayed for the induction of cytokines (e.g., IL2). The Jurkat-NFAT-GFP (parental) cells were used as control.

[0364] The results with different SARs are summarized in the summary Table 6. A SAR is considered positive in the assay in case the SAR expressing Jurkat-NFAT-GFP cells show greater % GFP positive cells when cultured with the target cell line as compared to parental Jurkat-NFAT-GFP cells. The signs +/−, +, 2+ etc. after the name of the cell lines indicate the relative degree of positivity on the Jurkat-NFAT-GFP assay as measured by the % GFP positive cells after culture of the SAR expressing Jurkat-NFAT-GFP cells with that cell line above the % GFP cells observed in parental Jurkat NFAT-GFP cells serving as controls. In general, the number +/−, +, 2+, 3+, 4+, 5+ refer to approximately 5%, 10%, 20%, 30%, 40% and 50% GFP positive cells. It is to be noted that the drug resistance gene (e.g., PAC) in the SAR constructs is optional and in vivo studies were conducted with SAR constructs lacking the PAC gene.

[0365] The results show that several single chain and double chain TAG-SAR constructs show strong positivity in the JNG-NFAT assay. These constructs vary in the composition of the SHARP-tags or the tag cassettes (e.g., P11, P13, P14, P16 etc.), the location of the tag cassette, the copies of tag cassettes, the antigen binding domains, and the signaling chains. For example, the construct with SEQ ID NO: 4754 and 4794 are single chain second-generation CARs targeting CD19 that contain a Pola-11 (P11) tag (SEQ ID NO: 674) inserted in the linker between the vL and vH fragments derived from hu-mROO5-1 antibody. The JNG cells expressing these constructs showed NFAT driven GFP on culture with RAJI and JEKO cells. The construct with SEQ ID NO: 4757 is a double chain SIR targeting CD19 that comprises a Pola-14 (P14) tag (SEQ ID NO: 53) inserted downstream of the signal peptide comprising the second polypeptide chain. The constructs with SEQ ID NO: 4758 and 4761 are also double chain SIR targeting CD19 that comprise a tag (Pola-11) inserted downstream of the signal peptide comprising the second polypeptide chain. The JNG cells expressing these constructs showed strong NFAT driven GFP on culture with RAJI (2-2.5+), JEKO (1-1.5+) and Daudi (2+) cells. The construct with SEQ ID NO: 4762 is a double chain SIR targeting CD19 and BCMA that comprises a tag (Pola-11) inserted downstream of the signal peptide comprising the first polypeptide chain. The JNG cells expressing this construct showed strong NFAT driven GFP on culture with RAJI (2.5+), and JEKO (1+) and Daudi (2+) cells. The constructs with SEQ ID NO: 4765, 4768, 4770 are double chain SIRs targeting CD19 that comprises a tag (Pola-11) inserted between the vL fragment and the TCRβ constant chain of first polypeptide chain. The construct with SEQ ID NO: 4774 is a double chain z16 SAR (CD3z-CD16 SAR) targeting CD19 that comprises a tag (Pola-11) inserted between the vL fragment and the signaling module of the first polypeptide chain. The construct with SEQ ID NO: 4777 is a double chain SAR targeting BCMA that comprises a tag (Pola-11) inserted between the vL fragment and the signaling module of the first polypeptide chain.

[0366] The construct with SEQ ID NO: 4787 is a double chain SAR targeting BCMA that comprises a tag (Pola-11) inserted between the vH fragment and the signaling module of the second polypeptide chain. The construct with SEQ ID NO: 4779 is a double chain SIR targeting CD19 that comprises a tag (Pola-11) inserted between the vH fragment and the TCRα constant chain of second polypeptide chain. The construct with SEQ ID NO: 4787 is a double chain SIR targeting CD19 that comprises a tag (Pola-11) inserted between the vH fragment and the signaling chain of the second polypeptide chain. The construct with SEQ ID NO: 4788 is a double chain SAR targeting CD19 that comprises a tag (Pola-11) inserted between the vH fragment and the CD8 hinge module of the second polypeptide chain. The construct with SEQ ID NO: 4795 is a double chain SIR targeting CD19 that comprises a tag (Pola-11) inserted downstream of the signal peptide comprising the second polypeptide chain. The constructs with SEQ ID NO: 4797-4799 are double chain SAR targeting CD19 that co-express a SHARP-tagged-polypeptide (e.g., CD79b-Iso2, CD79b-FL or CD8SP2-P16QP16-8). The constructs that co-express a SHARP-tagged polypeptide are indicated by C(+) in the Table 6. The construct with SEQ ID NO: 4801 is a double chain SAR targeting BCMA that comprises a tag (Pola-11) inserted between the vL fragment and the signaling module of the first polypeptide chain and a second tag (Pola-11) between the vH fragment and the signaling module of the second polypeptide chain. The construct with SEQ ID NO: 4802 is a double chain SAR targeting CD19 that comprises a tag (Pola-11) inserted between the vL fragment and the TCRβ constant chain of the first polypeptide chain and a second tag (Pola-11) between the vH fragment and the TCRα constant chain of the second polypeptide chain. The construct with SEQ ID NO: 4804 is also double chain SIR targeting CD19 that comprise a tag (P16QP16) comprising two P16 tags (SEQ ID NO: 55) separated by a “Q linker inserted downstream of the signal peptide comprising the second polypeptide chain. The Q linker is recognized by QBEND antibody.

[0367] The constructs with SEQ ID NO: 4807-4812 are hybrid chain SAR targeting CD19 that comprise a tag (Pola-11) inserted downstream of the signal peptide of the second polypeptide chain. The constructs with SEQ ID NO: 4818-4819 are double chain SAR targeting CD19 that comprises a tag (P8 or P9) inserted downstream of the signal peptide of the second polypeptide chain. The constructs with SEQ ID NO: 4832 and 4860 are double chain SIR targeting STEAP2 that comprise a tag (Pola-11) inserted downstream of the signal peptide comprising the second polypeptide chain. The construct with SEQ ID NO: 4838 is a double chain SIR targeting STEAP2 that comprises a tag (Pola-11) inserted downstream of the signal peptide comprising the first polypeptide chain and a second tag (Pola-11) inserted downstream of the signal peptide comprising the second polypeptide chain. The constructs with SEQ ID NO: 4833-4837, 4839 are double chain SAR targeting CLDN18.2 that comprises a tag (Pola-11) inserted downstream of the signal peptide of the second polypeptide chain. The construct with SEQ ID NO: 4840 is a double chain SAR targeting CLDN6 that comprises a tag (Pola-11) inserted downstream of the signal peptide of the second polypeptide chain. The construct with SEQ ID NO: 4859 is a double chain SAR targeting CD19 that comprises a tag (Pola-14) inserted between the vL fragment and the TCRβ constant chain of the first polypeptide chain and a second tag (Pola-11) between the vH fragment and the TCRα constant chain of the second polypeptide chain. The construct with SEQ ID NO: 4871 is a double chain SAR targeting CLDN6 that comprises a tag (Pola-11) inserted downstream of the signal peptide of the first polypeptide chain. The construct with SEQ ID NO: 4872 is a double chain SAR targeting CLDN18.2 that comprises a tag (Pola-11) inserted downstream of the signal peptide of the first polypeptide chain. The construct with SEQ ID NO: 4873 is a double chain SAR targeting CLDN18.2 that comprises a tag (Pola-14) inserted downstream of the signal peptide of the second polypeptide chain. The construct with SEQ ID NO: 4875 is a double chain SAR targeting PSMA that comprises a tag (Pola-11) inserted downstream of the signal peptide of the first polypeptide chain. The construct with SEQ ID NO: 4876 is a double chain SIR targeting CD19 and BCMA that comprises a tag (CYD11) represented by SEQ ID NO: 689 inserted downstream of the signal-peptide comprising the first polypeptide chain. The constructs with SEQ ID NO: 4892-94 are double chain SIR targeting STEAP2, CLDN18.2 and MSLN respectively that comprises a tag (Pola-11) inserted downstream of the signal peptide comprising the first polypeptide chain and a second tag (Pola-11) inserted upstream of the TCRα constant chain of the second polypeptide chain.

[0368] The constructs with SEQ ID NO: 4901-4907, 4967-8 are single or double chain SARs targeting different antigens that co-express a SHARP-tagged polypeptide (e.g., SEQ ID NO: 685, 658, and 657). The constructs with SEQ ID NO: 4912, 4925, 4929-31, 4933, 4935, 4937, 4938, 4939, 4980, 4981 are single or double chain SARs targeting different antigens that co-express a SHARP-tagged-polypeptide comprising a multipurpose switch (e.g., SEQ ID NO: 666, 682-684). The constructs with SEQ ID NO: 4793-96, 5005 are also double chain SIR targeting CD19 or CD19/BCMA that comprise a tag (SEQ ID NO: 2, 47) inserted downstream of the signal peptide comprising the first or the second polypeptide chain. The construct with SEQ ID NO: 5006 is a double chain zSIR targeting PSMA that comprises a tag (Pola-11) inserted downstream of the signal peptide of the second polypeptide chain. The constructs with SEQ ID NO: 5007-8 are double chain SIR targeting PSMA that comprises a tag (SEQ ID NO: 50 and 2) inserted downstream of the signal peptide of the first polypeptide chain. Several additional SAR constructs with a variety of SHARP-tags (e.g., SEQ ID NO: 1-11) and their variants are expressed in JNG cells and shown to be functional. Their expression is detected by flow cytometry using staining with the appropriate antibodies (e.g., SN8, 2F2, huMa79b).

[0369] Similarly, JNG cells will be transduced with SAR constructs comprising a variety of SHARP-tags. These SAR constructs are represented by SEQ ID NO: 7708-8703. The expression of the SAR is confirmed by staining with Protein L, using the Topanga Assay and or using the appropriate SABR (e.g., SN8, 2F2, huMA79b or H2Mab-250). The functional activity of the SAR is confirmed by JNG assay after overnight co-culture with target cell lines (e.g., RAJI and LNCaP). These results will demonstrate that the presence of SHARP-tags (e.g., SEQ ID NO: 1-123, 150-167, 251-440, 550-579, 631-650, 651-654, 656, 674-676, 686, 689, and 692-720) do not interfere with the expression and/or activity of the fusion proteins that incorporate them (e.g., SAR).

[0370] Taken collectively the above results with a wide range of unispecific, bispecific and multispecific TAG-SAR comprising single chain, double chain and hybrid signaling chains of different compositions and comprising a large number of antigen binding domains (e.g., vL, vH, vHH etc.) targeting a variety of antigens (e.g., CD19, BCMA, PSMA, STEAP2, CLDN6, CLDN18.2, Her2, MSLN etc.) demonstrate that tags can be inserted at a variety of locations (e.g., in the linker between vL and vH or vH and vL domains, upstream of transmembrane domain of a single chain SAR, between the hinge and scFv domain of a single chain SAR, at the N-terminus or near N-terminus of antigen binding domains of single or double chain SAR, between the linker between an AABD and a vL/vH fragment, downstream of vL/vH fragment etc.) without interference with the expression and activity of the SAR construct. The results further demonstrate that more than one tag can be inserted in a SAR construct. The results further demonstrate that the two or more tags can be identical or non-identical in composition.

[0371] In addition to TAG-SAR, the JNG assay was also used to test several non-tagged single chain (e.g., CAR), double chain (e.g., SIR), hybrid chain (e.g., HC-SIR) and multi-chain (e.g., MC-SAR) constructs targeting antigens such as CD79b, CLDN6, CLDN18.2, PSMA, PSCA, BCMA, CD19, GPC3 etc. The results with these constructs are summarized in Table 6.

[0372] Table 6 also shows results with several unispecific and bispecific multi-chain SAR constructs (e.g., SEQ ID NO: 8740-8803, 8931-8977) on different designs (e.g., MC-SAR, MC-zSAR, and MC-16SAR). Examples of multichain SAR constructs targeting CD79b are SEQ ID NO: 8931-8933 and 8951-8959. Examples of multichain SAR constructs targeting CD19, CD20 or CD22 are SEQ ID NO: 8788, 8778, 8752 and 8785). Examples of bispecific multichain SAR constructs are SEQ ID NO:8741, 8744, 8745, 8750, 8751, 8753-8755, 8757-8759 and 8761-8784. Examples of multichain SAR with a CD3z signaling chain (MC-zSAR) are SEQ ID NO: 8802-8803. Examples of multichain SAR with a CD16 signaling chains (MC-16SAR) are SEQ ID NO:8970-8971.

[0373] The JNG cells expressing the different TAG-SAR constructs are next stained with the appropriate antibodies (e.g., SN8, 2F2, huMa79b, 10D10 etc.) and/or Malibu Glo reagents directed against the tag and the presence of the TAG-SAR is detected using Flow cytometry and/or luminometer. In parallel the JNG cells are stained with Protein L. It is determined that staining with anti-tag antibodies and/or Malibu Glo reagents result in detection of the TAG-SAR with greater sensitivity and specificity as compared to staining with Protein L.

### Detection of TAG-SAR Constructs Using Malibu-Glo Reagents

[0374] To detect the expression of TAG-SAR constructs, an Nluc fusion protein (Malibu Glo reagent) was used that comprises an scFv targeting human CD79b fused in frame to NLuc (NanoLuc) via a Gly-Ser linker. The fusion protein also carries a 4×FLAG-×2STREP-8×His cassette at its C-terminus for detection by flow cytometry. The fusion protein construct is represented by SEQ ID NO (PRT): 1199 and SEQ ID NO (DNA): 3649. The assay was performed essentially as described previously (see PCT/US2017/025602). Using this assay, JNG cells expressing the SAR construct with SEQ ID NO: 4754 showed a 386-fold increase in luciferase activity over the control JNG cells. This SAR construct comprises a SHARP-tag (P11; SEQ ID NO:674) in the linker between the vL and vH fragment. Essentially similar results were obtained with JNG cells expressing a variety of SAR constructs of different structure and comprising different SHARP-tags of different lengths and composition (e.g., SEQ ID NO:1-12), including variants. For example, JNG cells expressing SAR constructs containing tags with SEQ ID NOs: 160, 167, and 168 exhibited a 47.5-fold, 85.6-fold, and 83.4-fold increase in luciferase activity, respectively, compared to control JNG cells. Malibu-Glo reagent also successfully detected the presence of TAG-SAR on primary T cells (FIG. 1.) These results demonstrate that the tag present in these TAG-SAR constructs can be detected by the Malibu-Glo reagent comprising the CD79b targeted-scFv as the antigen binding domain. Essentially similar results are obtained when the CD79b-targeted scFv in the Malibu-Glo reagent is replaced by a different CD79b-targeted scFv. This Malibu-Glo reagent is represented by SEQ ID NO (PRT): 1198 and SEQ ID NO (DNA): 3648. Finally, as the Malibu-Glo reagents also comprise the FLAG, Strep-tag and Poly-His tags, the expression of TAR-SAR in JNG cells was also detected by primary labeling with the Malibu-Glo reagents followed by secondary labelling with FITC-conjugated FLAG or Strep-tag antibodies and analysis by flow cytometry (see FIG. 2).

Detection of TAG-SAR Constructs Using SN8 Antibody JNG cells expressing the SHARP-tagged SAR construct with SEQ ID NO:4832 and 4852 were stained with FITC-conjugated antibody targeting CD79b (SN8 clone) on ice for 1 hour in dark. Post-incubation, Cells were washed with 1 mL of ice-cold wash buffer (1% FBS in PBS). After 2 washes, cells were re-suspended in 300 μL of buffer and analyzed by Flow Cytometry. Approximately 83% and 69% of JNG cells expressing the SAR construct with SEQ ID NO:4832 and 4852 showed positive staining as compared to the parental JNG cells or those expressing a control SAR lacking the SHARP-tag. The mean log fluorescence value increased from 191 in control JNG cells to 564 and 370 in JNG cells expressing SHARP-tagged SAR construct with SEQ ID NO:4832 and 4852. Essentially similar results were obtained when the experiment is repeated with JNG and T cells expressing different SAR constructs on a variety of backbones (e.g., CAR, SIR, Ab-TCR, zSIR, z16SAR, CD16-SAR, TFP, TCR etc.) and comprising SHARP-tags of different lengths and compositions (e.g., SEQ ID NO: 1-92). A representative example is provided in FIG. 3. The staining with SN8 antibody and/or SN8 coated beads are also used to isolate SHARP-tagged SAR expressing cells using a variety of techniques, FACS (fluorescence assisted cell sorting), MACS (Magnet assisted cell sorting), immune-affinity separation etc. Similarly, huMA79b and 2F2 antibodies and antibody-coated beads are used to detect, enrich, isolate and separate SHARP-tagged SAR expressing cells using techniques such as FACS, MACS and affinity purifications. Examples are provided in FIG. 4.
Detection of TAG-SAR Constructs Using huMA79b and 2F2 Antibodies

[0375] JNG cells transduced with lentiviral vectors encoding a variety of TAG-SAR constructs of different structure and comprising SHARP-tags of different lengths and composition (e.g., SEQ ID NO:150-168) were stained with supernatant containing the huMA79b antibody (Clone Code: 041924-BBhJ2)(SEQ ID NO: 1182) followed by Goat-anti-Human-PE secondary antibody. Representative TAG-SAR constructs are represented by SEQ ID NO: 4819-4820, 4824-4827. The cells were analyzed by flow cytometry. JNG cells expressing the TAG-SAR constructs stained positive with the huMA79b antibody (SEQ ID NO: 1182). For example, 97.6%, 98.9%, 99.5% and 98.5% of JNG cells expressing the TAG-SAR constructs with SEQ ID NO: 4819, 4820, 4824 and 4825, respectively, showed positive staining with the huMA79b antibody (FIG. 4). These results compare favorably with the staining observed with Protein-L and demonstrate that cells expressing the recombinant proteins (e.g., SIR, Ab-TCR, zSIR, HC-SIR etc.) comprising the SHARP-tags can be detected with very high sensitivity and specificity using the SABR (e.g., huMA79b antibody or its variants). Essentially similar results are obtained when the cells are stained with the 2F2 antibody (clone 041924-BBhO1; SEQ ID NO:1189) and its variants (FIG. 4). For example, JNG cells transduced with lentiviral vectors comprising the TAG-SAR constructs with SEQ ID NO (DNA): 4993, 4994 and 4995 showed 27.89%, 2.61% and 39.27% of cells, respectively, showing positive staining with the 2F2 antibody represented by SEQ ID NO:1189. The corresponding staining with the huMA79b antibody (SEQ ID NO: 1182) was seen in 38.48%, 51.90% and 58.28% of cells, respectively. JNG, T and NK cells transduced with a large panel of additional TAG-SAR constructs of different structure (e.g., 2^{nd} generation CAR, SIR, Ab-TCR, zSIR, z16-SAR, CD16-SAR, TFP etc.) and comprising SHARP-tags of different lengths and composition are tested and will show positive staining with huMA79b and 2F2 antibodies and their variants. Finally, JNG cells expressing other recombinant fusion proteins (e.g., membrane bound cytokines, multi-purpose switches etc.) comprising SHARP-tags show positive staining with SABR, including huMA79b, 2F2, SN8 and 10D10 and their variants. The staining with these antibodies and antibody coated beads will be also used to isolate SHARP-tagged proteins-expressing cells using a variety of techniques, FACS (fluorescence assisted cell sorting), MACS (Magnet assisted cell sorting), immune-affinity separation etc. A large number of TAG-SAR constructs with wild-type and mutant SHARP-tags were generated and were recognized by huMA79b and 2F2 antibodies by flow cytometry.

[0376] In summary, despite variability in TAG-SAR surface expression resulting from differences in transduction efficiency, viral titer, or cell type, SHARP-tag expression is consistently detected across a broad spectrum of experimental conditions and SAR formats. Specifically, more than 100 SHARP-tagged SAR constructs incorporating diverse structural configurations-including single-chain, dual-chain, and hybrid receptor formats—and differing tag insertion sites (e.g., N-terminal, juxta membrane, or extracellular linker regions)—are robustly and reproducibly detected in both transformed cell lines (e.g., JNG cells) and primary human T cells.

[0377] Detection of the SHARP-tag is achieved using multiple orthogonal methods, including flow cytometry, Malibu-Glo assay and enzyme-linked immunosorbent assay (ELISA), demonstrating high sensitivity, specificity, and reproducibility across assay platforms. These findings are particularly notable given the inventor's prior testing of alternative hypoimmunogenic tags based on FDA-approved antibodies—such as rituximab, Obinutuzumab, brentuximab vedotin, and belantamab mafodotin-blmf—which yielded poor detection sensitivity and significant variability in performance, especially in primary cells or low-expression settings.

[0378] The ability to detect SHARP-tagged SAR constructs reliably and with high fidelity across a range of formats and conditions provides a substantial advantage for clinical translation. Specifically, the SHARP-tag facilitates critical release testing, lot-to-lot consistency assessments, and in-process monitoring of gene-modified cell products-key parameters required by regulatory authorities such as the FDA and EMA for Good Manufacturing Practice (GMP) compliance. Moreover, the tag's robust detectability supports in vivo tracking and pharmacokinetic analysis of therapeutic cells, which are essential components of clinical development, product characterization, and regulatory approval of cellular immunotherapies.

[0379] SHARP-tagged proteins with protein degradation motifs: A panel of SHARP-tagged constructs (SEQ ID NO: 4997-5003) encoding fusion proteins comprising IKZF degradation motifs (SEQ ID NO: 2547-2553) are constructed and expressed in JNG cells. Treatment with IMiDs (e.g., Lenalidomide, Pomalidomide, Mezigdomide CC-92480 100 nM, Eragidomide CC-90009, 100 nM, Avadomide CC-122, 100 nM etc.) is shown to lead to rapid downregulation of expression of the SAR-TAG constructs as measured by Malibu-Glo assay and staining with antibodies (e.g., huMA79b, 2F2 and SN8). These results demonstrate that expression of SHARP-tagged fusion proteins can be controlled, and they can be expressed in an inducible manner. In alternate embodiment, expression of SHARP-tagged fusion proteins (e.g., TAG-SAR) is controlled by administration of doxycycline when they are expressed from a tetracycline-inducible promoter.

Treatment with Polatuzumab Vedotin (Pola) Results in Selective Depletion of TAG-SAR Expressing Jurkat (JNG) Cells.

[0380] JNG-P and JNG-4667 and JNG-4668 which express SHARP-tagged SAR constructs with SEQ ID NO:4838 and 4839) were plated at 0.5 million cells/well/ml in a 24-well plate. The cells were either left untreated or treated with Rituximab (10 g/ml) or Polatuzumab vedotin (10 g/ml) for 72 h. An aliquot of Cells was stained with the Malibu-Glo reagent (SEQ ID NO (PRT):1199) as described above. Treatment with Polatuzumab vedotin was shown to result in significant reduction in luciferase activity in JNG-4667 and JNG-4668 cells as compared to the control JNG-P cells. Treatment with Rituximab was used as a control and had no significant effect. These results demonstrate that treatment with Polatuzumab vedotin can be used to selectively deplete TAG-cells, i.e., cells that express a SHARP-tag described herein.

[0381] The depletion of TAG-SAR cells following treatment with Polatuzumab vedotin was confirmed using staining with the Malibu-Glo reagent followed by staining with a FITC-conjugated antibody against the Strep-tag present in the Malibu-Glo reagent. Post-treatment, the cells were centrifuged and resuspended in fresh RPMI 10% FBS medium to stop antibody treatment. The cells were cultured in 24-well suspension plates and later in 6-well plates without any drug treatment to expand these cells to see if TAG-SAR expression gets lost in Polatuzumab vedotin-treated cells. Approximately 2 weeks after Polatuzumab vedotin treatment, 1 ml of cells from each well were collected and stained with trypan blue and live cells were counted using hemocytometer. The results showed significant death of JNG-4667 and JNG-4668 cells expressing the TAG-SAR following treatment with Polatuzumab vedotin.

Treatment with Polatuzumab Vedotin (Pola) Results in Selective Depletion of TAG-SAR Expressing T Cells.

[0382] Human peripheral blood T cells isolated using CD3 magnetic beads are infected with lentiviruses expressing the SAR constructs 032223-VVB (SEQ ID NO: 5044), 022124-BBdC1 (SEQ ID NO: 5045) and 022824-EZyO1 (SEQ ID NO:5046) targeting STEAP2. The constructs with SEQ ID NO: 5045 and 5046 are TAG-SAR that comprise the Pola-11 tag inserted downstream of signal peptides of the second or the first polypeptide chains. Staining with Protein-L showed expression of SAR on 36%, 38% and 41% of T cells. A Malibu Glo assay with 110323-BBeT2 supernatant showed significant increase in luciferase activity (RLU) in the T cells expressing the two TAG-SAR constructs (SEQ ID NO: 5045 and 5046) as compared to the control T cells or those expressing the untagged SAR construct (SEQ ID NO: 5044) (FIG. 1).

[0383] The expression of the TAG-SAR is confirmed by flow-cytometry based Malibu-Glo assay. FIG. 2 shows binding of the Malibu-Glo reagent to 42% and 50% of T cells expressing the TAG-SAR constructs with SEQ ID NO: 5045 and SEQ ID NO:5046), respectively. Staining with the SN8 antibody detected expression of the TAG-SAR constructs with SEQ ID NO: 5045 and SEQ ID NO:5046 on 83% and 68% of T cells, respectively (FIG. 3). No significant staining was observed in control T cells or those expressing the untagged SAR construct (FIG. 3).

Treatment with Polatuzumab Vedotin Results in Killing of TAG-SAR Cells.

[0384] Control T cells and TAG-SAR-expressing T cells were seeded at a density of 0.5 million cells per well per mL in 24-well plates. Cells were either left untreated or treated with Rituximab (RTX) (10 μg/mL) or Polatuzumab (10 μg/mL) for 72 hours. Following treatment, 100 μL of cells were collected from each well and stained using the BD Pharmingen™ FITC Annexin V Apoptosis Detection Kit I (Cat. No. 556547) to assess cell death. T cells expressing TAG-SAR constructs corresponding to SEQ ID NOs: 5045 and 5046 showed an increase in cell death from 26.4% and 25.9% (untreated controls) to 90.42% and 81.3%, respectively, following Polatuzumab exposure. Polatuzumab had no significant effect on induction of cell death among the T cells expressing the untagged SAR (SEQ ID NO: 5044). Rituximab failed to induce cell death in any cell. Staining with Trypan blue showed a decrease in live-cell count of T cells expressing the TAG-SARs from 1.5 million cells/ml in untreated cells to approximately 0.25 million cells/ml following treatment with Polatuzumab, reflecting a more than 80% induction of cell killing.

Matador Assay Confirms Depletion of TAG-SAR Cells Following Treatment with Polatuzumab Vedotin.

[0385] LNCaP cells expressing Luc-PPE were plated at 100,000/well/400 mL in a 24-well plate in XVIVO medium. The LNCaP cells were co-cultured with T cells (T-control or T-STEAP2 TAG-SAR) that had been either left untreated or treated with Rituximab 10 μg/ml or Polatuzumab vedotin 10 μg/ml for 72 hours. LNCaP and T cells were co-cultured in 24-well plate and incubated at 37° C. for 24 hours. Post-incubation, cells were collected, centrifuged at 1500 rpm for 5 min at 4° C. Luciferase activity was measured in the supernatant by adding 15 μL of D-Luciferin, DTT and ATP. FIG. 5 demonstrates a significant reduction in the killing of LNCaP cells by T cells expressing the TAG-SAR constructs with SEQ ID NO: 5045 and 5046 following treatment with Polatuzumab vedotin, indicating depletion of TAG-SAR expressing T cells. Treatment with Rituximab had no effect.

[0386] The in vivo activity of the SHARP-tagged SARs was tested using a LNCaP xenograft model in NSG mice. Mice (n=5) were injected subcutaneously with 1 million Luc-PPE-expressing LNCaP cells in Matrigel. Five days later, each animal was injected with 10 million control T cells or SAR-T cells. Animals were followed using bioluminescence imaging. Mice administered T cells expressing the untagged SAR and SHARP-tagged-SAR constructs with SEQ ID NO: 5044, 5045 and 5046 showed effective and near complete tumor control as compared to mice given control T cells. Thus, SHARP-tag does not interfere with the in vivo activity of TAG-SAR-T cells.

In Vivo Treatment with Polatuzumab Vedotin Protects Mice Against STEAP2 Directed SHARP-Tagged CAR-T-Induced Toxicity.

[0387] To demonstrate the in vivo efficacy of Polatuzumab vedotin in protecting against CAR-T-induced toxicity, we took advantage of the observation that T cells expressing a STEAP2 directed second generation CAR induce early lethality in mice. This is not seen with T cells expressing a STEAP2-SIR. T cells were transduced with lentiviral constructs comprising SHARP-tagged SAR constructs with SEQ ID NO: 5057 and 5046, respectively. The construct with SEQ ID NO: 5057 has the design of a second-generation CAR that comprise a P11 SHARP-tag (SEQ ID NO: 674) in the linker between the vL and vH fragments of a scFv targeting STEAP2. In contrast, the SAR construct with SEQ ID NO:5046 has the design of a SIR that comprises a P11 tag (SEQ ID NO: 674) inserted at the N-terminus of the vH fragment. The expression of the two SAR constructs was confirmed by staining with huMA79b antibody (SEQ ID NO: 1182) and flow cytometry, which showed the expression of SAR on approximately 77% and 24% of T cells transduced with constructs with SEQ ID NO: 5057 and 5046 respectively. Staining with 2F2 antibody (SEQ ID NO: 1189) confirmed the expression of the SAR with SEQ ID NO: 5057 on approximately 80% of T cells. Matador cytotoxicity assay on LNCaP-LucPPe cells confirmed significant cytotoxicity induction by T cells transduced with both SAR constructs. For in vivo studies, 10⁶ LNCaP-LucPPE cells were injected subcutaneously in NSG mice in Matrigel (50:50). One week later, 5×10⁶ SAR-T cells were given per mouse through tail vein injection. Next day, mice were administered control IgG1 or Polatuzumab vedotin at a dose of 1 mg/kg by tail vein injection. Animals were followed by bioluminescence imaging. All mice given T cells expressing the SAR with SEQ ID NO: 5057 followed by control IgG1 died on day 26, indicating toxicity of the STEAP2 CAR-T in mice (FIG. 6). In contrast, all mice given T cells expressing the SAR with SEQ ID NO: 5046 followed by Polatuzumab vedotin survived until day 41, although with progressive tumor (FIG. 6). These results demonstrate that in vivo treatment with Polatuzumab vedotin can deplete SHARP-tagged STEAP2-directed CAR-T cells and protect against their toxicity.

### Use of SHARP-Tags to Prevent GVHD.

[0388] Donor T cells engineered with SHARP-tagged SARs or membrane proteins (e.g., SEQ ID NO: 662 are infused into recipient mice following irradiation. At signs of GvHD, mice are treated with an Polatuzumab. SHARP-tagged T cells are selectively eliminated, reducing GvHD severity without affecting host hematopoiesis. In a similar experiment, donor T cells are transduced with a vector comprising a SHARP-tagged construct (e.g., SEQ ID NO: 8350-51) and T cells are selectively eliminated by treatment with H2Mab-250.

### Use of SHARP-Tag for Selective Depletion of Recombinant Cells.

[0389] SHARP-tagged CAR-T cells are incubated with appropriate SABR fused to or comprising a human IgG Fc domain. Peripheral blood mononuclear cells (PBMCs) are added to the cultures to mediate ADCC. Depletion is assessed by flow cytometry. SHARP-tagged CAR-T cells are selectively depleted in the presence of the SABR-Fc fusion and PBMCs, demonstrating that the tag can be used as a safety switch. In some experiments, the SHARP-tag comprises the sequence represented by SEQ ID NO: 1-123, 674-676, and the SABR is 2F2, SN8 or huMA79b (SEQ ID NO: 1182) antibodies. In other experiments, SHARP-tag comprises the sequence represented by SEQ ID NO: 557-559 and the SABR is H2Mab-250 or an antibody comprising the vL and vH fragments comprising the SEQ ID NO: 846 and 966, respectively.

Expression of TAG Constructs in Cells Other than T Cells.

[0390] 293FT cells were transfected with lentiviral vectors comprising the SAR which comprise SHARP-tags P11 (SEQ ID NO: 674) or P14 (SEQ ID NO: 53) in the linker regions between the vL and vH fragments. SAR constructs BBaE1 and BBaG1 lack the epitope tags and served as negative controls. 48 h post-transfection, cells were stained with Malibu-Glo reagent represented by SEQ ID NO (DNA): 3649 and SEQ ID NO (PRT):1199. 293FT cells transfected with the TAG-SAR constructs showed increase in Nluc activity when stained with the Malibu-glo reagent with SEQ ID NO:1199 as measured by Malibu-glo assay as compared to control 293FT cells. The results were confirmed using Flow cytometry using Strep-tagII antibody. These results demonstrated that SAR constructs comprising SHARP-tags (e.g., P11 or P14) epitope tags can be identified using huMA79b antibody, scFv or fragment thereof. In addition, expression of tags could be detected in NK92 cells that had been transduced with lentiviral vectors encoding TAG-SAR constructs (e.g., SEQ ID NO: 4794).

[0391] Expression of TAG-polypeptides (e.g., TAG-SAR, e.g., SEQ ID NO: 4794) is also detected in other cell types (e.g., breast, lung, kidney, liver, skin, gastrointestinal, prostate, ovarian, muscle cells and neurons) that are transduced with the appropriate expression constructs.

Double Chain CD79b SAR Constructs Respond to Treatment with Soluble Peptides and Polypeptides.

[0392] Human CD79b-targeted SAR constructs huMA79b-WT-SIR (SEQ ID NO: 4830), huMA79b-mutant-SIR-AT5 (SEQ ID NO: 4895), huMA79b-WT-HC-SIR (SEQ ID NO: 4898) were transduced into JNG cells. The resulting cells and JNG parental cells were exposed to 3 different doses of CD79b-derived peptides at 37° C. for overnight. A p53 peptide was used as a negative control. Strong GFP induction was seen in JNG cells expressing the three SAR constructs when exposed to 10 mM dose of p11 peptide (SEQ ID NO: 50) with 10%, 6% and 41.5% of cells expressing the constructs with SEQ ID NO: 4830, 4895 and 4898, respectively, showing GFP induction. GFP induction was also seen in JNG cells expressing the SAR construct with SEQ ID NO: 4898 when exposed to a p10 peptide (SEQ ID NO: 49) and a p9 peptides (SEQ ID NO: 48). No GFP induction was seen with the p53 peptide (SEQ ID NO: 1209).

[0393] JNG cells expressing the different CD79b SAR constructs {(e.g., (SEQ ID NO: 2448 and 4898), (SEQ ID NO: 2407 and 4857) and (SEQ ID NO: 2448 4898)} were exposed to supernatants containing different SHARP-tagged scFv fusion proteins. The results are shown in Table 5 and demonstrate robust GFP induction by SHARP-tagged scFV supernatants comprising SHARP-tags with SEQ ID NO: 1-11 (e.g., Clone 031124-BBeV2), P8 (Clone 041024-EZeJ10), P9 (Clone 031124-BBeT1), P10 (Clone 031124-BBeS1), P11 (clone 031124-BBeR1) as well as several mutants of the above SHARP-tags. SHARP-tagged fusion proteins supernatants represented by SEQ ID NO: 5075-5116, 5120-5121, 5134, 5136, 5138, 5140, 5150, 5199, 5223, 5250, 5266-7, 5269-5270, 5312, 5315-6, 5357, 5377, 5368, 5417 and 5451 showed GFP induction when co-cultured with JNG cells expressing the CD79b SAR constructs with SEQ ID NO: 2448, 4898, 2407, 4857, 2448 and 4898. GFP induction was also seen upon co-culture of JNG clones expressing CD79b SAR constructs with SEQ ID NO:4828, 4829, 5065 with the supernatants containing different SHARP-tags (e.g., SEQ ID NO: 1-6, 50-52.). However, JNG cells expressing the CD79b SAR constructs represented by SEQ ID NO: 4895 showed low or no GFP induction when incubated with the supernatants containing the SHARP-tagged fusion proteins. Similarly, JNG cells expressing the single-chain second-generation CAR represented by SEQ ID NO: 4899 showed low or no GFP induction when incubated with the supernatants containing the tagged-fusion proteins.

[0394] Taken collectively, the above results demonstrate that immune effector cells (e.g., T cells, e.g., JNG cells) expressing double-chain SAR constructs targeting CD79b and comprising specific antigen binding domains can be activated by soluble peptides (e.g., SEQ ID NO: 49, 50 etc.) and soluble polypeptides (e.g., SEQ ID NO: 5075-5116 and 5120-5121 etc.) comprising SHARP-tags (e.g. SEQ ID NO: 1-6, 50-52) that are recognized by these SAR constructs. In example embodiments, the SARs constructs targeting CD79b comprise vL fragments with SEQ ID NO: 774-782 and complementary vH fragments with SEQ ID NO:899-907 and functional variants thereof with up to 20 amino acids substitutions in the framework regions and up to 2 amino acids substitutions in the CDRs that bind to CD79b.

### Binding of 10D10 Antibody and 10D10 Malibu Reagent to Cyano-CD79b and to SHARP-Tags Represented by CY11 and CY13.

[0395] JNG cells were transduced with a lentivirus vector construct with SEQ ID NO: 4968 encoding a CD19 SAR that co-expressed cyno-CD79b. The expression of Cyno-CD79b on the SAR-expressing JNG cells was detected by staining with 10D10 antibody supernatant (051824-EZyJ1; SEQ ID NO (PRT):1193) followed by flow cytometry. Robust staining was observed following staining with 10D10 with approximately 58% cells showing positive staining. The results were confirmed using Malibu-Glo assay using a 10D10-Nluc fusion protein encoded by construct with SEQ ID NO: 5539. These results indicate that cyno-CD79b can be used as a multipurpose switch for detection of SAR expressing cells.

[0396] In a complementary experiment, JNG cells were transduced with lentiviral constructs 041624-EZjB2 (SEQ ID NO: 4958) and 041624-EZjC2 (SEQ ID NO: 4959) that encode for double chain SARs comprising 10D10 vL (SEQ ID NO: 797) and 10D10 vH (SEQ ID NO: 797) domains targeting cyno-CD79b. The resulting JNG clones showed specific binding to supernatants containing Malibu-Glo reagents encoded by SEQ ID NO (DNA): 5536 and 5537 that encode for CYD11QCYD11 (SEQ ID NO: 689) and CYD11 (SEQ ID NO: 690) tags, respectively. The binding of fusion protein to the JNG cells was determined by staining with Strep-tag-FITC and flow cytometry. These results confirm specific recognition of the CYD11 tag by the 10D10 antibody, 10D10 scFV and T cells expressing a SAR comprising a 10D10-based antigen binding domains. Thus, CYD11 tag can be used to mark cells for detection, selection, enrichment, depletion by 10D10 based antibody, scFv and/or SAR-T cells.

[0397] In a similar experiment, JNG cells, NK92 cells and primary T cells will be generated that express the TAG-SARs (e.g., a second-generation CAR) containing the SHARP-tags represented by SEQ ID NO:557-566. The expression of the TAG-SAR is examined by staining with H2Mab-250 antibody and/or by using a Malibu-Glo reagent comprising an scFv comprising vL regions comprising SEQ ID NO: 846 or 847 and complementary vH regions comprising SEQ ID NO: 966 or 967. Expression of the SHARP-tag on the cell surface is evaluated by flow cytometry using fluorophore-conjugated H2Mab-250. A FITC conjugated antibody against the FLAG or the StrepTag is used to detect the binding by the Malibu-Glo reagent. Cells expressing SHARP-tagged SARs are specifically stained by H2Mab-250 or the Malibu-Glo reagent but not by isotype control, confirming the presence of surface-expressed SHARP-tag.

### Multipurpose Switches Comprising SHARP-Tags

[0398] IL2-dependent NK92 cells were infected with lentiviral constructs that expressed SARs and co-expressed multipurpose switches encoded by SEQ ID NO: 3116, 3115, 3129 and 3130. These switches encode polypeptides comprising different SHARP-tags (e.g., P11 (SEQ ID NO: 674), P13 (SEQ ID NO: 675), CD79b-Iso2-ECD (SEQ ID NO: 655) that are fused to membrane-bound forms of IL2 or IL15. The NK92 cells were withdrawn from IL2 and grown in IL2-free medium to allow the growth of cells that had been transduced with the lentiviral vector and express the multipurpose switch. The survival of NK92 cells transduced with the multipurpose switch encoding lentiviral vectors was observed. The expression of multipurpose switch was detected by staining with Malibu-Glo reagent that binds to SHARP-tags followed by measurement of luminescence. The results showed that luminescence increased from 639 in parental NK92 cells to 780, 1765, 2009 and 4819 in the NK92 cells transduced with constructs represented by SEQ ID NO: 3116, 3115, 3129 and 3130, respectively. Essentially similar results were obtained when JNG cells were transduced with a lentiviral construct (SEQ ID NO: 4938) encoding SAR construct that co-expressed a multipurpose switch. The JNG showed significant binding with the Malibu Glo reagent 110323-BBeT2.

### Expression and Functional Validation of SHARP-Tagged Antibody Constructs

[0399] A series of antibody constructs incorporating SHARP-tags (e.g., SEQ ID NO: 674, 557) at the N- or C-termini of the light and/or heavy chains were engineered, with representative sequences provided as SEQ ID NOs: 5526 through 5531. These constructs were transiently transfected into 293FT cells. Culture supernatants were harvested 4-6 days post-transfection, and SHARP-tagged antibodies were purified using column containing immobilized SN8, 2F2, HuMa79b or H2Mab-250. Purified antibodies are found to be functionally active as demonstrated by binding to target cell lines followed by flow cytometry.

### Use of SHARP-Tag in Oncolytic Virus Design

[0400] An engineered herpes simplex virus (HSV) was modified to express a SHARP-tagged membrane protein (e.g. SEQ ID NO: 662, 665-666) or SAR during infection. Tumor-bearing mice were injected intratumorally with the virus. Tumors were biopsied and stained with SABR (e.g., SN8 or huMA79b). SABR specifically stains virus-infected cells in the tumor, allowing tracking of viral spread. In a variation, the tag allows depletion using Polatuzumab vedotin.

[0401] Malibu-Glo and JNG Assays show specific binding of novel antigen binding domains and Novel SAR designs. The antigen binding properties of the antigen binding domains described in Tables 2-4 were demonstrated by generating Malibu Glo reagents comprising these binding domains. The Malibu-Glo reagents were tested for binding to the target cell lines and were found to show increased binding as compared to the control cell lines. Representative results are shown in Table 7. The binding domains listed in Tables 2-4 are also used to generate SAR and tested in JNG assay after co-culture with the appropriate target cell lines. The JNG cells expressing the SAR showed GFP induction when co-cultured overnight with the target cell lines. The representative results are shown in Table 6. Further, Table 6 also shows GFP induction in JNG cell by a large panel of unispecific, and bispecific SAR constructs, including multi-chain SAR and SHARP-tagged SAR.

### T Cells Expressing NPM1c and Mutant NPM1c Directed SARs Induce Cytotoxicity.

[0402] Human T cells isolated using CD3 magnetic beads are infected with lentiviruses expressing the 2^{nd} generation CAR and SIR constructs targeting NPM1c and comprising vL domains represented by SEQ ID NO:836-841 and the complementary vH domains with SEQ ID NO: 959-961. Additionally, T cells are also infected with 2^{nd} generation CAR and SIR constructs targeting mutant NPM1c and comprising vL domains represented by SEQ ID NO:843-845 and the complementary vH domains with SEQ ID NO: 963-965. The CAR-T and SIR-T cells are expanded in vitro for 10-14 days. Target cells (e.g., OCI-AML3 or MOLT13) stably expressing GLuc are cocultured with T cells expressing the different SARs at an E:T ratio of 10:1 for 48 hours. CAR/SIR-T cells mediated lysis of target cells is assayed using the Matador assay. The in vivo activity of the CARs is demonstrated using a xenograft model in NSG mice. Essentially a similar approach is used to demonstrate the in vitro and in vivo activities of SAR targeting Her2 and comprising the vL fragments with SEQ ID NO: 846-7 and vH fragments with SEQ ID NO: 967-970.

### Novel Topanga Reagents for Detecting PSMA SAR-T

[0403] Novel constructs (e.g., SEQ ID NO:9148-9153) encoding Topanga reagents (SEQ ID NO:3039-3042)) were generated that recognize PSMA SAR-T. These constructs encode PSMA fusion proteins in which the reporter (e.g., Nluc) is attached to N-terminus to the PSMA extracellular domain. They also comprise deletion mutants of PSMA in fusion with the reporter (e.g., Nluc, Gluc, TurboLuc etc.). These novel Topanga reagents also incorporate a dimerization domain and/or hinge domain (e.g., hIgG1-CH3 domain). The Topanga reagents were expressed in 293FT cells and were found to show superior expression as compared to the PSMA Topanga reagents generated previously. They also recognized JNG cells expressing PSMA SARs (e.g., SEQ ID NO: 5532-5534), including PSMA-SIR-T, with greater sensitivity and specificity as compared to previous Topanga reagents.

### T Cells Expressing CD79b SARs Induce Cytotoxicity in CD79b-Expressing

[0404] Human peripheral blood T cells isolated using CD3 magnetic beads were infected with lentiviruses expressing the SAR constructs (e.g., SEQ ID NO: 5060-5071, 5073) targeting CD79b. The constructs with SEQ ID NO: 5070 and 5071 also co-expressed membrane-bound IL2 (SEQ ID NO: 2622). T cells expressing the different SAR constructs show positive staining with CD79b-Fc demonstrating expression of the SAR constructs. T cells expressing the constructs with SEQ ID NO: 5063 (52% positive cells) and 5068 (70% positive cells) show higher staining as compared to others. The cytotoxicity of T cells expressing the different SAR constructs is examined by Matador Glo assay using DAUDI, JEKO-1 and RAJI cells expressing LucPPe-146-1H2 at different E:T ratios and co-culture times of 4 to 48 hours. T cells expressing all constructs show significant cytotoxicity. T cells expressing the constructs with SEQ ID NO: 5063 and 5068 show higher cytotoxicity. The SAR-T cells were expanded in culture and cytokine (IFNy, TNFa, and IL2) production by different SAR-T cells was measured by ELISA in the supernatant after 48 h co-culture with JEKO-1 and Daudi cells. T cells expressing the constructs with SEQ ID NO:5065-5067, 5069 and 5071 show higher IFNγ secretion, those with SEQ ID NO: 5064, 5065, 5066, 5068 and 5069 show high TNFα secretion, and those with SEQ ID NO: 5065, 5066 and 5069 show higher IL2 secretion.

[0405] The in vivo activity of the different SAR-T cells was tested using a JEKO-1 xenograft model in NSG mice. Jeko1-Luc-PPE cells were injected via tail vein injection (0.5 million cells/mouse) into mice (n=5 or 4). T cells (5 million cells/mouse) expressing the different SAR constructs were injected via tail vein injection 9 days later. Animals were examined using bioluminescence imaging. All animals given SAR-T cells showed effective tumor control as compared to animals given control T cells, which resulted in improvement in survival. Highest survival is seen in animals given T cell expressing the constructs with SEQ ID NO:5062, 5065 and 5066, while those with SEQ ID NO: 5068, 5070 and 5071 show greater relapse.

[0406] Experiment is repeated with T cells expressing the CD79b SAR constructs with SEQ ID NO (DNA):4647, 4648-4655, 4672-4679 and 4720-4727. These constructs encode CD79b SAR with SEQ ID NO (PRT): 2197, 2198-2205, 2222-2229 and 2270-2277, respectively. The SAR constructs with SEQ ID NO: 4647 encodes a vL fragments with SEQ ID NO:2183 and a vH with SEQ ID NO: 2184. The SAR constructs with SEQ ID NO: 4648-4655, 4672-4679 and 4720-4727 encode a vL fragments with SEQ ID NO:2173-2178 and a vH fragments with SEQ ID NO: 2179-2182. The TCRb-ECD-CD3z signaling chains, when present, are represented by SEQ ID NO: 2185-2186. The TCRa-ECD-CD16 signaling chains, when present, are represented by SEQ ID NO: 2187-2188. The TCRα signaling chains, when present, are represented by SEQ ID NO: 2190-2191. The TCRβ signaling chains, when present, are represented by SEQ ID NO: 2189-2190. The TCRb-ECD-CD3z fusion protein, when present, is represented by SEQ ID NO: 2193-2194 and TCRa-CD3z fusion protein, when present is represented by SEQ ID NO:2195-2196. An example of a lentiviral vector comprising a CD79b SAR is provided in SEQ ID NO:6377. The T cells expressing the above constructs would how significant expression on T cells by staining with CD79b-Fc reagent. The T cells expressing the different SAR constructs would be shown to mediate effective cytotoxicity and induce cytokine production as measured by Matador assay and ELISA when co-cultured with JEKO-1 and Daudi cells. Furthermore, T cells expressing the above SAR constructs would show effective control of tumor when tested in vivo using the JEKO-1 xenograft model in NSG mice as detailed above.

[0407] Additional CD79b SAR constructs are represented by SEQ ID NO (DNA): 4648-4751, and SEQ ID NO (PRT): 2198-2301. An additional panel of unispecific, bispecific and hybrid chain SAR constructs targeting CD79b is presented in SEQ ID NO: 5551-6365,6367-6375, 6378-6537, 6563-6574, 6589-6660. The constructs would be shown to show significant expression on T cells by staining with CD79b-Fc reagent. The T cells expressing the different SAR constructs would be shown to mediate effective cytotoxicity and induce cytokine production as measured by Matador assay and ELISA when co-cultured with JEKO-1 and Daudi cells. Furthermore, T cells expressing the above SAR constructs would show effective control of tumor when tested in vivo using the JEKO-1 xenograft model in NSG mice as detailed above.

### T Cells Expressing CD19 and CD19×CD22 Bispecific SARs Induce Cytotoxicity and Show Effective Tumor Control In Vivo

[0408] Human peripheral blood T cells isolated using CD3 magnetic beads were infected with lentiviruses expressing the SAR constructs (e.g., SEQ ID NO: 5010-5021) targeting CD19 and/or CD22. Constructs with SEQ ID NO:5016, 5018-5020 are TAG-SAR constructs that comprise SHARP-tags with SEQ ID NO: 2 or 675. Expression of the TAG-SAR constructs is confirmed by staining with Malibu-Glo reagent and huMA79b (041924-BBhJ2) and 2F2 (041924-BBhO1) antibody supernatants. In vivo activity of the different SAR-T was demonstrated using a xenograft model of JEKO-1 cells xenografted in NSG mice. The results demonstrated effective tumor clearance by all constructs as compared to the control T cells.

### T Cells Expressing CD19, CD19×CD20 and CD19×BCMA Bispecific SARs Induce Cytotoxicity and Show Effective Tumor Control In Vivo

[0409] Human peripheral blood T cells isolated using CD3 magnetic beads were infected with lentiviruses comprising the SAR constructs with SEQ ID NO (DNA): 5039-5043. These constructs encode for SARs with SEQ ID NO (PRT): 2589-2593) targeting CD19, CD19×CD20 and CD19×BCMA. The constructs comprise different SAR designs. The constructs with SEQ ID NO: 5039, 5040 and 5041 encode for unispecific SAR constructs that target CD19 and are double chain SIR, zSIR and hybrid chain SIR (HC-SIR), respectively. The constructs with SEQ ID NO: 5042 and 5043 encode for bispecific SIRs that target CD19 and BCMA, and CD19 and CD20, respectively. The construct with SEQ ID NO:5040 encodes for a TAG-SAR constructs that comprises a SHARP-tag with SEQ ID NO:674. Staining with Protein L shows that 56%, 74%, 59%, 62%, and 40% of T cells shows expression of SAR when transduced with SEQ ID NO: 5039-5043, respectively. Matador cytotoxicity assay confirms specific cytotoxicity of T cells expressing all constructs against RAJI, JEKO-1, and RS;411 cell lines. T cells expressing the SAR with SEQ ID NO: 5042 also show specific cytotoxicity against MM1s cell line that expresses BCMA. T cells expressing the constructs with SEQ ID NO: 5039-5041 show IFNγ and TNFα induction when exposed to RAJI cells but not RAJI cells with knock-out of CD19. T cells expressing the bispecific SAR constructs show IFNγ and TNFα induction when exposed to RAJI cells and RAJI cells with knock-out of CD19 (RAJI-CD19-KO). In vivo activity of the different SAR-T was demonstrated using a xenograft model of JEKO-1 cells xenografted in NSG mice. Mice are injected with 0.5 million JEKO-1 cells expressing LucPPe via tail vein and given SAR-T cells two days later. The results are shown in FIG. 7 and demonstrate effective tumor clearance by all constructs as compared to the control T cells.

[0410] T cells expressing PSMA SARs induce cytotoxicity in PSMA-expressing LNCaP cells. Human peripheral blood T cells isolated using CD3 magnetic beads are infected with lentiviruses comprising the PSMA-targeted SAR constructs with SEQ ID NO (DNA): 5532 and 5533, respectively. These constructs encode for SARs with SEQ ID NO (PRT):3037 and 3038. The SAR construct with SEQ ID NO: 5532 encodes for a second-generation CAR, while the construct with SEQ ID NO: 5533 encodes for a zSIR in which the vL and vH domains of a PSMA antibody are separately attached to two CD3z chains via linkers derived from immunoglobulin. The zSIR design is described in PCT/US2019/035096. Staining with Protein L shows that 78% and 41% of T cells show expression of the SAR when transduced with SEQ ID NO: 5532 and 5533, respectively. Matador cytotoxicity assay shows equivalent cytotoxicity of T cells expressing the two SAR on LNCaP and MDAPCa2b cell lines that have been engineered to express LucPPe. T cells expressing SAR with SEQ ID NO: 5532 shows higher TNFα and IFNγ secretion when co-cultured with LNCaP and MDAPCa2b cells as compared to T cells that express SEQ ID NO: 5533. In vivo efficacy is tested using a LNCaP xenograft model in NSG mice. On day 1, one million LNCaP-LucPPE cells are injected subcutaneously with Matrigel (50:50) in the flanks of mice. On Day 13, mice receive 5 million SAR-T cells via tail vein injection. Bioluminescence imaging demonstrates enhanced tumor control in mice treated with SAR-T cells transduced with the construct comprising SEQ ID NO: 5533, compared to mice receiving either control cells or SAR-T cells transduced with the construct comprising SEQ ID NO: 5532 (FIG. 8). These results demonstrate the superior in vivo efficacy of the zSIR construct in controlling tumor growth within a solid tumor model.

In Vivo Treatment with Polatuzumab Vedotin

[0411] A patient with prostate cancer is enrolled in a clinical trial for treatment with TAG-SAR-T cells targeting STEAP2. T cells are collected from the subject using leukapheresis, transduced with the appropriate TAG-SAR (SEQ ID NO:5045 and 5046) encoding lentivirus vector and expanded ex vivo using CD3/CD28 beads. The dose of SAR-T product varies from 1×10⁴ SAR+ve CD3 cells/kg to 5×10¹¹ SAR+ve CD3 cells/kg as per the study protocol. Five days after infusion of TAG-SAR-T cells, the patient develops symptoms suggestive of Cytokine release syndrome (e.g., Fever, chills, short of breath, hypotension, oliguria) and ICANS (e.g., confusion, headaches, seizure). The rapid expansion of TAG-SAR-T in peripheral blood is confirmed by staining with FITC-conjugated SN8 antibody and Malibu-Glo reagent (110323-BBeT2). Patient receives Tociluzumab and Dexamethasone per protocol without improvement. Finally, patient is administered Polatuzumab vedotin (Polivy) at dose of 1.8 mg/kg intravenously with improvement.

[0412] Virus and virus like particles. A viral envelope protein (e.g., VSV-G or mBAEV glycoprotein) or a transduction particle is engineered to display the SHARP-tag epitope. The viral particles are purified using SABR using affinity chromatography. The invention covers production of host cells (e.g., retroviral packaging lines) engineered with SHARP-tag markers for lot release testing and safe elimination after vector production.

[0413] In Vivo Regulation and Termination of SAR-T Cells via SABR and SABR-ADC Scenario: A patient with refractory B-cell lymphoma is treated with TAG-SAR19 T cells (expressing the SHARP-tagged anti-CD19 CAR). However, 1-week post-infusion, the patient develops grade 3 cytokine release syndrome (CRS). To mitigate CRS, the clinical team decides to administer SABR antibody (e.g., 2F2) to partially deplete or dampen the SAR-T cells. The patient receives an intravenous infusion of SABR (human IgG1) at 10 mg/kg. Within 12 hours, the patient's fever and blood pressure begin to improve. One week later, the patient develops neurotoxicity manifesting as confusion and tremors. The patient is given a single dose of Polatuzumab. The dose is 0.1 mg/kg. By day 3 post-ADC, the patient's neurological symptoms improve dramatically, and no SAR-T cells are detectable by flow cytometry or by a sensitive PCR for the SAR transgene in blood.

### Bispecific SABR×CD3 for Selective Killing of SHARP-Tagged Cells

[0414] A bispecific antibody SABR×CD3 will be engineered, consisting of the scFv of SABR and an scFv from OKT3 (anti-CD3F), linked in tandem (a BiTE format). SHARP-tagged CAR-T cells (targets) will be mixed with fresh CD3+ T cells (effectors) at a 1:1 ratio. The SABR×CD3 BiTE will be added to the culture at varying concentrations (0, 1, 10, 100 ng/mL). After 16 hours, specific lysis of target cells will be measured.

[0415] Co-Expression of SHARP-tag with a CD34 Selection Marker. T cells are transduced with a vector encoding a SAR with SHARP-tag and Truncated CD34 (tCD34). A multiple myeloma patient's T cells are transduced with this vector. Anti-CD34 magnetic beads are used to select the transduced cells. The cells are expanded using standard methods (e.g., anti-CD3/28 beads) or using SABR crosslinking. The patient receives the dual-tagged CAR-T cells. The SHARP-tag on the CAR allows tracking of these cells by flow cytometry. Meanwhile, the co-expressed CD34 is also detectable by flow. If one patient develops a delayed neurotoxicity at week 3, SABR antibody is administered to eliminate the CAR-T cells. Co-expression of SHARP-tag and CD34 does not show any detrimental effects on the CAR functionality.

[0416] SHARP-tagged Cytokines: Recombinant cytokines (e.g., IL-2 and IL15) are expressed with a C-terminal or N-terminal SHARP-tag (SEQ ID NO: 674) in HEK293 cells. The representative constructs are shown with SEQ ID NO:3117-3119 and 3121-3123. The cell culture supernatant is passed over a column containing immobilized SN8, 2F2 or HuMa79b. Bound protein is eluted with low-pH buffer. The SHARP-tagged cytokine binds specifically to the SABR (i.e., SN8) column and elutes as a single peak, allowing purification in a single step. Essentially similar results are obtained when the cytokine (IL2) is tagged at N-terminal with a SHARP-tag represented by SEQ ID NO: 557 and purified over a column containing immobilized H2Mab-250. The recombinant cytokines are tested in functional assays and retain their biological activities.

[0417] Improved method to determine the titer of a vector. Lentiviral vectors encoding constructs with SEQ ID NO: 5010-5033 are prepared by transfection in 293FT cells. Supernatant containing the viral particles is collected. To determine the titer of the viruses, viral supernatant is used to infect wild-type JNG T cells and JNG cells which have impaired or abolished expression of one or more endogenous TCR constant chains selected from the group consisting of TCRα, TCRβ1 and/or TCRβ2 constant chains. The titer of the lentiviral vector is measured by Protein L staining, Topanga assay, and by JNG-NFAT-GFP assays. Infection of JNG cells with impaired or abolished expression of TCRα and/or TCRβ (e.g., TCRβ1) constant chains results in determination of the titer of the lentiviral vectors that comprise double chain SAR constructs (e.g., SEQ ID NO: 5011-5021) with greater sensitivity and accuracy. These constructs comprise TCRα, TCRβ1 and/or TCRβ2 constant chains. In contrast, the infection of parental JNG cells frequently leads to underestimation of the titer of double-chain SAR constructs comprising TCRα, and/or TCRβ constant chains. Further, the titers of lentiviral vectors encoding SAR constructs comprising hybrid TCR constant chains is also measured with greater sensitivity and accuracy in JNG cells with impaired or abolished expression of TCRα, TCRβ (e.g., TCRβ1) constant chains. Thus, the titer of vector constructs encoding the SAR constructs with the designs of SIR, cTCR, HIT, STAR, HC-SIR and recombinant TCR is measured with greater sensitivity and accuracy in T cells with impaired or abolished expression of an endogenous TCR constant chain. Essentially similar results are obtained when using retroviral vectors, adenoviral vectors, AAV vectors, herpes viral vectors, mRNA vectors, lipid nanoparticles, viral like particles, plasmid vectors, baculoviral vectors, and transposons. Essentially similar results are obtained when the titer of a vector comprising TCRγ and TCRδ chain is determined in T cells with impaired or abolished expression of endogenous TCRγ and/or TCRδ chains. Finally, there is no major advantage of using JNG cells with impaired expression of endogenous TCR chains when measuring the titer of a single chain vector (e.g., a second-generation CAR). Such a vector is represented by SEQ ID NO: 5010.

[0418] Novel approach to measure the expression of SAR constructs. JNG and T cells are transduced with lentiviral vectors encoding SARs with SEQ ID NO: 5011-5018, 4946 and 4916-4922, 4951-4955 comprising scFv, vL, vH, vHH and FHVH domains as their antigen binding domains. Expression of the SAR is determined by staining with PE conjugated Goat Anti-Human Ig and PE-conjugated Goat F(ab′)2 Anti-Mouse IgG(H+L). SAR constructs with SEQ ID NO: 5011-5018 show significant staining with PE conjugated Goat Anti-Human Ig and those with SEQ ID NO: 4916-4922, and 4951-4955 show significant staining with Goat F(ab′)2 Anti-Mouse IgG(H+L).

[0419] Novel approach to measure the expression of SAR constructs comprising TCR constant chains. A lentiviral vector encoding a SAR (SIR) targeting PSMA (SEQ ID NO: 4957) is used to infect JNG and primary T cells. The expression of the SIR is difficult to detect with the conventional methods, e.g., staining with Protein L due to poor sensitivity and high background. To detect the expression of the SIR in JNG cells with greater sensitivity, the cells are stained with antibodies against human TCRα, TCRβ1 and/or TCRβ2 constant chains. The expression of the TCRβ2 constant chain on JNG cells is used to determine the expression of the SAR. The method is repeated in primary T cells with similar results. Primary T cells express TCRβ2 chain. Therefore, the cells are stained with antibodies against TCRβ1 and TCRβ2 constant chains. The presence of T cells that show staining with both TCRβ1 and TCRβ2 constant chain specific antibodies (i.e., double positive cells) is used as a measure of the expression of the SIR. The method is used to measure the potency of the vector encoding the SIR and as a product release assay. The experiment is repeated using other SAR constructs (e.g., SIR, HC-SIR, Multi-chain SIR, HIT, STAR etc.) comprising human TCR constant chains with similar results.

A Short Method for Manufacturing of a SIR, HC-SIR, zSIR, z16-SIR, CD16-SIR.

[0420] A SAR-T cell product is manufactured using a process optionally beginning with administration of a mobilizing agent (e.g., plerixafor) to a healthy donor to mobilize immune effector cells. Immune cells are collected via leukapheresis, optionally cryopreserved and thawed prior to downstream processing. T cells are isolated using CD3 selection or CD4/CD8 enrichment and/or depletion of non-T cells, followed by activation using anti-CD3/CD28 beads or antibodies for 12-18 hours in the presence of IL-2 or IL-15/IL-7. Approximately 300-400 million activated T cells are then transduced with a nucleic acid encoding a Synthetic Antigen Receptor (SAR) (SEQ ID NO:2197-2302, 2304-2514) using a lentiviral vector in the presence of vectofusin-1. Transduced cells are expanded for 12 hours to 7 days with IL-2 or IL-15/IL-7 and CD3/CD28 stimulation, harvested, and formulated. The process is performed in a closed automated system, optionally using the Prodigy® CliniMACS platform and the T Cell Transduction Large Scale (TCT-LS) process.

[0421] Combination of a PSMA SAR with anti-androgens. Prostate cancer cell lines (LAPC4, LNCaP, 22Rv1 and C4-2) are treated with 10 μM bicalutamide, 10 μM enzalutamide, 10 μM apalutamide, or 10 μM darolutamide for over 2-4 weeks or left untreated. Subsequently, the cell lines are exposed to PSMA SAR-T cells (SEQ ID NO: 4937-4938). Cell death is measured using Matador cytotoxicity assay and is found to be significantly increased in cell lines treated with the drugs as compared to untreated cells. No increase in toxicity is seen when the experiment is repeated with normal cells from vital tissues, such as lung, kidney, liver, heart, brain etc.

[0422] Combined treatment with a SAR-T or SAR-NK cells and antiandrogen. A male patient diagnosed with metastatic castration-resistant prostate cancer (mCRPC) expressing a tumor-associated antigen (e.g., PSMA, PSCA, STEAP2 etc.) targetable by a Synthetic Antigen Receptor (SAR) is treated with autologous CAR-T cells in combination with an anti-androgen agent. The SAR (e.g., CAR, SIR, zSIR, z16SIR etc.) is selected from the group consisting of SEQ ID NO: 4931, 4933, 4937-4943, 5006-5008, 5044, 5045, 5046, or 5059). On Day 0, following lymphodepleting chemotherapy, the patient receives an infusion of 5×10⁶ SAR-T cells/kg body weight. Concomitant to cell infusion, the patient is administered enzalutamide orally at a dose of 160 mg per day, continued daily throughout the observation period. Alternatively, anti-androgens such as bicalutamide (50 mg/day), flutamide (750 mg/day in divided doses), nilutamide (150 mg/day), apalutamide (240 mg/day), darolutamide (1200 mg/day in divided doses), or abiraterone acetate (1000 mg/day with prednisone 5 mg BID) are substituted depending on patient tolerance, prior treatment, and tumor responsiveness. The combination therapy is well tolerated and resulted in a sustained decline in PSA levels and radiographic evidence of tumor regression, supporting synergistic activity between SAR T cells and androgen receptor pathway inhibition. In an alternative case, patient is given SAR-NK targeting PSMA.

[0423] Advantages and Conclusions: The SHARP-tag and SABR system represents a comprehensive solution to many challenges in cell therapy and protein drug development—from manufacturing and quality control to real-time monitoring and safety management. The ability to integrate a tiny, non-immunogenic tag into therapeutic cells or proteins and to leverage a clinically deployable antibody for multiple purposes provides a new level of control. This platform can improve the safety of cell and gene therapies, streamline their production, and enhance their clinical efficacy (through adaptive dosing and conditional regulation). The novelty and utility of the present invention are further underscored by the inventor's prior efforts to develop epitope tags derived from FDA-approved antibodies or antibody-drug conjugates, including but not limited to those recognized by rituximab, Obinutuzumab, brentuximab vedotin, and Belantamab mafodotin-blmf. Tags based on epitopes recognized by these clinically validated antibodies were systematically evaluated; however, they either interfered with the expression and/or functional activity of the tagged protein (e.g., a chimeric antigen receptor [CAR]) or exhibited suboptimal sensitivity in detection assays. These limitations highlight the unexpected advantages of the presently disclosed tags and their binding counterparts.

TABLE 2

| | vL Domains and CDRs | | | | |
|---|---|---|---|---|---|
| | | SEQ | CDR1 | CDR2 | CDR3 |
| | | ID NO | (SEQ | (SEQ | (SEQ |
| Target | vL Name | (PRT) | ID NO) | ID NO) | ID NO) |
| EGFRviii | EGFRviii-GC1-Y31F-USC1 | 722 | 6601 | 6970 | 7339 |
| EGFRviii | EGFRviii-GC1 | 723 | 6602 | 6971 | 7340 |
| EGFRviii | EGFRviii-GC1-S51T-USC2 | 724 | 6603 | 6972 | 7341 |
| EGFRviii | EGFRviii-GC1-D29N-USC3 | 725 | 6604 | 6973 | 7342 |
| EGFRviii | EGFRviii-GC2 | 726 | 6605 | 6974 | 7343 |
| EGFRviii | EGFRviii-GC2-S25R | 727 | 6606 | 6975 | 7344 |
| EGFRviii | EGFRviii-GC2-S25N | 728 | 6607 | 6976 | 7345 |
| EGFRviii | EGFRviii-GC2-S31N | 729 | 6608 | 6977 | 7346 |
| GD2 | GD2-hu3F8-USC1 | 730 | 6609 | 6978 | 7347 |
| GD2 | GD2-hu3F8-USC2 | 731 | 6610 | 6979 | 7348 |
| GD2 | GD2-hu-KM666-USC1 | 732 | 6611 | 6980 | 7349 |
| GD2 | GD2-mu-KM666 | 733 | 6612 | 6981 | 7350 |
| CLDN18.2 | huCLD18A2-175D10-USC1 | 734 | 6613 | 6982 | 7351 |
| CLDN18.2 | huCLD18A2-175D10-USC2 | 735 | 6614 | 6983 | 7352 |
| CD19 | hu-mROO5-1-A28T-AT1 | 736 | 6615 | 6984 | 7353 |
| CD19 | hu-mROO5-1-Y32S-AT2 | 737 | 6616 | 6985 | 7354 |
| CD19 | hu-CD19-USC3-AT1 | 738 | 6617 | 6986 | 7355 |
| CD19 | hu-CD19-USC3-AT2 | 739 | 6618 | 6987 | 7356 |
| TAJ/TNFRSF19 | KN5-USC1-R3D | 740 | 6619 | 6988 | 7357 |
| GPRC5D | GPRC5D-Ro-5F11-USC1 | 741 | 6620 | 6989 | 7358 |
| GPRC5D | GPRC5D-Ro-5E11-USC2 | 742 | 6621 | 6990 | 7359 |
| GPRC5D | GPRC5D-Ro-5F11-E11 | 743 | 6622 | 6991 | 7360 |
| GPRC5D | GPRC5D-Ro-5E11-5F11 | 744 | 6623 | 6992 | 7361 |
| GPRC5D | GPRC5D-JJ-5B83-USC3 | 745 | 6624 | 6993 | 7362 |
| FCRH5 | FCRH5-GN-USC2 | 746 | 6625 | 6994 | 7363 |
| FR1 | FR1-huMov19-USC2 | 747 | 6626 | 6995 | 7364 |
| p53-R175H | p53-R175H | 748 | 6627 | 6996 | 7365 |
| p53-R175H | p53-R175H-AT1 | 749 | 6628 | 6997 | 7366 |
| p53-R248Q | p53-R248Q-336-USC1 | 750 | 6629 | 6998 | 7367 |
| Muc16 | huMuc16-3A5 | 751 | 6630 | 6999 | 7368 |
| ROR1 | ROR1-JJ-67 | 752 | 6631 | 7000 | 7369 |
| ROR1 | ROR1-JJ-67-AT1 | 753 | 6632 | 7001 | 7370 |
| DLL3 | DLL3-hSC16-57-USC1 | 754 | 6633 | 7002 | 7371 |
| NPM1c | NPM1c-YG1 | 755 | 6634 | 7003 | 7372 |
| IL2R | IL23R-SANG-11-vL | 756 | 6635 | 7004 | 7373 |
| HLA-A2 | HLA-A2-SANG-76-HL | 757 | 6636 | 7005 | 7374 |
| MOG | MOG01-USC1-vL | 758 | 6637 | 7006 | 7375 |
| MOG | MOG301-Y56N-USC2-vL | 759 | 6638 | 7007 | 7376 |
| MOG | MOG473-USC3-vL | 760 | 6639 | 7008 | 7377 |
| MOG | MOG01-vL | 761 | 6640 | 7009 | 7378 |
| MOG | MOG301-vL | 762 | 6641 | 7010 | 7379 |
| MOG | MOG-AZ17-vL | 763 | 6642 | 7011 | 7380 |
| CSF1R | CSF1R-AXI-vL | 764 | 6643 | 7012 | 7381 |
| CSF1R | CSF1R-AXI-USC1-vL | 765 | 6644 | 7013 | 7382 |
| TAG72 | huTAG72-v59-v15-vL | 766 | 6645 | 7014 | 7383 |
| TAG72 | TAG72-IDEC-HuCC49 | 767 | 6646 | 7015 | 7384 |
| CLDN6 | hu-CLDN6-BNT-USC1 | 768 | 6647 | 7016 | 7385 |
| CLDN6 | hu-CLDN6-BNT-USC3 | 769 | 6648 | 7017 | 7386 |
| CLDN6 | hu-CLDN6-BNT-USC4 | 770 | 6649 | 7018 | 7387 |
| CLDN6 | hu-CLDN6-BNT-USC5 | 771 | 6650 | 7019 | 7388 |
| CLDN6 | CLDN6-USC1-G51S-vL | 772 | 6651 | 7020 | 7389 |
| CLDN6 | CLDN6-129V-N33Y-G51S | 773 | 6652 | 7021 | 7390 |
| CD79b | huMA79b-AT1 | 774 | 6653 | 7022 | 7391 |
| CD79b | huMA79b-AT2 | 775 | 6654 | 7023 | 7392 |
| CD79b | huMA79b-AT3 | 776 | 6655 | 7024 | 7393 |
| CD79b | huCD79b-AT4 | 777 | 6656 | 7025 | 7394 |
| CD79b | huCD79b-AT5 | 778 | 6657 | 7026 | 7395 |
| CD79b | huCD79b-AT6 | 779 | 6658 | 7027 | 7396 |
| CD79b | huMA79b-AT5 | 780 | 6659 | 7028 | 7397 |
| CD79b | huMA79b-AT7 | 781 | 6660 | 7029 | 7398 |
| CD79b | huMA79b-AT8 | 782 | 6661 | 7030 | 7399 |
| CD79b | huCD79b-2F2-AT1 | 783 | 6662 | 7031 | 7400 |
| CD79b | huCD79b-2F2-AT2 | 784 | 6663 | 7032 | 7401 |
| CD79b | huCD79b-2F2-AT3 | 785 | 6664 | 7033 | 7402 |
| CD79b | huCD79b-2F2-AT4 | 786 | 6665 | 7034 | 7403 |
| CD79b | huCD79b-2F2-AT5 | 787 | 6666 | 7035 | 7404 |
| CD79b | huCD79b-2F2-AT6 | 788 | 6667 | 7036 | 7405 |
| CD79b | huCD79b-2F2-AT7 | 789 | 6668 | 7037 | 7406 |
| CD79b | mu-MA79b | 790 | 6669 | 7038 | 7407 |
| CD79b | CD79b-2F2-CY-vL | 791 | 6670 | 7039 | 7408 |
| CD79b | huMA79b-DeltaD | 792 | 6671 | 7040 | 7409 |
| CD79b | huMA79b-E30D-E97D- | 793 | 6672 | 7041 | 7410 |
| | AT5-vL-DelD | | | | |
| CD79b | huMA79b-AT5-vL-DelD | 794 | 6673 | 7042 | 7411 |
| CD79b | CD79b-hAb015-AT1 | 795 | 6674 | 7043 | 7412 |
| CD79b | CD79b-hAb017-AT1 | 796 | 6675 | 7044 | 7413 |
| CD79b-cyno | CynoCD79b-10D10 | 797 | 6676 | 7045 | 7414 |
| GPC3 | GPC3-USC3-HL | 798 | 6677 | 7046 | 7415 |
| GPC3 | GPC3-USC2-vL | 799 | 6678 | 7047 | 7416 |
| GPC3 | GPC3-USC3-vL | 800 | 6679 | 7048 | 7417 |
| GPC3 | GPC3-USC4-vL | 801 | 6680 | 7049 | 7418 |
| BCMA | BCMA-hu72-K30Q-P38K- | 802 | 6681 | 7050 | 7419 |
| | V46L-V84D-vL | | | | |
| BCMA | BCMA-hu72-S30G-P38K- | 803 | 6682 | 7051 | 7420 |
| | V46L-V84D-vL | | | | |
| STEAP2 | STEAP2-REGN-1162- | 804 | 6683 | 7052 | 7421 |
| | USC1-vL | | | | |
| STEAP2 | STEAP2-REGN-1162-USC3 | 805 | 6684 | 7053 | 7422 |
| STEAP2 | STEAP2-REGN-1162-USC4 | 806 | 6685 | 7054 | 7423 |
| STEAP2 | STEAP2-REGN-1162-USC5 | 807 | 6686 | 7055 | 7424 |
| CD79b | huMA79b-vL-AT10 | 808 | 6687 | 7056 | 7425 |
| CD79b | huMA79b-vL-AT11 | 809 | 6688 | 7057 | 7426 |
| CD79b | huMA79b-vL-AT12 | 810 | 6689 | 7058 | 7427 |
| CD79b | huMA79b-vL-AT13 | 811 | 6690 | 7059 | 7428 |
| CD79b | huMA79b-vL-AT14 | 812 | 6691 | 7060 | 7429 |
| CD79b | huMA79b-vL-AT15 | 813 | 6692 | 7061 | 7430 |
| CD79b | huMA79b-vL-AT16 | 814 | 6693 | 7062 | 7431 |
| CD79b | huMA79b-vL-AT17 | 815 | 6694 | 7063 | 7432 |
| CD79b | huMA79b-vL-AT18 | 816 | 6695 | 7064 | 7433 |
| CD79b | huMA79b-vL-AT19 | 817 | 6696 | 7065 | 7434 |
| CD79b | huMA79b-vL-AT20 | 818 | 6697 | 7066 | 7435 |
| CLDN6 | hu-CLDN6-BNT-USC1-6 | 819 | 6698 | 7067 | 7436 |
| CLDN7 | hu-CLDN6-BNT-USC1-7 | 820 | 6699 | 7068 | 7437 |
| CLDN8 | hu-CLDN6-BNT-AT1-vL | 821 | 6700 | 7069 | 7438 |
| CLDN9 | hu-CLDN6-BNT-AT2-vL | 822 | 6701 | 7070 | 7439 |
| CLDN10 | hu-CLDN6-BNT-AT3-vL | 823 | 6702 | 7071 | 7440 |
| CLDN11 | hu-CLDN6-BNT-AT4-vL | 824 | 6703 | 7072 | 7441 |
| CLDN12 | hu-CLDN6-BNT-AT5-vL | 825 | 6704 | 7073 | 7442 |
| CLDN13 | hu-CLDN6-BNT-AT6-vL | 826 | 6705 | 7074 | 7443 |
| CLDN14 | hu-CLDN6-BNT-AT7-vL | 827 | 6706 | 7075 | 7444 |
| STEAP2 | STEAP2-AZ40A3-N30S-vL | 828 | 6707 | 7076 | 7445 |
| STEAP3 | STEAP2-AZ40A3-vL | 829 | 6708 | 7077 | 7446 |
| GCC | GCC-22G5-vL | 830 | 6709 | 7078 | 7447 |
| GCC | GCC-AT22G5-K31N-vL | 831 | 6710 | 7079 | 7448 |
| GCC | GCC-AT22G5-A102S-vL | 832 | 6711 | 7080 | 7449 |
| GCC | GCC-AT22G5-L91Q-vL | 833 | 6712 | 7081 | 7450 |
| GCC | GCC-AT22G5-K31N-L91Q- | 834 | 6713 | 7082 | 7451 |
| | A102S-vL | | | | |
| NPM1c | NPM1c-Ab1-vL | 835 | 6714 | 7083 | 7452 |
| NPM1c | NPM1c-Ab1-AT1-vL | 836 | 6715 | 7084 | 7453 |
| NPM1c | NPM1c-Ab1-AT2-vL | 837 | 6716 | 7085 | 7454 |
| NPM1c | NPM1c-Ab1-AT3-vL | 338 | 6717 | 7086 | 7455 |
| NPM1c | NPM1c-Ab1-AT4-vL | 839 | 6718 | 7087 | 7456 |
| NPM1c | NPM1c-Ab1-AT5-vL | 840 | 6719 | 7088 | 7457 |
| NPM1c | NPM1c-Ab1-AT6-vL | 841 | 6720 | 7089 | 7458 |
| NPM1c-mut | NPM1c-mut-Ab2-vL | 842 | 6721 | 7090 | 7459 |
| NPM1c-mut | NPM1c-Mut-Ab2-AT1-vL | 843 | 6722 | 7091 | 7460 |
| NPM1c-mut | NPM1c-Mut-Ab2-AT2-vL | 844 | 6723 | 7092 | 7461 |
| NPM1c-mut | NPM1c-Mut-Ab2-AT3-vL | 845 | 6724 | 7093 | 7462 |
| Her2 | H2-Mab-250-vL | 846 | 6725 | 7094 | 7463 |
| Her2 | H2-Mab-250-AT1-vL | 847 | 6726 | 7095 | 7464 |

TABLE 3
vH domains and their CDRs

| | | SEQ | CDR1 | CDR2 | CDR3 |
|---|---|---|---|---|---|
| | | ID NO | (SEQ | (SEQ | (SEQ |
| Target | vH Name | (PRT) | ID NO) | ID NO) | ID NO) |
| EGFRviii | EGFRviii-GC1-Y31F-USC1 | 848 | 6727 | 7096 | 7465 |
| EGFRviii | EGFRviii-GC1 | 849 | 6728 | 7097 | 7466 |
| EGFRviii | EGFRviii-GC1-S51T-vL-USC2 | 850 | 6729 | 7098 | 7467 |
| EGFRviii | EGFRviii-GC1-D29N-USC3 | 851 | 6730 | 7099 | 7468 |
| EGFRviii | EGFRviii-GC2 | 852 | 6731 | 7100 | 7469 |
| EGFRviii | EGFRviii-GC2-S25R | 853 | 6732 | 7101 | 7470 |
| EGFRviii | EGFRviii-GC2-S25N | 854 | 6733 | 7102 | 7471 |
| EGFRviii | EGFRviii-GC2-S31N | 855 | 6734 | 7103 | 7472 |
| GD2 | GD2-hu3F8-USC1 | 856 | 6735 | 7104 | 7473 |
| GD2 | GD2-hu3F8-USC2 | 857 | 6736 | 7105 | 7474 |
| GD2 | GD2-hu-KM666-USC1 | 858 | 6737 | 7106 | 7475 |
| GD2 | GD2-mu-KM666 | 859 | 6738 | 7107 | 7476 |
| CLDN18.2 | hu-CLD18A2-175D10-USC1 | 860 | 6739 | 7108 | 7477 |
| CLDN18.2 | hu-CLD18A2-175D10-USC2 | 861 | 6740 | 7109 | 7478 |
| CD19 | hu-mROO5-1-AT1 | 862 | 6741 | 7110 | 7479 |
| CD19 | hu-mROO5-1-AT2 | 863 | 6742 | 7111 | 7480 |
| CD19 | hu-CD19-USC3-AT1 | 864 | 6743 | 7112 | 7481 |
| CD19 | hu-CD19-USC3-AT2 | 865 | 6744 | 7113 | 7482 |
| TAJ | KN5-USC1-R3D | 866 | 6745 | 7114 | 7483 |
| GPRC5D | GPRC5D-Ro-5F11-USC1 | 867 | 6746 | 7115 | 7484 |
| GPRC5D | GPRC5D-Ro-5E11-USC2 | 868 | 6747 | 7116 | 7485 |
| GPRC5D | GPRC5D-Ro-5F11-E11-USC | 869 | 6748 | 7117 | 7486 |
| GPRC5D | GPRC5D-Ro-5E11-5F11-USC | 870 | 6749 | 7118 | 7487 |
| GPRC5D | GPRC5D-JJ-5B83-USC3 | 871 | 6750 | 7119 | 7488 |
| FCRH5 | FCRH5-GN-USC2 | 872 | 6751 | 7120 | 7489 |
| FR1 | FR1-huMov19-USC2 | 873 | 6752 | 7121 | 7490 |
| p53-R175H | p53-R175H | 874 | 6753 | 7122 | 7491 |
| p53-R175H | p53-R175H-AT1 | 875 | 6754 | 7123 | 7492 |
| p53-R248Q | p53-R248Q-336-USC1 | 876 | 6755 | 7124 | 7493 |
| Muc16 | huMuc16-3A5 | 877 | 6756 | 7125 | 7494 |
| ROR1 | ROR1-JJ-67 | 878 | 6757 | 7126 | 7495 |
| ROR1 | ROR1-JJ-67-AT1 | 879 | 6758 | 7127 | 7496 |
| DLL3 | DLL3-hSC16-57-USC1 | 880 | 6759 | 7128 | 7497 |
| NPM1c | NPM1c-YG1 | 881 | 6760 | 7129 | 7498 |
| IL2R | IL23R-SANG-11 | 882 | 6761 | 7130 | 7499 |
| HLA-A2 | HLA-A2-SANG-76-HL | 883 | 6762 | 7131 | 7500 |
| MOG | MOG01-USC1 | 884 | 6763 | 7132 | 7501 |
| MOG | MOG301-Y56N-USC2 | 885 | 6764 | 7133 | 7502 |
| MOG | MOG473-USC3 | 886 | 6765 | 7134 | 7503 |
| MOG | MOG01 | 887 | 6766 | 7135 | 7504 |
| MOG | MOG301 | 888 | 6767 | 7136 | 7505 |
| MOG | MOG-AZ17 | 889 | 6768 | 7137 | 7506 |
| CSF1R | CSF1R-AXI | 890 | 6769 | 7138 | 7507 |
| CSF1R | CSF1R-AXI-USC1 | 891 | 6770 | 7139 | 7508 |
| TAG72 | huTAG72-v59-v15 | 892 | 6771 | 7140 | 7509 |
| TAG72 | TAG72-IDEC-HuCC49 | 893 | 6772 | 7141 | 7510 |
| CLDN6 | hu-CLDN6-BNT-USC1 | 894 | 6773 | 7142 | 7511 |
| CLDN6 | hu-CLDN6-BNT-USC3 | 895 | 6774 | 7143 | 7512 |
| CLDN6 | hu-CLDN6-BNT-USC4 | 896 | 6775 | 7144 | 7513 |
| CLDN6 | CLDN6-USC1 | 897 | 6776 | 7145 | 7514 |
| CLDN6 | CLDN6-USC2-DNA | 898 | 6777 | 7146 | 7515 |
| CD79b | huMA79b-AT1 | 899 | 6778 | 7147 | 7516 |
| CD79b | huMA79b-AT2 | 900 | 6779 | 7148 | 7517 |
| CD79b | huMA79b-AT3 | 901 | 6780 | 7149 | 7518 |
| CD79b | huCD79b-AT4 | 902 | 6781 | 7150 | 7519 |
| CD79b | huCD79b-AT5 | 903 | 6782 | 7151 | 7520 |
| CD79b | huCD79b-AT6 | 904 | 6783 | 7152 | 7521 |
| CD79b | huMA79b-AT5 | 905 | 6784 | 7153 | 7522 |
| CD79b | huMA79b-AT7 | 906 | 6785 | 7154 | 7523 |
| CD79b | huMA79b-AT8 | 907 | 6786 | 7155 | 7524 |
| CD79b | huCD79b-2F2-AT1 | 908 | 6787 | 7156 | 7525 |
| CD79b | huCD79b-2F2-AT2 | 909 | 6788 | 7157 | 7526 |
| CD79b | huCD79b-2F2-AT3 | 910 | 6789 | 7158 | 7527 |
| CD79b | huCD79b-2F2-AT4 | 911 | 6790 | 7159 | 7528 |
| CD79b | huCD79b-2F2-AT5 | 912 | 6791 | 7160 | 7529 |
| CD79b | huCD79b-2F2-AT6 | 913 | 6792 | 7161 | 7530 |
| CD79b | huCD79b-2F2-AT7 | 914 | 6793 | 7162 | 7531 |
| CD79b | mu-MA79b | 915 | 6794 | 7163 | 7532 |
| CD79b | CD79b-2F2-CY | 916 | 6795 | 7164 | 7533 |
| CD79b | huMA79bv28-DeltaD | 917 | 6796 | 7165 | 7534 |
| CD79b | huMA79b-S30T | 918 | 6797 | 7166 | 7535 |
| CD79b | huMA79b | 919 | 6798 | 7167 | 7536 |
| CD79b | CD79b-hAb015-AT1 | 920 | 6799 | 7168 | 7537 |
| CD79b | CD79b-hAb017-AT1 | 921 | 6800 | 7169 | 7538 |
| CD79b-cyno | CynoCD79b-10D10 | 922 | 6801 | 7170 | 7539 |
| GPC3 | GPC3-USC3-HL | 923 | 6802 | 7171 | 7540 |
| GPC3 | GPC3-USC2 | 924 | 6803 | 7172 | 7541 |
| GPC3 | GPC3-USC4 | 925 | 6804 | 7173 | 7542 |
| GPC3 | GPC3-USC5 | 926 | 6805 | 7174 | 7543 |
| BCMA | BCMA-hu72-F35Y-I58S-S64T | 927 | 6806 | 7175 | 7544 |
| BCMA | BCMA-hu72-S32N-F35Y- | 928 | 6807 | 7176 | 7545 |
| | I58S-S64T | | | | |
| STEAP2 | STEAP2-REGN-1162-USC1 | 929 | 6808 | 7177 | 7546 |
| STEAP2 | STEAP2-REGN-1162-USC3 | 930 | 6809 | 7178 | 7547 |
| STEAP2 | STEAP2-REGN-1162-USC4 | 931 | 6810 | 7179 | 7548 |
| STEAP2 | STEAP2-REGN-1162-USC5 | 932 | 6811 | 7180 | 7549 |
| STEAP2 | STEAP2-REGN-1162-USC6 | 933 | 6812 | 7181 | 7550 |
| STEAP2 | STEAP2-REGN-1162-USC7 | 934 | 6813 | 7182 | 7551 |
| STEAP2 | STEAP2-REGN-1162-USC8 | 935 | 6814 | 7183 | 7552 |
| STEAP2 | STEAP2-REGN-1162-USC9 | 936 | 6815 | 7184 | 7553 |
| CD79b | CD79b-huMA79b-AT10 | 937 | 6816 | 7185 | 7554 |
| CD79b | CD79b-huMA79b-AT11 | 938 | 6817 | 7186 | 7555 |
| CD79b | CD79b-huMA79b-AT12 | 939 | 6818 | 7187 | 7556 |
| CD79b | CD79b-huMA79b-AT13 | 940 | 6819 | 7188 | 7557 |
| CD79b | CD79b-huMA79b-AT14 | 941 | 6820 | 7189 | 7558 |
| CLDN6 | hu-CLDN6-BNT-USC1-6 | 942 | 6821 | 7190 | 7559 |
| CLDN6 | hu-CLDN6-BNT-USC1-7 | 943 | 6822 | 7191 | 7560 |
| CLDN6 | hu-CLDN6-BNT-AT1 | 944 | 6823 | 7192 | 7561 |
| CLDN6 | hu-CLDN6-BNT-AT2 | 945 | 6824 | 7193 | 7562 |
| CLDN6 | hu-CLDN6-BNT-AT3 | 946 | 6825 | 7194 | 7563 |
| CLDN6 | hu-CLDN6-BNT-AT4 | 947 | 6826 | 7195 | 7564 |
| CLDN6 | hu-CLDN6-BNT-AT5 | 948 | 6827 | 7196 | 7565 |
| CLDN6 | hu-CLDN6-BNT-AT6 | 949 | 6828 | 7197 | 7566 |
| CLDN6 | hu-CLDN6-BNT-AT8 | 950 | 6829 | 7198 | 7567 |
| STEAP2 | STEAP2-AZ40A3-K58E | 951 | 6830 | 7199 | 7568 |
| STEAP2 | STEAP2-AZ40A3 | 952 | 6831 | 7200 | 7569 |
| GCC | GCC-22G5-LGND | 953 | 6832 | 7201 | 7570 |
| GCC | GCC-AT22G5-S30A | 954 | 6833 | 7202 | 7571 |
| GCC | GCC-AT22G5-V101L | 955 | 6834 | 7203 | 7572 |
| GCC | GCC-AT22G5-S30A-V101L | 956 | 6835 | 7204 | 7573 |
| GCC | GCC-AT22G5-D95E | 957 | 6836 | 7205 | 7574 |
| NPM1c | NPM1c-Ab1 | 958 | 6837 | 7206 | 7575 |
| NPM1c | NPM1c-Ab1-AT1 | 959 | 6838 | 7207 | 7576 |
| NPM1c | NPM1c-Ab1-AT2 | 960 | 6839 | 7208 | 7577 |
| NPM1c | NPM1c-Ab1-AT3 | 961 | 6840 | 7209 | 7578 |
| NPM1c-mut | NPM1c-mut-Ab2-vL | 962 | 6841 | 7210 | 7579 |
| NPM1c-mut | NPM1c-Mut-Ab2-AT1 | 963 | 6842 | 7211 | 7580 |
| NPM1c-mut | NPM1c-Mut-Ab2-AT2 | 964 | 6843 | 7212 | 7581 |
| NPM1c-mut | NPM1c-Mut-Ab2-AT3 | 965 | 6844 | 7213 | 7582 |
| Her2 | H2-Mab-250 | 966 | 6845 | 7214 | 7583 |
| Her2 | H2-Mab-250_AT1 | 967 | 6846 | 7215 | 7584 |
| Her2 | H2-Mab-250_AT2 | 968 | 6847 | 7216 | 7585 |
| Her2 | H2-Mab-250_AT3 | 969 | 6848 | 7217 | 7586 |
| Her2 | H2-Mab-250_AT4 | 970 | 6849 | 7218 | 7587 |

TABLE 4
vHH and FHVH domains and their CDRs

| | | SEQ | CDR1 | CDR2 | CDR3 |
|---|---|---|---|---|---|
| | | ID NO | (SEQ | (SEQ | (SEQ |
| Target | vHH or FHVH Name | (PRT) | ID NO) | ID NO) | ID NO) |
| BCMA | hu-BCMA917-E59D-AT4 | 1081 | 6850 | 7219 | 7588 |
| BCMA | hu-BCMA917-E59D-AT5 | 1082 | 6851 | 7220 | 7589 |
| BCMA | hu-BCMA917-E59D-AT6 | 1083 | 6852 | 7221 | 7590 |
| BCMA | hu-BCMA917-E59D-AT7 | 1084 | 6853 | 7222 | 7591 |
| BCMA | hu-BCMA917-E59D-AT8 | 1085 | 6854 | 7223 | 7592 |
| BCMA | hu-BCMA917-E59D-AT9 | 1086 | 6855 | 7224 | 7593 |
| BCMA | hu-BCMA917-E59D-AT10 | 1087 | 6856 | 7225 | 7594 |
| BCMA | hu-BCMA917-E59D-AT11 | 1088 | 6857 | 7226 | 7595 |
| BCMA | hu-BCMA917-E59D-AT12 | 1089 | 6858 | 7227 | 7596 |
| BCMA | hu-BCMA917-E59D-AT13 | 1090 | 6859 | 7228 | 7597 |
| CD20 | CD20-2HCD27-AT3-vHH | 1091 | 6860 | 7229 | 7598 |
| CD20 | CD20-2HCD28-AT4-vHH | 1092 | 6861 | 7230 | 7599 |
| CD20 | CD20-VHH-AT1-2HCD29 | 1093 | 6862 | 7231 | 7600 |
| CD20 | CD20-VHH-AT1-2HCD30 | 1094 | 6863 | 7232 | 7601 |
| CD22 | CD22-hu-077-AT3-vHH | 1095 | 6864 | 7233 | 7602 |
| CD19 | CD19-huVHH-AT773-N32S-S58T | 1096 | 6865 | 7234 | 7603 |
| CD19 | CD19-huVHH-AT773-N27S-N32S- | 1097 | 6866 | 7235 | 7604 |
| | S58T | | | | |
| CD19 | CD19-huVHH-AT883-N32S-S58T | 1098 | 6867 | 7236 | 7605 |
| CD19 | CD19-huVHH-AT773-N29S-S58T | 1099 | 6868 | 7237 | 7606 |
| CD19 | CD19-VHH-AT83-N29S-S58T | 1100 | 6869 | 7238 | 7607 |
| CD19 | CD19-huVHH-AT773-N27S-S58T | 1101 | 6870 | 7239 | 7608 |
| CD19 | CD19-huVHH-AT773-WT | 1102 | 6871 | 7240 | 7609 |
| CD19 | CD19-VHH-AT83-WT | 1103 | 6872 | 7241 | 7610 |
| CD33 | CD33-vHH-AT264-S30G-V50A | 1104 | 6873 | 7242 | 7611 |
| CD33 | CD33-huvHH-AT264-S30G-V50A | 1105 | 6874 | 7243 | 7612 |
| CD33 | CD33-huvHH-AT264-S30G-V50A- | 1106 | 6875 | 7244 | 7613 |
| | K65R | | | | |
| CD33 | CD33-vHH-AT264-S30G-V50A-K65R | 1107 | 6876 | 7245 | 7614 |
| CD33 | CD33-huvHH-AT873-G30S-A50V | 1108 | 6877 | 7246 | 7615 |
| MSLN | MSLN-vHH-AT2-K65R | 1109 | 6878 | 7247 | 7616 |
| MSLN | MSLN-vHH-AT3-K65R-I109V-R114H | 1110 | 6879 | 7248 | 7617 |
| MSLN | MSLN-vHH-AT4-T61A-S105T-R114H | 1111 | 6880 | 7249 | 7618 |
| MSLN | MSLN-vHH-AT5-T61A-I109V-R114H | 1112 | 6881 | 7250 | 7619 |
| MSLN | MSLN-vHH-AT6-T61A-S105T-I109V- | 1113 | 6882 | 7251 | 7620 |
| | R114H | | | | |
| MSLN | MSLN-vHH-AT7 | 1114 | 6883 | 7252 | 7621 |
| DLL3 | DLL3-vHH-AT6 | 1115 | 6884 | 7253 | 7622 |
| DLL3 | DLL3-vHH-AT7 | 1116 | 6885 | 7254 | 7623 |
| DLL3 | DLL3-vHH-AT8 | 1117 | 6886 | 7255 | 7624 |
| DLL3 | DLL3-vHH-AT9 | 1118 | 6887 | 7256 | 7625 |
| DLL3 | DLL3-vHH-AT10 | 1119 | 6888 | 7257 | 7626 |
| DLL3 | DLL3-vHH-AT11 | 1120 | 6889 | 7258 | 7627 |
| DLL3 | DLL3-vHH-AT12 | 1121 | 6890 | 7259 | 7628 |
| IL13Ra2 | IL13Ra2-huvHH-AT1-C11 | 1122 | 6891 | 7260 | 7629 |
| IL13Ra2 | IL13Ra2-huvHH-AT3-Cl1 | 1123 | 6892 | 7261 | 7630 |
| IL13Ra2 | IL13Ra2-vHH-Cl2 | 1124 | 6893 | 7262 | 7631 |
| IL13Ra2 | IL13Ra2-vHH-AT4-Cl3 | 1125 | 6894 | 7263 | 7632 |
| Muc16 | MUC16-VHH-R3MU29 | 1126 | 6895 | 7264 | 7633 |
| Muc16 | MUC16-vHH-R3MU5-AT1 | 1127 | 6896 | 7265 | 7634 |
| Muc16 | MUC16-vHH-R3MU5-AT3 | 1128 | 6897 | 7266 | 7635 |
| Muc16 | MUC16-AT2-huR3MU30 | 1129 | 6898 | 7267 | 7636 |
| Muc16 | MUC16-VHH-R3MU31-AT4 | 1130 | 6899 | 7268 | 7637 |
| BCMA | BCMA917-V5L-T30S-E59D-AT16 | 1131 | 6900 | 7269 | 7638 |
| BCMA | BCMA-vHH-917-S49N-AT17 | 1132 | 6901 | 7270 | 7639 |
| BCMA | BCMA917-S102A-AT18 | 1133 | 6902 | 7271 | 7640 |
| BCMA | BCMA917-D96E-AT19 | 1134 | 6903 | 7272 | 7641 |
| BCMA | BCMA-vHH-917-AT20 | 1135 | 6904 | 7273 | 7642 |
| BCMA | BCMA-vHH-917-AT21 | 1136 | 6905 | 7274 | 7643 |
| BCMA | BCMA-vHH-917 AT22 | 1137 | 6906 | 7275 | 7644 |
| BCMA | BCMA-vHH-917- AT23 | 1138 | 6907 | 7276 | 7645 |
| BCMA | BCMA-vHH-917-AT24 | 1139 | 6908 | 7277 | 7646 |
| BCMA | BCMA355-F106Y-vHH-AT1 | 1140 | 6909 | 7278 | 7647 |
| BCMA | BCMA355-S57N-A104S-vHH-AT2 | 1141 | 6910 | 7279 | 7648 |
| CD22 | CD22-huVHH-077 | 1142 | 6911 | 7280 | 7649 |
| CD22 | CD22-huVHH-077-F101Y-AT4 | 1143 | 6912 | 7281 | 7650 |
| CD22 | CD22-huVHH-077-V103I-AT5 | 1144 | 6913 | 7282 | 7651 |
| CD22 | CD22-huVHH-077-S58A-AT6 | 1145 | 6914 | 7283 | 7652 |
| CD22 | CD22-huVHH-077F34Y-S58A-AT7 | 1146 | 6915 | 7284 | 7653 |
| CD22 | CD22-huVHH-077-V106I-AT8 | 1147 | 6916 | 7285 | 7654 |
| CD22 | CD22-huVHH-077F34Y-V106I-AT9 | 1148 | 6917 | 7286 | 7655 |
| CD19 | CD19-huVHH-773 | 1149 | 6918 | 7287 | 7656 |
| CD19 | CD19-huVHH-AT773-WT(N32T) | 1150 | 6919 | 7288 | 7657 |
| CD19 | CD19-huVHH-AT773-A106S-AT1 | 1151 | 6920 | 7289 | 7658 |
| CD19 | CD19-huVHH-AT773-A99S-AT2 | 1152 | 6921 | 7290 | 7659 |
| CD19 | CD19-huVHH-AT773-AT3 | 1153 | 6922 | 7291 | 7660 |
| DLL3 | DLL3-vHH-T2 | 1154 | 6923 | 7292 | 7661 |
| DLL3 | DLL3-vHH-T2-N57S-AT12 | 1155 | 6924 | 7293 | 7662 |
| DLL3 | DLL3-vHH-T2-S55G-N57S-AT13 | 1156 | 6925 | 7294 | 7663 |
| DLL3 | DLL3-vHH-T2-D107E-AT14 | 1157 | 6926 | 7295 | 7664 |
| CD20 | CD20-vHH-G100S-AT5-2HCD31 | 1158 | 6927 | 7296 | 7665 |
| CD20 | CD20-vHH-G53A-AT6-2HCD32 | 1159 | 6928 | 7297 | 7666 |
| CD20 | CD20-vHH- AT7-2HCD33 | 1160 | 6929 | 7298 | 7667 |
| CD20 | CD20-vHH-AT8-2HCD34 | 1161 | 6930 | 7299 | 7668 |
| CD20 | CD20-R3CD7-vHH | 1162 | 6931 | 7300 | 7669 |
| BCMA | CD20-R3CD7- AT1 | 1163 | 6932 | 7301 | 7670 |
| BCMA | BCMA-FHVH-93-H32Y-AT1 | 1164 | 6933 | 7302 | 7671 |
| BCMA | BCMA-FHVH-33-Y32H-AT2 | 1165 | 6934 | 7303 | 7672 |
| BCMA | BCMA-FHVH-74-TNSS-AT3 | 1166 | 6935 | 7304 | 7673 |
| CD22 | CD22-FHVH24-D27G-D33S | 1167 | 6936 | 7305 | 7674 |
| CD22 | CD22-FHVH24-V58I | 1168 | 6937 | 7306 | 7675 |
| CD22 | CD22-FHVH24-V58I-T59S | 1169 | 6938 | 7307 | 7676 |
| CD22 | CD22-FHVH24-Y55H-V58I-T59S | 1170 | 6939 | 7308 | 7677 |
| CD22 | CD22-FHVH24-S57N-V58I-T59S | 1171 | 6940 | 7309 | 7678 |
| CD22 | CD22-FHVH24-S57A-V58I-T59S | 1172 | 6941 | 7310 | 7679 |
| CLDN6 | hu-CDLN6-10-LGND | 580 | 6942 | 7311 | 7680 |
| CLDN6 | hu-CDLN6-G51S-AT10-vHH | 581 | 6943 | 7312 | 7681 |
| CLDN6 | hu-CDLN6-D100E-AT11-vHH | 582 | 6944 | 7313 | 7682 |
| CLDN6 | hu-CDLN6-I104V-AT12-vHH | 583 | 6945 | 7314 | 7683 |
| CLDN6 | hu-CDLN6-L97I-AT13-vHH | 584 | 6946 | 7315 | 7684 |
| GPRC5D | GPRC5D-AS300413VH7 | 585 | 6947 | 7316 | 7685 |
| GPRC5D | hu-GPRC5D-AT413-E98D-vHH | 586 | 6948 | 7317 | 7686 |
| GPRC5D | GPRC5D-LGND-AS302399VH4 | 587 | 6949 | 7318 | 7687 |
| GPRC5D | hu-GPRC5D-AT2399-A99S-vHH | 588 | 6950 | 7319 | 7688 |
| GPRC5D | hu-GPRC5D-AT2399-A57S-vHH | 589 | 6951 | 7320 | 7689 |
| GPRC5D | GPRC5D-LGND-AS302399 | 590 | 6952 | 7321 | 7690 |
| GPRC5D | GPRC5D-AT2399-T108S-vHH | 591 | 6953 | 7322 | 7691 |
| GPRC5D | GPRC5D-AT2399-S55N-vHH | 592 | 6954 | 7323 | 7692 |
| GPRC5D | GPRC5D-AS302558VH6 | 593 | 6955 | 7324 | 7693 |
| GPRC5D | hu-GPRC5D-AT2558-E56D-vHH | 594 | 6956 | 7325 | 7694 |
| CD33 | CD33-huvHH-AT873-G30S | 595 | 6957 | 7326 | 7695 |
| CD33 | CD33-huvHH-AT873-G30S-R99K | 596 | 6958 | 7327 | 7696 |
| CD33 | CD33-huvHH-AT873-G30S-T57R- | 597 | 6959 | 7328 | 7697 |
| | R99K | | | | |
| CD33 | CD33-vHH-AT264-K99R | 598 | 6960 | 7329 | 7698 |
| CD33 | CD33-vHH-AT264-V50A-R57T | 599 | 6961 | 7330 | 7699 |
| CD33 | CD33-vHH-AT264-V50A-R57T-K99R | 600 | 6962 | 7331 | 7700 |
| CLL1 | CLL1-IG6-vHH | 601 | 6963 | 7332 | 7701 |
| CLL1 | CLL1-IG6-A30S-AT-vHH | 602 | 6964 | 7333 | 7702 |
| CLL1 | CLL1-2H3-vHH | 603 | 6965 | 7334 | 7703 |
| CLL1 | CLL1-2H3- S27D-AT-vHH | 604 | 6966 | 7335 | 7704 |
| CLL1 | CLL1-2H3-I28T-AT-vHH | 605 | 6967 | 7336 | 7705 |
| CLL1 | CLL1-1H1-WT-vHH | 606 | 6968 | 7337 | 7706 |
| CLL1 | CLL1-1H1-N30S-AT-vHH | 607 | 6969 | 7338 | 7707 |

TABLE 5
Results of JNG activation and ELISA with different tag constructs
TABLE 5 Results of JNG activation and ELISA with different tag construct

| | | | JNG ASSAY (%) | | | | | | |
|---|---|---|---|---|---|---|---|---|---|
| SUPERNATANTS | | | | (SEQ | (SEQ | SEQ | ELISA | | |
| | SEQ | SEQ | | ID NO: | ID NO: | ID NO: | SEQ | SEQ | SEQ |
| | ID NO | ID | JNG-P | 2448 | 2407 | 2448 | ID NO: | ID NO: | ID NO: |
| CLONE ID NO | (DNA) | (PRT) | (%) | (%) | (%) | (%) | 3632) | 3639 | 3633 |
| JNG-P, control | | | 0.08 | 0.09 | 0.27 | 6.70 | | | |
| Supernatant | | | | | | | | | |
| 020224-BBaZ2 | 5075 | 2625 | 0.06 | 25.47 | 13.77 | | | | |
| 020224-BBbA1 | 5076 | 2626 | 0.08 | 15.11 | 15.63 | | 0.121 | 0.436 | 0.071 |
| 020224-BBbB2 | 5077 | 2627 | 0.00 | 25.20 | 14.12 | | 0.195 | 0.617 | 0.085 |
| 020224-BBbC1 | 5078 | 2628 | 0.04 | 10.72 | 8.11 | | 0.194 | 0.993 | 0.068 |
| 020224-BBbD2 | 5079 | 2629 | 0.00 | 6.24 | 4.53 | | 0.082 | 0.215 | 0.061 |
| 020224-BBbE2 | 5080 | 2630 | 0.02 | 8.75 | 4.97 | | 0.079 | 0.179 | 0.070 |
| 020224-BBbF1 | 5081 | 2631 | 0.00 | 40.47 | 23.91 | | 0.124 | 0.352 | 0.072 |
| 020224-BBbH2 | 5082 | 2632 | 0.07 | 36.19 | 21.76 | | 0.595 | 1.307 | 0.173 |
| 020224-BBbK1 | 5083 | 2633 | 0.06 | 9.16 | 7.63 | | 0.084 | 0.146 | 0.062 |
| 020224BBbL2 | 5084 | 2634 | 0.04 | 43.98 | 28.42 | | 0.500 | 0.708 | 0.252 |
| 020224-BBbM1 | 5085 | 2635 | 0.02 | 5.23 | 2.65 | | 0.249 | 0.636 | 0.093 |
| 020224-BBbN1 | 5086 | 2636 | 0.04 | 17.49 | 9.60 | | 0.239 | 0.534 | 0.104 |
| 020224-BBbO2 | 5087 | 2637 | 0.04 | 0.21 | 0.35 | | 0.080 | 0.294 | 0.063 |
| 020224-BBbP1 | 5088 | 2638 | 0.04 | 22.81 | 13.01 | | 0.533 | 1.333 | 0.143 |
| 020224-BBbQ1 | 5089 | 2639 | 0.06 | 25.52 | 11.74 | | 0.091 | 0.179 | 0.061 |
| 020224-BBbS2 | 5090 | 2640 | 0.04 | 31.62 | 23.85 | | 0.720 | 1.334 | 0.258 |
| 020224-BBbT1 | 5091 | 2641 | 0.06 | 12.81 | 11.49 | | 0.967 | 1.271 | 0.272 |
| 021924-BBeA2 | 5092 | 2642 | 0.32 | 22.55 | 23.08 | | 0.436 | 0.950 | 0.385 |
| 031124-BBeR1 | 5093 | 2643 | 0.22 | 36.81 | 16.24 | 57.2 | 0.591 | 0.179 | 0.310 |
| 031124-BBeS1 | 5094 | 2644 | 0.18 | 51.84 | 13.31 | 47.6 | 0.109 | 0.368 | 0.191 |
| 031124-BBeT1 | 5095 | 2645 | 0.24 | 52.12 | 11.18 | 46.1 | 0.102 | 0.092 | 0.131 |
| 031124-BBeW1 | 5096 | 2646 | 0.32 | 22.55 | 9.85 | | | | |
| 031124-BBeW2 | 5097 | 2647 | 0.29 | 18.56 | 9.58 | | | | |
| 031124-BBeW3 | 5098 | 2648 | 0.24 | 23.27 | 8.70 | | | | |
| 031124-BBeW6 | 5099 | 2649 | 0.27 | 15.30 | 6.03 | | | | |
| 031124BBeX1 | 5100 | 2650 | 0.17 | 28.46 | 16.36 | | | | |
| 031124BBeX2 | 5101 | 2651 | 0.29 | 27.37 | 13.48 | | | | |
| 031124BBeX3 | 5102 | 2652 | 0.18 | 38.76 | 22.06 | | | | |
| 031124BBeX4 | 5103 | 2653 | 0.19 | 29.18 | 16.10 | | | | |
| 031124-BBeY1 | 5104 | 2654 | 0.27 | 21.86 | 9.89 | | | | |
| 031124-BBeY2 | 5105 | 2655 | 0.19 | 19.41 | 11.82 | | | | |
| 031124-BBeY3 | 5106 | 2656 | 0.05 | 8.80 | 3.91 | | | | |
| 031124-BBeY4 | 5107 | 2657 | 0.19 | 26.71 | 10.84 | | | | |
| 031124-BBeY5 | 5108 | 2658 | 0.00 | 27.36 | 9.96 | | | | |
| 031124BBeW4 | 5109 | 2659 | 0.29 | 24.33 | 8.17 | | | | |
| 031124-BBeX5 | 5110 | 2660 | 0.07 | 22.35 | 9.47 | | | | |
| 031124BBeW5 | 5111 | 2661 | 0.24 | 23.53 | 8.32 | | | | |
| 031124-BBeX6 | 5112 | 2662 | 0.30 | 24.38 | 9.92 | | | | |
| 031124-BBeU2 | 5113 | 2663 | 0.00 | 39.46 | 17.64 | 0.30 | 1.062 | 1.011 | 0.566 |
| 031124-BBeV2 | 5114 | 2664 | 0.06 | 3.12 | 1.77 | 4.20 | 0.082 | 0.090 | 0.112 |
| 040524-EZeG1 | 5115 | 2665 | 0.08 | 38.24 | 18.45 | | | 0.080 | 0.143 |
| 040524-EZeH1 | 5116 | 2666 | 0.06 | 34.89 | 9.80 | | 0.311 | 0.427 | 0.152 |
| 040524-EZeJ1 | 5117 | 2667 | 0.08 | 0.52 | 0.44 | | | 0.121 | |
| 040524-EZeK1 | 5118 | 2668 | 0.00 | 0.18 | 0.32 | | 0.080 | 0.091 | 0.077 |
| 040524-EZeJ2 | 5119 | 2669 | 0.82 | 0.81 | 0.33 | | 0.116 | 0.106 | 0.082 |
| 040524-EZeJ3 | 5120 | 2670 | 0.71 | 1.27 | 1.61 | | 0.176 | 0.295 | 0.113 |
| 040524-EZeJ4 | 5121 | 2671 | 0.92 | 1.71 | 3.90 | | | | |
| 040524-EZeJ6 | 5122 | 2672 | 0.74 | 0.91 | 0.55 | | 0.165 | 0.132 | 0.105 |
| 040524-EZeJ7 | 5123 | 2673 | 0.89 | 0.77 | 0.79 | | 0.116 | 0.145 | 0.074 |
| 040524-EZeK5 | 5126 | 2676 | 0.68 | 0.64 | 0.20 | | 0.078 | 0.102 | 0.075 |
| 040524-EZeK6 | 5127 | 2677 | 0.72 | 0.83 | 0.24 | | 0.080 | 0.092 | 0.067 |
| 040524-EZeK7 | 5128 | 2678 | 0.78 | 0.86 | 0.15 | | 0.089 | 0.099 | 0.076 |
| 040524-EZeK9 | 5130 | 2680 | 0.68 | 0.79 | 0.09 | | 0.085 | 0.174 | 0.070 |
| 040524-EZeK10 | 5131 | 2681 | 0.91 | 0.69 | 0.24 | | 0.079 | 0.124 | 0.069 |
| 041024-EZeJ1 | 5134 | 2684 | 0.23 | 7.72 | 2.48 | | 0.275 | 0.173 | 0.114 |
| 041024-EZeJ3 | 5135 | 2685 | 0.26 | 0.33 | | | 0.097 | 0.108 | 0.084 |
| 041024-EZeJ4 | 5136 | 2686 | 0.18 | 1.54 | 0.30 | | 0.188 | 0.182 | 0.111 |
| 041024-EZeJ7 | 5138 | 2688 | 0.36 | 2.23 | 0.48 | | 0.199 | 0.214 | 0.110 |
| 041024-EZeJ9 | 5139 | 2689 | 0.25 | 0.22 | | | 0.104 | 0.106 | 0.089 |
| 041024-EZeJ10 | 5140 | 2690 | 0.42 | 34.8 | 8.56 | 36.1 | | | |
| 041024-EZeK4 | 5143 | 2693 | 0.25 | | 0.38 | | 0.094 | 0.102 | 0.082 |
| 041024-EZeK8 | 5147 | 2697 | 0.34 | | 0.37 | | 0.092 | 0.102 | 0.078 |
| 041024-EZeK9 | 5148 | 2698 | 0.28 | | 0.15 | | 0.094 | 0.106 | 0.075 |
| 041024-EZeK10 | 5149 | 2699 | 0.29 | | 0.36 | | 0.092 | 0.092 | 0.076 |
| 041924-BBhA1 | 5150 | 2700 | 0.26 | | 1.05 | | | | |
| 041924-BBhA2 | 5151 | 2701 | 0.25 | | 0.19 | | 0.089 | 0.093 | 0.075 |
| 041924-BBhA3 | 5152 | 2702 | 0.28 | | 0.46 | | 0.122 | 0.108 | 0.083 |
| 041924-BBhA4 | 5153 | 2703 | 0.20 | | 0.29 | | 0.095 | 0.102 | 0.082 |
| 041924-BBhA5 | 5154 | 2704 | 0.30 | | 0.37 | | 0.092 | 0.107 | 0.082 |
| 041924BBhA10 | 5155 | 2705 | 0.33 | | 0.34 | | 0.085 | 0.100 | 0.078 |
| 041924BBhA22 | 5160 | 2710 | 0.17 | | 0.28 | | 0.101 | 0.102 | 0.096 |
| 050524-EZqA1 | 5188 | 2738 | | | | 0.10 | 0.070 | 0.132 | 0.071 |
| 050524-EZqE2 | 5190 | 2740 | | | | 0.21 | 0.085 | 0.103 | 0.076 |
| 050524-EZqF1 | 5192 | 2742 | | | | 53.8 | 0.706 | 0.105 | 0.428 |
| 050524-EZqF3 | 5193 | 2743 | | | | 44.3 | 0.522 | 0.083 | 0.178 |
| 050524-EZqG1 | 5194 | 2744 | | | | 7.65 | 0.174 | 0.109 | 0.073 |
| 050524-EZqH2 | 5195 | 2745 | | | | 0.13 | 0.093 | 0.184 | 0.075 |
| 050524-EZqK1 | 5199 | 2749 | 0.00 | 41.97 | 49.11 | 25.4 | 0.641 | 0.433 | 0.379 |
| 050524-EZqN2 | 5200 | 2750 | | | | 0.09 | 0.088 | 0.099 | 0.080 |
| 050524-EZqB3 | 5203 | 2753 | 0.11 | 0.08 | 0.01 | | 0.081 | 0.099 | 0.084 |
| 050524-EZqB6 | 5205 | 2755 | 0.15 | 0.13 | 0.1 | | 0.075 | 0.134 | 0.073 |
| 050524-EZqB7 | 5206 | 2756 | 0.16 | 0.11 | 0.04 | | 0.086 | 0.100 | 0.102 |
| 050524-EZqB9 | 5208 | 2758 | 0.2 | 0.11 | 0.07 | | 0.085 | 0.105 | 0.085 |
| 050524-EZqB1 | 5209 | 2759 | 0.3 | 0.11 | 0.02 | | 0.089 | 0.117 | 0.075 |
| 050524-EZqB1 | 5210 | 2760 | 0.19 | 0.1 | 0.12 | | 0.085 | 0.100 | 0.077 |
| 050524-EZqF8 | 5223 | 2773 | 0.13 | 26.6 | 16.71 | | 0.271 | 0.108 | 0.173 |
| 050524-EZqF9 | 5224 | 2774 | 0.16 | 0.15 | 0.08 | | 0.131 | 0.093 | 0.084 |
| 050524-EZqJ8 | 5236 | 2786 | 0.25 | 0.09 | 0.05 | | 0.077 | 0.100 | 0.075 |
| 050524-EZqK2 | 5237 | 2787 | 0.04 | 0.09 | 0.05 | | 0.102 | 0.094 | 0.078 |
| 050524-EZqK5 | 5240 | 2790 | 0.14 | 0.19 | 0.08 | | 0.110 | 0.093 | 0.077 |
| 050524-EZqK7 | 5242 | 2792 | 0.25 | 0.13 | 0.05 | | 0.119 | 0.138 | 0.082 |
| 050524-EZqK8 | 5243 | 2793 | 0.17 | 0.18 | 0.07 | | 0.082 | 0.133 | 0.067 |
| 050524-EZqN9 | 5251 | 2801 | 0.14 | 0.12 | 0.06 | | 0.085 | 0.107 | 0.085 |
| 050524-EZqB17 | 5253 | 2803 | 0 | 0.06 | 0.03 | | 0.079 | 0.134 | 0.072 |
| 050524-EZqF13 | 5266 | 2816 | 0.07 | 1.74 | 1.27 | | 0.156 | 0.080 | 0.095 |
| 050524-EZqH13 | 5273 | 2823 | 0 | 4.86 | 6.93 | | | | |
| 050524-EZqH15 | 5274 | 2824 | 0 | 0.21 | 0.1 | | 0.089 | 0.105 | 0.085 |
| 050524-EZqH16 | 5275 | 2825 | 0 | 0.13 | 0.03 | | 0.095 | 0.326 | 0.071 |
| 050524-EZqN11 | 5289 | 2839 | 0.04 | 0.08 | 0.1 | | 0.084 | 0.163 | 0.076 |
| 050524-EZqN17 | 5292 | 2842 | 0.11 | 0.03 | 0.03 | | 0.087 | 0.102 | 0.083 |
| 051524-EZqK6 | 5314 | 2864 | | 0.18 | | | 0.081 | 0.099 | 0.060 |
| 051524-EZqK7 | 5315 | 2865 | | 14.15 | | | 0.131 | 0.495 | 0.064 |
| 051524-EZqK8 | 5316 | 2866 | | 25.07 | | | 0.145 | 0.106 | 0.073 |
| 051524-EZqN1 | 5317 | 2867 | | 0.05 | | | 0.100 | 0.083 | 0.076 |
| 051524-EZqF3 | 5338 | 2888 | | 0.13 | | | 0.086 | 0.126 | 0.078 |
| 051524-EZqH2 | 5343 | 2893 | | 0.19 | | | 0.085 | 0.115 | 0.082 |
| 051524-EZqJ8 | 5355 | 2905 | | 0.08 | | | 0.099 | 0.083 | 0.075 |
| 052924-EZqB2 | 5356 | 2906 | 0.05 | 0.00 | | | 0.084 | 0.181 | 0.072 |
| 052924-EZqB4 | 5357 | 2907 | 0.05 | 17.00 | | | 0.290 | 0.085 | 0.184 |
| 052924-EZqB5 | 5358 | 2908 | 0.03 | 0.09 | | | 0.087 | 0.096 | 0.074 |
| 052924-EZqB7 | 5359 | 2909 | 0.07 | 0.13 | | | 0.080 | 0.098 | 0.069 |
| 052924-EZqF2 | 5368 | 2918 | 0.03 | 26.36 | | | 0.239 | 0.096 | 0.174 |
| 052924-EZqF6 | 5372 | 2922 | 0.08 | 0.26 | | | 0.129 | 0.097 | 0.103 |
| 052924-EZqF7 | 5373 | 2923 | 0.00 | 0.20 | | | 0.131 | 0.089 | 0.094 |
| 052924-EZqF10 | 5374 | 2924 | 0.03 | 0.23 | | | 0.169 | 0.095 | 0.111 |
| 052924-EZqH1 | 5375 | 2925 | 0.03 | 0.06 | | | 0.075 | 0.161 | 0.077 |
| 052924-EZqH2 | 5376 | 2926 | 0.03 | 0.03 | | | 0.081 | 0.525 | 0.075 |
| 052924-EZqH3 | 5377 | 2927 | 0.03 | 25.23 | | | 0.391 | 0.402 | 0.284 |
| 052924-EZqH4 | 5378 | 2928 | 0.05 | 0.09 | | | 0.087 | 0.584 | 0.077 |
| 052924-EZqH5 | 5379 | 2929 | 0.05 | 0.13 | | | 0.079 | 0.149 | 0.073 |
| 052924-EZqH6 | 5380 | 2930 | 0.03 | 0.00 | | | 0.089 | 0.132 | 0.076 |
| 052924-EZqH7 | 5381 | 2931 | 0.03 | 0.00 | | | 0.079 | 0.438 | 0.076 |
| 052924-EZqH8 | 5382 | 2932 | 0.03 | 0.13 | | | 0.081 | 0.111 | 0.071 |
| 052924-EZqH9 | 5383 | 2933 | 0.05 | 0.03 | | | 0.087 | 0.144 | 0.070 |
| 052924-EZqK1 | 5391 | 2941 | 0.03 | 0.18 | | | 0.120 | 0.236 | 0.076 |
| 052924-EZqN1 | 5397 | 2947 | 0.03 | 0.03 | | | 0.082 | 0.225 | 0.076 |
| 052924-EZqN2 | 5398 | 2948 | 0.03 | 0.03 | | | 0.080 | 0.134 | 0.078 |
| 052924-EZqN4 | 5399 | 2949 | 0.00 | 0.07 | | | 0.096 | 0.224 | 0.082 |
| 052924-EZqN9 | 5400 | 2950 | 0.03 | 0.10 | | | 0.081 | 0.213 | 0.085 |
| 052924-EZqK6 | 5402 | 2952 | 0.05 | 0.10 | | | 0.083 | 0.171 | 0.070 |
| 052924-EZqN6 | 5406 | 2956 | 0.06 | 0.06 | | | 0.075 | 0.110 | 0.065 |
| 052924-EZqN7 | 5407 | 2957 | 0.03 | 0.10 | | | 0.069 | 0.103 | 0.065 |
| 052924-EZqN8 | 5408 | 2958 | 0.03 | 0.10 | | | 0.080 | 0.118 | 0.077 |

TABLE 6
Jurkat NFA GFP (JNG) ASSAY

| | | | | SEQ | |
|---|---|---|---|---|---|
| | | | | ID NO | |
| Target | Type | Tag | Clone Name | (DNA) | JNG Assay |
| CD19 | | (−) | 012424-EZqJ1 | 4754 | RAJI 0.5+; Jeko+/− |
| TAJ | | (−) | 011624-EZkV1 | 4755 | Hutu-80 0.5+; |
| CD79b | | (−) | 011624-EZkX1 | 4756 | Jeko 0.5+; Daudi 0.5+ |
| CD19 | | (−) | 012424-EZqB1 | 4757 | RAJI 2+; Jeko 1.5+; Daudi |
| | | | | 2+ | |
| CD19 | | (+) | 012424-EZqC1 | 4758 | RAJI 1.5+; Daudi 2+ |
| CD19 | | (−) | 012424-EZqD1 | 4759 | RAJI 3+; Daudi 4.5++ |
| CD19-BCMA | | (+) | 012424-EZqE1 | 4760 | RAJI 3+; Daudi 4+ |
| CD19 | | (+) | 011924-BBaO1 | 4761 | RAJI 2.5+; Daudi 2+ |
| CD19-BCMA | | (−) | 011924-BBaP1 | 4762 | RAJI 2.5+; Daudi 2+ |
| BCMA | | (+) | 011924-BBaE1 | 4763 | H929 1.5+; MM.1S 2.5+; |
| CD79b | | (−) | 011624-EZmE1 | 4764 | RAJI+/−; Daudi+/− |
| CD19 | | (−) | 012424-EZoA1 | 4765 | RAJI+; Jeko+; Daudi 2+ |
| CD19 | | (+) | 012424-EZoB1 | 4766 | RAJI+/−; Daudi+/− |
| CD19 | | (+) | 012424-EZoC1 | 4767 | RAJI 0.5+; Daudi+/− |
| CD19 | | (+) | 012424-EZoD1 | 4768 | RAJI 1.5+; Jeko+; Daudi+ |
| CD19 | | (+) | 012424-EZoF1 | 4769 | RAJI+/−; Daudi 0.5+ |
| CD19 | | (+) | 012424-EZoG1 | 4770 | RAJI 0.5+; Daudi+ |
| CD19 | | (+) | 012424-EZoH1 | 4771 | RAJI+/−; ; Daudi+/− |
| CD19 | | (+) | 012424-EZoM1 | 4774 | RAJI 0.5+; Daudi+ |
| BCMA | | (+) | 012424-EZoP1 | 4777 | RAJI 0.5+; Daudi+ |
| BCMA | | (+) | 012424-EZoQ1 | 4778 | Jeko+/−; Daudi+ |
| CD19 | | (+) | 012424-EZoR1 | 4779 | Jeko+/−; Daudi+/− |
| CD19 | | (+) | 012424-EZoS1 | 4780 | RAJI+/− |
| CD19 | | (+) | 012424-EZoT1 | 4781 | RAJI 0.5+; Daudi 0.5+ |
| CD19 | | (+) | 012424-EZoU1 | 4782 | RAJI 1.5+; Daudi 1.5+ |
| CD19 | | (+) | 012424-EZoW1 | 4783 | RAJI+/− |
| CD19 | | (+) | 012424-EZoX1 | 4784 | RAJI+; Daudi+ |
| CD19 | | (+) | 012424-EZoZ1 | 4785 | RAJI+; Daudi 1.5+ |
| CD19 | | (+) | 012424-EZpA1 | 4786 | Jeko+/−; Daudi+/− |
| CD19 | | (+) | 012424-EZpB1 | 4787 | RAJI 1.5+; Daudi 2+ |
| CD19 | | (+) | 012424-EZpC1 | 4788 | RAJI 1.5+; J Daudi 2+ |
| BCMA | | (+) | 012424-EZpF1 | 4789 | H929 1.5+; L363+; |
| CD19 | | (+) | 012424-EZpH1 | 4790 | RAJI 0.5+; Daudi 0.5+ |
| CD19 | | (+) | 012424-EZqH1 | 4791 | RAJI 0.5+; Daudi+/− |
| BCMA | | (+) | 011924-BBaJ1 | 4792 | RPMI 8226 2+ |
| CD79b | | (−) | 011924-BBaL1 | 4793 | RAJI+; Jeko+; Daudi 1.5+ |
| CD19 | | (−) | 020224-BBaU1 | 4794 | RAJI 4+; Daudi 1.5+ |
| CD19 | | (+) | 020224-BBaV1 | 4795 | RAJI 4+; Jeko+ |
| CD79b | | (+) | 012424-JFL2 | 4796 | RAJI+; Jeko 0.5+; |
| CD19 | | C(+) | 020824-BBcH1 | 4797 | RAJI 3.5+; Daudi 2+ |
| CD19 | | C(+) | 020824-BBci2 | 4798 | RAJI 4+; Daudi 1.5+ |
| CD19 | | C(+) | 020824-BBcJ2 | 4799 | RAJI 3.5+; Daudi 2+ |
| BCMA | | (+) | 020824-JScE1 | 4801 | RAJI 1.5+; MM.1S 2+ |
| CD19 | | (+) | 020824-JSbX2 | 4802 | RAJI 4.5+; Daudi 2+ |
| CD19-BCMA | | (+) | 022124-EZuE1 | 4803 | RAJI+; L363 0.5+; |
| CD19 | | (+) | 022124-EZuB1 | 4804 | RAJI+; Jeko 0.5+; Daudi+ |
| CD19 | | (+) | 022124-EZuF1 | 4805 | RAJI 2+; Jeko+; Daudi 2+ |
| CD19-CD22 | | (+) | 022724-EZwA1 | 4806 | RAJI 2.5+; Daudi 2.5+ |
| CD19 | | (−) | 022724-EZwK1 | 4807 | RAJI 0.5+; Daudi+ |
| CD19 | | (+) | 022724-EZwM1 | 4808 | RAJI 2.5+; Daudi 2.5+ |
| CD19 | | (+) | 022724-EZwN1 | 4809 | RAJI 0.5+; Daudi+ |
| CD19 | | (+) | 022724-EZwO1 | 4810 | RAJI+; Jeko+; Daudi 1.5+ |
| CD19 | | (+) | 022724-EZwS1 | 4811 | RAJI+; Jeko 0.5+; Daudi+ |
| CD19 | | (+) | 022724-EZwT1 | 4812 | RAJI 0.5+; Jeko+; Daudi+ |
| CD19 | | (+) | 022724-EZwU1 | 4813 | RAJI+/− |
| CD19 | | (−) | 022724-EZxF1 | 4814 | RAJI 0.5+; |
| BCMA | | (−) | 022824-EZyC1 | 4815 | MM.1S 1.5+; |
| BCMA | | (−) | 022824-EZyF1 | 4816 | RAJI 0.5+; L363 0.5+; MM.1S 1.5+; |
| BCMA | | (−) | 022824-EZyH1 | 4817 | L363+; MM.1S 2+; |
| CD19 | | (−) | 022924-JSdC1 | 4818 | RAJI+ |
| CD19 | | (+) | 022924-JSdB2 | 4819 | RAJI 3+ |
| CD19 | | (+) | 022924-JSdA4 | 4820 | RAJI 0.5+; Daudi 0.5+ |
| CD19 | | (+) | 022924-JSdA5 | 4821 | RAJI 0.5+; Daudi+ |
| CD19 | | (+) | 022924-JSdA8 | 4822 | RAJI+/−Daudi+/− |
| CD19 | | (+) | 022924-JSdA10 | 4823 | RAJI+/−; Daudi+/− |
| CD19 | | (+) | 022924-JSdA11 | 4824 | RAJI 1.5+; Daudi 1.5+ |
| CD19 | | (+) | 022924-JSdA12 | 4825 | RAJI 2+; Jeko 2+; |
| CD19 | | (+) | 022924-JSdA13 | 4826 | RAJI+/−; Daudi+/− |
| CD19 | | (+) | 022924-JSdA14 | 4827 | RAJI+/−; Daudi+/− |
| CD79b | | (+) | 011624-EZgE1 | 4828 | RAJI 1.5+; Daudi 1.5+ |
| CD79b | | (−) | 011624-EZgA1 | 4829 | RAJI 2+; Daudi 2+ |
| CD79b | | (−) | 112523-EZsD1 | 4830 | RAJI 2+; Daudi 2.5+ |
| CD79b | | (−) | 120323-EZwA1 | 4831 | RAJI+/−; Jeko 0.5+ |
| STEAP2 | | (−) | 022124-BBdC1 | 4832 | LnCaP+ |
| IL13Ra2 and Her2 | | (+) | 031124-EZzG1 | 4833 | U87MG 0.5+ |
| CD19 | | (−) | 031124-EZzH1 | 4834 | RAJI+ |
| CLDN18.2 | | (+) | 031124-EZzM1 | 4835 | NUGC4+/−; KATOIII+/− |
| CLDN18.2 | | (+) | 031124-EZzN1 | 4836 | NUGC4+/−; KATOIII+/− |
| CLDN18.2 | | (+) | 031124-EZzO1 | 4837 | NUGC4+/−; KATOIII+/− |
| STEAP2 | | (+) | 031124-EUM1 | 4838 | LnCaP+ |
| CLDN18.2 | | (+) | 031124-EUN1 | 4839 | NUGC4 0.5+; KATOIII+ |
| CLDN6 | | (+) | 031124-EUQ1 | 4840 | OVCAR3+/−; OV90+/− |
| PSCA | | (−) | 031124-EUS1 | 4842 | H1993+/−; N2126+/− |
| PSMA | | (−) | 031124-EUU1 | 4843 | LnCaP 0.5+ |
| STEAP2 | | (−) | 031124-EUaB1 | 4844 | LnCaP+ |
| CLDN18.2 | | (+) | 031124-EUaC1 | 4845 | NUGC4+/−; KATOIII+/− |
| CLDN18.2 | | (+) | 031124-EUaD1 | 4846 | NUGC4 0.5+; KATOIII |
| | | | | | 0.5+ |
| CD19 | | (+) | 042122-SLbM4 | 4847 | RAJI 2+; RAJI CD19KO |
| | | | | | 1+ |
| STEAP2 | | | 031124-BBeH1 | 4848 | LnCaP 1.5+ |
| MSLN | | (+) | 031124-BBeM1 | 4849 | OVCAR3 1.5+; Skov3+ |
| BCMA | | (+) | 031124-BBeQ1 | 4850 | L363+; MM.1S 2+ |
| STEAP2 | | (+) | 022824-EZyN1 | 4851 | LnCaP 2+ |
| STEAP2 | | (+) | 022824-EZyO1 | 4852 | LnCaP 3+ |
| CLD18A2 | | (+) | 022824-EZyQ1 | 4853 | NUGC4 1.5+ |
| CLD18A2 | | (+) | 022824-EZyR1 | 4854 | NUGC4 0.5+; KATOIII+/− |
| CD19 | | | 031724-BBfF1 | 4855 | RAJI 2+ |
| CD79b | | | 012424-JFI3 | 4856 | Jeko+/−; Daudi+/− |
| CD79b | | | 020824-JScG2 | 4857 | RAJI 2+; Daudi 2.5+ |
| PSMA | | | 010824-PBB3 | 4858 | LnCaP 1.5+ |
| CD19 | | | 021924-BBdY2 | 4859 | RAJI 3.5+ |
| STEAP2 | | | 022124-BBdC1 | 4860 | LnCaP 1.5+ |
| MPL | | | 102023-PBU3 | 4861 | HEL 2+ |
| CD19 | | | 021924-BBdT1 | 4862 | RAJI+/− |
| CD19 | | | 021924-BBdX1 | 4863 | RAJI 3+ |
| CD19 | | | 032124-EZbD1 | 4864 | RAJI 2+ |
| CD19 | | | 032124-EZbE1 | 4865 | RAJI 2.5+ |
| CD19 | | | 032124-EZbH1 | 4866 | RAJI 0.5+ |
| CD19-BCMA | | | 032124-EZbJ1 | 4867 | RAJI 4.5+ |
| CD19-CD20 | | | 032124-EZbK1 | 4868 | RAJI 4+ |
| CD19-BCMA | | | 032124-EZbN1 | 4869 | RAJI 1.5+ |
| CD19 | | | 032724-JSfN1 | 4870 | RAJI+; Jeko 0.5+ |
| CLDN6 | | | 022824-EZyP1 | 4871 | OVCAR3 3+; OV90 1.5+ |
| CLDN18.2 | | | 022824-EZyS1 | 4872 | NUGC4 2+; KATOIII+ |
| CLDN18.2 | | | 032724-EZbP1 | 4873 | NUGC4 2.5+; KATOIII+ |
| CD19 | | | 032724-EZbQ1 | 4874 | RAJI+/−; MM.1S+/− |
| PSMA | | | 032724-EZbS1 | 4875 | LnCaP 5+ |
| CD19-BCMA | | | 032724-EZbU1 | 4876 | RAJI 2+; L363 1.5+; |
| BCMA | | | 031824-EZaA1 | 4877 | MM.1S 0.5+; U266 0.5+ |
| CD19 | | | 031824-EZaB1 | 4878 | RAJI 2.5+ |
| CD19-CD20 | | | 031824-EZaH1 | 4879 | RAJI 2.5+ |
| BCMA | | | 031824-EZaJ1 | 4880 | MM.1S 2.5+; U266+ |
| CD19 | | | 031824-EZaK1 | 4881 | RAJI+ |
| CD19 | | | 031824-EZaM1 | 4882 | RAJI 2.5+ |
| CD19 | | | 031824-EZaN1 | 4883 | RAJI+ |
| CD19 | | | 031824-EZaO1 | 4884 | RAJI+ |
| CD19 | | | 031824-EZaP1 | 4885 | RAJI 2.5+ |
| CD19 | | | 031824-EZaQ1 | 4886 | RAJI 0.5+ |
| CD19-CD20 | | | 031824-EZaR1 | 4887 | RAJI 5+ |
| CD19 | | | 031824-EZaS1 | 4888 | RAJI 0.5+ |
| CD19 | | | 031824-EZaT1 | 4889 | RAJI+ |
| CD19 | | | 031824-EZaU1 | 4890 | RAJI+ |
| CD19 | | | 031824-EZaV1 | 4891 | RAJI+/− |
| STEAP2 | | | 031124-BBeH1 | 4892 | LnCaP 4+ |
| CLDN18.2 | | | 031124-BBeJ2 | 4893 | NUGC4 1.5+ |
| MSLN | | | 031124-BBeM1 | 4894 | Skov3+; OVCAR3+ |
| CD79b | | | 121723-BBjC1 | 4895 | RAJI 1.5+; Daudi 2+ |
| CD79b | | | 011624-EZfE1 | 4896 | RAJI+; Jeko 0.5+ |
| CD19 | | | 040524-EZcE1 | 4900 | RAJI 2.5+; Jeko 0.5+ |
| CD19-CD22 | | | 040524-EZdJ1 | 4901 | RAJI 2+; Jeko+ |
| CD19 | | | 040524-EZcM1 | 4902 | RAJI 1.5+ |
| PSMA | | | 040524-EZcQ1 | 4903 | LnCaP 0.5+ |
| PSMA | | | 040524-EZcS1 | 4904 | LnCaP 2+ |
| CD19 | | | 040524-EZdK1 | 4905 | RAJI 3+ |
| PSMA | | | 040524-EZdO1 | 4906 | LnCaP+ |
| PSMA | | | 040524-EZdP1 | 4907 | LnCaP+/− |
| BCMA | | | 032724-JSfS3 | 4908 | RAJI+; L363 2+ |
| CD19 | | | 022124-EZuC1 | 4909 | RAJI 0.5+; Jeko 0.5+ |
| CD19 | | | 022124-EZuH1 | 4910 | RAJI 5+ |
| CD19 | | | 022724-EZwH1 | 4911 | RAJI 0.5+ |
| BCMA | | | 022724-EZwJ1 | 4912 | RAJI 1.5+; L363 3+; |
| CLDN18.2 | | | 022724-EZwR1 | 4913 | NUGC4 0.5+ |
| BCMA | | | 022824-EZyD1 | 4914 | L363 2+; MM.1S 2+ |
| BCMA | | | 022824-EZyE1 | 4915 | MM.1S 0.5+ |
| CD19 | | | 022924-JSdA1 | 4916 | RAJI 2+ |
| CD19 | | | 030124-EUA2 | 4917 | RAJI+ |
| BCMA | | | 022924-PPB2 | 4918 | L363 0.5+; MM.1S 1.5+ |
| CD79b | | | 112923-EZuH2 | 4919 | Jeko 1.5+; Daudi 2.5+ |
| CD19 | | | 040524-EZcF1 | 4920 | RAJI+/− |
| CD19 | | | 040524-EZcH1 | 4921 | RAJI+/− |
| CD19 | | | 040524-EZcJ1 | 4922 | RAJI 1.5+ |
| PSMA | | | 040524-EZcO1 | 4923 | LnCaP+ |
| PSMA | | | 040524-EZcP1 | 4925 | LnCaP 0.5+ |
| PSMA | | | 040524-EZcT1 | 4927 | LnCaP+/− |
| CD19 | | | 040524-EZdA1 | 4929 | RAJI+/− |
| CD19 | | | 040524-EZdB 1 | 4930 | RAJI+/− |
| PSMA | | | 040524-EZdC1 | 4931 | LnCaP 0.5+ |
| PSMA | | | 040524-EZdD1 | 4933 | LnCaP 0.5+ |
| PSMA | | | 040524-EZdE1 | 4935 | LnCaP+/− |
| PSMA | | | 040524-EZdF1 | 4937 | LnCaP 0.5+ |
| PSMA | | | 040524-EZdX1 | 4938 | LnCaP+/− |
| PSMA | | | 040524-EZdY1 | 4939 | LnCaP+/− |
| CD19 | | | 041124-EZgJ1 | 4946 | RAJI+ |
| CD79b | | | 122523-EZdV1 | 4947 | Jeko 1.5+; Daudi 2.5+ |
| CD19 | | | 031124-BBeA1 | 4948 | RAJI CD19 KO 6.5+ |
| CD19 | | | 041624-JSgM1 | 4951 | RAJI+/− |
| CD19 | | | 041624-JSgS2 | 4955 | RAJI+/− |
| PSMA | | | 032724-EZbR5 | 4957 | LnCaP+/− |
| CD19 | | | 040524-EZcD4 | 4960 | RAJI+/− |
| | | | 042524-EZpA1 | 4966 | RAJI 0.5+; Daudi 0.5+ |
| PSMA | | | 040524-EZdN1 | 4967 | LnCaP 4+ |
| CD19 | | | 040524-EZcN2 | 4968 | Daudi 1+; RAJI+/− |
| PSMA | | | 040524-EZdW1 | 4980 | LnCaP 3+ |
| PSMA | | | 040524-EZcU2 | 4981 | LnCaP 4.5+ |
| CD19 | | | 050124-EZpR1 | 4993 | RAJI+/−; Daudi+/− |
| CD19 | | | 050124-EZpS1 | 4994 | RAJI+ |
| CD19-BCMA | | | 050124-EZpQ1 | 4995 | RAJI 1+, MM1s 1.5+ |
| CD19 | | | 050224-EZrB1 | 4996 | RAJI 0.5+ |
| CD19 | | | 042524-EZpA2 | 5004 | RAJI+/− |
| BCMA-CD19 | | | 050124-EZpO1 | 5005 | RAJI 0.5+; MM.1S+ |
| PSMA | | | 051824-EZyF1 | 5006 | LnCaP 6+ |
| PSMA | | | 051824-EZyG1 | 5007 | LnCaP 2.5+ |
| PSMA | | | 051824-EZyH1 | 5008 | LnCaP 3.5+ |
| STEAP2 | CAR | (−) | 110824-EZnN1 | 8704 | LnCaP+ |
| STEAP1 | CAR | (−) | 020725-EZgE1 | 8705 | LnCaP-WT 3+ |
| STEAP1 | CAR | P11 | 020725-EZgF1 | 8706 | LnCaP-WT 1.5+ |
| STEAP1 | CAR | (−) | 020725-EZgG1 | 8707 | LnCaP-WT 0.5+ |
| STEAP1 | CAR | P11 | 020725-EZgH1 | 8708 | LnCaP-WT+/− |
| STEAP1 | CAR | (−) | 041725-TCdD2 | 8709 | LnCaP+/− |
| CD19 | SIR | (−) | 012225-EZeR2 | 8710 | RAJI 0.5+ |
| CD19 | SIR | (−) | 032818-B01-PS | 8711 | RAJI+/− |
| CD19 | SIR | (−) | 032818-C01-PS | 8712 | RAJI+/− |
| CD19 | SIR | (−) | 021025-BBcV1 | 8713 | RAJI+ |
| CD19 | SIR | (−) | 021025-BBcW1 | 8714 | RAJI 0.5+ |
| CD19 | SIR | P11 | 032725-EZsP1 | 8715 | RAJI 2.5+; L363 3.5+; |
| | | | | | U266 5+; MM.1S 4.5+; |
| | | | | | NALM6 3+ |
| CD19 | SIR | P11 | 032725-EZsO1 | 8716 | RAJI 0.5+ |
| CLDN6 | SIR | (−) | 040725-BBfA2 | 8717 | OVCAR3+/−; PA-1 2.5+ |
| GPC3 | SIR | P11 | 052125-AKmD2 | 8718 | HepG2+/− |
| CD20 | zSIR | P8 | 112624-EZqK3 | 8719 | RAJI 0.5+; Jeko+/− |
| CD19 | zSIR | (−) | 030725-BBdY2 | 8720 | RAJI+; NALM6+/−; |
| CD19 | zSIR | (−) | 030725-BBdY2 | 8721 | RAJI 2.5+; NALM6 0.5+ |
| CD19 | zSIR | (−) | 031825-BBeE2 | 8722 | RAJI 2+; NALM6+/− |
| CD19 | zSIR | (−) | 041025-JGH1 | 8723 | RAJI+/−; Jeko 0.5+ |
| BCMA | zSIR | (−) | 050625-EZwF1 | 8724 | MM.1S 0.5+; L363 0.5+ |
| CD19 | z16SAR | (−) | 022725-BBdN2 | 8725 | RAJI 4.5+; Jeko 2.5+ |
| CD19 | z16SAR | (−) | 041025-JGB1 | 8726 | RAJI 3+; Jeko 2+ |
| CD19 | z16SAR | (−) | 050625-EZwA1 | 8727 | RAJI 2+ |
| CD19 | z16SAR | (−) | 050625-EZwB1 | 8728 | RAJI 3+ |
| CD19 | z16SAR | (−) | 050625-EZwD1 | 8729 | RAJI 1.5+ |
| CD79b | z16SAR | (−) | 031825-BBeF2 | 8730 | RAJI+; Jeko+/− |
| CD19 | z16SAR | (−) | 031825-BBeH1 | 8731 | RAJI 2+; Jeko+/− |
| CD19 | z16SAR | (−) | 041025-JGD1 | 8732 | RAJI 2.5+; Jeko 1.5+ |
| CD19 | z16SAR | (−) | 050825-EZxB1 | 8733 | RAJI 1.5+; Jeko 0.5+ |
| CD19 | z16SAR | (−) | 050825-EZxC1 | 8734 | RAJI 1.5+; Jeko 0.5+ |
| CD19 | z16SAR | (−) | 050825-EZxD1 | 8735 | RAJI 2.5+; NALM6 2.5+; |
| | | | | | MM.1S 3.5+; L363 3+ |
| CD19 | z16SAR | (−) | 050825-EZxG1 | 8736 | RAJI 0.5+; Jeko+/− |
| CD19 | z16SAR | (−) | 050825-EZxH1 | 8737 | RAJI 0.5+ |
| CD19 | z16SAR | (−) | 050825-EZxJ1 | 8738 | RAJI 0.5+; NALM6 0.5+; |
| BCMA | z16SAR | P11 | 051625-EZyS1 | 8739 | MM.1S 0.5+; L363+/− |
| CD20 | MC-SAR | (−) | 011225-EZyH1 | 8740 | RAJI+/− |
| ROR1-CD20 | MC-SAR | (−) | 011225-EZzC1 | 8741 | RAJI+/− |
| ROR1-CD20 | MC-SAR | (−) | 011225-EZzE1 | 8742 | RAJI+/− |
| Her2 | MC-SAR | (−) | 011725-EZbO1 | 8743 | Skov3+/− |
| Her2-CDH19 | MC-SAR | (−) | 011725-EZbP1 | 8744 | SK-MEL-31+/− |
| NKG2D-Her2 | MC-SAR | (−) | 011725-EZbV1 | 8745 | Skov3+/− |
| MSLN | MC-SAR | (−) | 012225-EZcO1 | 8746 | OVCAR3+/− |
| CS1 | MC-SAR | (−) | 012225-EZcP1 | 8747 | MM.1S+/− |
| MSLN | MC-SAR | (−) | 012225-EZdW1 | 8748 | OVCAR3+/− |
| CS1 | MC-SAR | (−) | 012225-EZdX1 | 8749 | MM.1S+/− |
| CD123- | MC-SAR | (−) | 011725-AKbR1 | 8750 | L428 0.5+ |
| TGFBR2 | | | | | |
| CD20-CD123 | MC-SAR | (−) | 012825-BBaA1 | 8751 | RAJI+; Jeko+ |
| CD20 | MC-SAR | (−) | 012825-BBaB1 | 8752 | RAJI+; Jeko+ |
| CD20-ROR1 | MC-SAR | (−) | 012825-BBaC1 | 8753 | RAJI+; Jeko 0.5+ |
| ROR1- | MC-SAR | (−) | 012825-BBaD1 | 8754 | Jeko+ |
| TGFBR2 | | | | | |
| CD20-CD123 | MC-SAR | (−) | 012825-BBaE1 | 8755 | RAJI+; Jeko 0.5+; |
| CD20 | MC-SAR | (−) | 012825-BBaF1 | 8756 | RAJI 0.5+; Jeko 0.5+ |
| ROR1-CD20- | MC-SAR | (−) | 012825-BBaG1 | 8757 | RAJI 0.5+; Jeko 0.5+ |
| TGFRB2 | | | | | |
| CD20- | MC-SAR | (−) | 012825-BBaH1 | 8758 | RAJI 0.5+; Jeko+ |
| TGFBR2 | | | | | |
| CD20-CD123 | MC-SAR | (−) | 012825-BBaJ1 | 8759 | RAJI 2+; Jeko 1.5+ |
| CD20 | MC-SAR | (−) | 012825-BBaK1 | 8760 | RAJI+; Jeko+ |
| CD20-ROR1 | MC-SAR | (−) | 012825-BBaL1 | 8761 | RAJI 1.5+ |
| CD19-CS1 | MC-SAR | (−) | 012825-BBaQ1 | 8762 | RAJI 0.5+ |
| CD19-CS1 | MC-SAR | P11 | 012825-BBaR1 | 8763 | RAJI 0.5+; Jeko+/− |
| CD20-CD123 | MC-SAR | (−) | 012825-BBaU1 | 8764 | RAJI+; Jeko+ |
| CD20 | MC-SAR | (−) | 012825-BBaV1 | 8765 | RAJI+; Jeko 0.5+ |
| CD20-ROR1 | MC-SAR | (−) | 012825-BBaW1 | 8766 | RAJI 2+; Jeko 1.5+ |
| CD20- | MC-SAR | (−) | 012825-BBaX1 | 8767 | RAJI 1.5+; Jeko+ |
| TGFBR2 | | | | | |
| CD20-CD123 | MC-SAR | (−) | 012825-BBaY1 | 8768 | RAJI 2+; Jeko+ |
| CD20-ROR1 | MC-SAR | (−) | 012825-BBaZ1 | 8769 | RAJI+; Jeko+ |
| CD20- | MC-SAR | (−) | 012825-BBbA1 | 8770 | RAJI 2+; Jeko+ |
| TGFBR2 | | | | | |
| CD20-CD123 | MC-SAR | (−) | 012825-BBbB1 | 8771 | RAJI+; Jeko+ |
| CD20-ROR1 | MC-SAR | (−) | 012825-BBbC1 | 8772 | RAJI 0.5+; Jeko 0.5+ |
| CD20- | MC-SAR | (−) | 012825-BBbD1 | 8773 | RAJI 1.5+; Jeko+; |
| TGFBR2 | | | | | L428+/−; KG1 0.5+ |
| CD20-CD123 | MC-SAR | (−) | 012825-BBaE1 | 8774 | RAJI+/−; Jeko+/− |
| CD19-CS1 | MC-SAR | (−) | 012825-BBaQ1 | 8775 | RAJI 0.5+ |
| CD19-CS1 | MC-SAR | P11 | 012825-BBaR1 | 8776 | RAJI 0.5+ |
| CD20-CD123 | MC-SAR | (−) | 012825-BBaU1 | 8777 | RAJI+ |
| CD20 | MC-SAR | (−) | 012825-BBaV1 | 8778 | RAJI 0.5+ |
| CD20-ROR1 | MC-SAR | (−) | 012825-BBaW1 | 8779 | RAJI+; Jeko 0.5+ |
| TGFBR2- | MC-SAR | (−) | 020125-BBbK1 | 8780 | RAJI+ |
| CD20 | | | | | |
| CD19-CS1 | MC-SAR | (−) | 021825-EZmN1 | 8781 | RAJI+/− |
| CD19-CS1 | MC-SAR | (−) | 021825-EZmP1 | 8782 | RAJI 0.5+; L363+/− |
| Her2-CDH19 | MC-SAR | (−) | 022025-EZnJ1 | 8783 | Skov3 2+ |
| Her2-NKG2D | MC-SAR | (−) | 022025-EZnK1 | 8784 | Skov3 4+; BT-474 2.5+ |
| CD22 | MC-SAR | (−) | 022025-EZnM1 | 8785 | RAJI+/− |
| CD22-MSLN | MC-SAR | (−) | 022025-EZnN1 | 8786 | RAJI 2+; Jeko 3.5+ |
| CD22-Her2 | MC-SAR | (−) | 031325-EZpO1 | 8787 | BT-474 0.5+; Skov3+ |
| CD19 | MC-SAR | (−) | 022425-EZmF1 | 8788 | RAJI 2.5+ |
| CD19-CS1 | MC-SAR | (−) | 022425-EZmJ1 | 8789 | RAJI 1.5+; U266+ |
| CD19-CS1 | MC-SAR | (−) | 022425-EZmN1 | 8790 | RAJI+; L363 0.5+; |
| CD19-CS1 | MC-SAR | (−) | 022425-EZmO1 | 8791 | RAJI 0.5+; L363+/− |
| CD19 | MC-SAR | (−) | 022425-EZmA2 | 8792 | RAJI 2.5+ |
| CD19 | MC-SAR | (−) | 022425-EZmB2 | 8793 | RAJI 2.5+ |
| CD19 | MC-SAR | (−) | 022425-EZmH2 | 8794 | RAJI 1.5+ |
| CS1 | MC-SAR | (−) | 022425-EZmK2 | 8795 | RAJI 2+; L363+/− |
| CD22-MSLN | MC-SAR | (−) | 022025-EZnW2 | 8796 | RAJI 1.5+; Jeko 0.5+ |
| CD19-CS1 | MC-SAR | (−) | 031825-EZqE1 | 8797 | RAJI 0.5+; MM.1S+ |
| CD19 | MC-SAR | (−) | 051325-BBgT1 | 8798 | RAJI+ |
| CD19 | MC-SAR | (−) | 051325-BBhC1 | 8799 | RAJI 2+; L363 0.5+ |
| CD79b | MC-SAR | (−) | 051525-HWG2 | 8800 | Jeko+/− |
| CD79b | MC-SAR | (−) | 051525-HWH2 | 8801 | RAJI+/− |
| CD79b | MC- | (−) | 011725-EZaF1 | 8802 | RAJI+/−; Jeko+/− |
| | zSAR | | | | |
| CD79b | MC- | (−) | 021825-EZjC1 | 8803 | RAJI 0.5+ |
| | zSAR | | | | |
| CD19 | CAR | (−) | 052224-JSmS2 | 8804 | RAJI+ |
| STEAP2 | CAR | P11- | 051524-EZwA1 | 8805 | LnCaP+/− |
| | | P14(+) | | | |
| STEAP2 | CAR | P11- | 051524-EZwB1 | 8806 | LnCaP+/− |
| | | P14(+) | | | |
| STEAP2 | CAR | P11- | 051524-EZwD1 | 8807 | LnCaP+/− |
| | | P11(+) | | | |
| STEAP2 | CAR | P11- | 051524-EZwF1 | 8808 | LnCaP+/− |
| | | P11(+) | | | |
| STEAP2 | CAR | P11(+) | 051524-EZwG1 | 8809 | LnCaP 3.5+ |
| BCMA | CAR | (−) | 070924-EZkN1 | 8810 | MM.1S 1.5+; RAJI+ |
| BCMA | CAR | (−) | 070924-EZkP1 | 8811 | MM.1S 4+; RAJI 2.5+ |
| BCMA | CAR | (−) | 070924-EZkQ1 | 8812 | MM.1S 1.5+; RAJI+ |
| BCMA | CAR | (−) | 070924-EZkR1 | 8813 | RAJI+; NALM6 0.5+; |
| | | | | | MM.1S 1.5+ |
| BCMA | CAR | (−) | 071224-EZoQ1 | 8814 | MM.1S+; RAJI+/− |
| BCMA | CAR | (−) | 071224-EZoR1 | 8815 | MM.1S 2.5+; RAJI+/− |
| BCMA | CAR | (−) | 071224-EZoS1 | 8816 | MM.1S+/− |
| BCMA | CAR | (−) | 071224-EZoT1 | 8817 | MM.1S+/− |
| BCMA | CAR | (−) | 071224-EZoU1 | 8818 | MM.1S+/− |
| BCMA | CAR | (−) | 071224-EZoY1 | 8819 | MM.1S 2.5+; RAJI+ |
| CD19 | CAR | (−) | 071224-EZnO1 | 8820 | RAJI 3+; Jeko-1 2.5+ |
| CD19 | CAR | (−) | 071224-EZnP1 | 8821 | RAJI 3.5+; Jeko-1 2+ |
| CD19 | CAR | (−) | 071224-EZnS1 | 8823 | RAJI 3.5+; Jeko-1 3+ |
| CD19 | CAR | (−) | 071224-EZnQ1 | 8824 | RAJI+; Jeko-1+ |
| CD20 | CAR | (−) | 071224-EZoV1 | 8825 | RAJI+; Jeko-1+ |
| CD20 | CAR | (−) | 071224-EZoW1 | 8826 | RAJI 1.5+; Jeko-1+ |
| CD20 | CAR | (−) | 070924-EZkS1 | 8827 | RAJI+; Jeko-1+ |
| CD20 | CAR | (−) | 070924-EZkT1 | 8828 | RAJI 1.5+; Jeko-1+ |
| CD22 | CAR | (−) | 071224-EZoX1 | 8829 | RAJI 2+; Jeko-1+/− |
| CD33 | CAR | (−) | 071224-EZnU1 | 8830 | HL60 1.5+ |
| CD33 | CAR | (−) | 071224-EZnX1 | 8831 | HL60 1.5+ |
| CD33 | CAR | (−) | 071224-EZnY1 | 8832 | HL60 2+ |
| MSLN | CAR | (−) | 071224-EZoA1 | 8834 | SKOV-3+/− |
| MSLN | CAR | (−) | 071224-EZoB1 | 8835 | SKOV-3+/− |
| MSLN | CAR | (−) | 071224-EZoC1 | 8836 | SKOV-3+/− |
| MSLN | CAR | (−) | 071224-EZoD1 | 8837 | SKOV-3+/− |
| DLL3 | CAR | (−) | 071224-EZoJ1 | 8838 | SK-MEL-5+/− |
| DLL3 | CAR | (−) | 071224-EZoM2 | 8840 | SK-MEL-5 0.5+ |
| STEAP2 | CAR | (−) | 080224-BBnP1 | 8841 | LnCaP 4.5+ |
| CLDN6 | CAR | (−) | 080224-BBnU1 | 8842 | H1197+/− |
| CLDN6 | CAR | (−) | 080224-BBnW1 | 8843 | OVCAR3 1.5+; OV90 2+; |
| CD19 | SIR | (−) | 091018-E02-AJ | 8844 | Daudi+; Jeko-1 0.5+; Jeko- |
| | | | | | 1 CD22KO 0.5+; Raji+; |
| CD19-CD22 | SIR | (−) | 051824-EZxA1 | 8845 | Raji 1.5+; Raji CD19KO+; |
| CD19-CD22 | SIR | (−) | 051824-EZxC1 | 8846 | Raji 1.5+; Raji CD19KO+; |
| CD19-CD22 | SIR | P13(+) | 051824-EZxD1 | 8847 | Raji+; Raji CD19KO+; |
| CD19-CD22 | SIR | (−) | 051824-EZxB1 | 8848 | Raji+; Raji CD19KO+; |
| | | | | | Raji CD22KO+ |
| CD19-CD22 | SIR | P13(+) | 051824-EZxF1 | 8849 | Raji 1.5+; Raji CD19KO+; |
| | | | | | Raji CD22KO+ |
| CD19-CD22 | SIR | P7(+) | 051824-EZxG1 | 8850 | Raji+; Raji CD19KO 0.5+; |
| | | | | | Raji CD22KO+ |
| CD19-CD22 | SIR | P7(+) | 051824-EZxJ1 | 8851 | Raji 1.5+; Raji CD19KO+; |
| | | | | | Raji CD22KO+ |
| CD19-CD22 | SIR | P7(+) | 051824-EZxK1 | 8852 | Raji 1.5+; Raji CD19KO+; |
| | | | | | Raji CD22KO+ |
| CD19 | SIR | (−) | 052224-JSmB1 | 8853 | RAJI+/− |
| CD19-CD22 | SIR | (−) | 052224-JSmC1 | 8854 | RAJI+/− |
| CD19-CD22 | SIR | P13(+) | 052224-JSmD1 | 8855 | RAJI+/− |
| PSMA | SIR | P8(+) | 051824-EZyH1 | 8856 | LnCaP 1.5+ |
| CD19-CD22 | SIR | P13(+) | 042524-EZnV1 | 8857 | Daudi 1.5+; Jeko-1+; Jeko- |
| | | | | | 1 CD19KO 0.5+ |
| CD19-CD22 | SIR | P13(+) | 042524-EZnX1 | 8858 | Raji 0.5+; Raji CD19KO |
| | | | | | 0.5+; Raji CD22KO+/− |
| CD19-BCMA | SIR | P13(+) | 042524-EZnY1 | 8859 | RAJI+; NALM6 2.5+; |
| | | | | | L363 2+; MM.1S 3+ |
| CD19-CD22 | SIR | P13(+) | 042524-EZoA1 | 8860 | Raji 1.5+; Raji CD19KO |
| | | | | | 1.5+; Raji CD22KO+ |
| CD19-CD22 | SIR | P13(+) | 042524-EZoF1 | 8861 | Raji 0.5+; Raji CD19KO |
| | | | | | 1.5+; Raji CD22KO+ |
| CD19-CD22 | SIR | P13(+) | 042524-EZoH1 | 8862 | Raji+; Raji CD19KO 0.5+; |
| | | | | | Raji CD22KO+ |
| CD19-CD22 | SIR | P13(+) | 042524-EZoC2 | 8863 | Raji 0.5+; Raji CD19KO |
| | | | | | 0.5+; Raji CD22KO 0.5+; |
| CD19 | SIR | (−) | 052324-EZzG1 | 8864 | RAJI 0.5+ |
| CD19-CD22 | SIR | P7(+) | 051824-EZxH1 | 8865 | Raji 3.5+; Raji CD19KO |
| | | | | | 3+; Raji CD22KO 2.5+ |
| CD19-CD22 | SIR | P13(+) | 051824-EZxE1 | 8866 | Raji 3+; Raji CD19KO 3+; |
| | | | | | Raji CD22KO 2.5+; |
| CLD18A2 | SIR | P11- | 051524-EZwT3 | 8867 | KATOIII+/−; NUGC4 0.5+ |
| | | P11(+) | | | |
| CD79b- | SIR | (−) | 060424-EZbA1 | 8868 | RAJI 0.5+; NALM6+/−; |
| BCMA | | | | | L363 0.5+; MM.1S+ |
| CD79b-CD20 | SIR | (−) | 060424-EZbB1 | 8869 | RAJI 0.5+; Jeko+ |
| CD79b-CD22 | SIR | (−) | 060424-EZbC1 | 8870 | RAJI 0.5+; Jeko 0.5+; |
| | | | | | Daudi 0.5+ |
| CD79b | SIR | (−) | 061924-EZdO1 | 8871 | RAJI 2+; Jeko 0.5+; |
| CD79b-CD22 | SIR | (−) | 061924-EZcQ1 | 8872 | RAJI 3.5+; RAJI CD22KO |
| | | | | | 3+; Jeko 0.5+; Daudi 0.5+ |
| BCMA | SIR | P8-C(+) | 061924-EZdA1 | 8873 | L363 1.5+; MM.1S 3.5+ |
| CD19 | SIR | P8-C(+) | 061924-EZdB1 | 8874 | RAJI 3+ |
| BCMA | SIR | P11- | 061924-EZdC1 | 8875 | RAJI+; MM.1S 2.5+ |
| | | C(+) | | | |
| BCMA | SIR | C(+) | 061924-EZdE1 | 8876 | RAJI 0.5+; MM.1S 3+ |
| CD19 | SIR | P11- | 061924-EZdG1 | 8878 | RAJI+ |
| | | P13- | | | |
| | | C(+) | | | |
| CD19 | SIR | P13- | 061924-EZdH1 | 8879 | RAJI 2+; RAJI |
| | | P13- | | | CD19KO+/− |
| | | C(+) | | | |
| CD19 | SIR | P13- | 061924-EZdJ1 | 8880 | RAJI 1.5+; RAJI |
| | | C(+) | | | CD19KO+/− |
| CD19 | SIR | P13- | 061924-EZdK1 | 8881 | RAJI 2+ |
| | | C(+) | | | |
| CD19-CD22 | SIR | P13(+) | 042524-EZoG1 | 8882 | RAJI 2.5+; RAJI CD19 KO |
| | | | | | 3+; RAJI CD22 KO 3+; |
| CD79b | SIR | (−) | 070924-BBjV1 | 8883 | RAJI 0.5+; Jeko+; Daudi+ |
| CD79b | SIR | (−) | 070924-BBkA1 | 8884 | RAJI+; Jeko 1.5+; |
| CD79b | SIR | (−) | 070924-BBkG1 | 8885 | RAJI 2.5+; Daudi 2+ |
| CD20-CD79b | SIR | (−) | 070924-BBjQ1 | 8886 | RAJI 3.5+; Jeko 2+; |
| CD20-BCMA | SIR | C(+) | 070924-BBjS1 | 8887 | RAJI+; Jeko+; Daudi 2.5+ |
| CD20-CD79b | SIR | (−) | 070924-BBjU1 | 8888 | RAJI 3.5+; Daudi 2.5+ |
| BCMA- | SIR | (−) | 070924-BBjX1 | 8889 | RAJI 1.5+; Jeko 2+ |
| CD79b | | | | | |
| CD20-CD79b | SIR | (−) | 070924-BBjY1 | 8890 | RAJI 4+; Daudi 3+ |
| CD79b | SIR | (−) | 070924-BBjZ1 | 8891 | RAJI+; Jeko+; Daudi+ |
| CD79b- | SIR | (−) | 070924-BBkD1 | 8892 | RAJI 1.5+; NALM6+; |
| BCMA | | | | | L363+; MM.1S 2.5+ |
| CD79b-CD20 | SIR | (−) | 070924-BBkE1 | 8893 | RAJI 3.5+; Daudi 3.5+ |
| CD79b | SIR | (−) | 070924-BBkF1 | 8894 | RAJI 2+; Daudi 3.5+ |
| CD19 | SIR | P11(+) | 071024-BBkQ1 | 8895 | RAJI 2.5+ |
| CD19 | SIR | P11(+) | 071024-BBkR1 | 8896 | RAJI 3+ |
| CD19 | SIR | P11(+) | 071024-BBkS1 | 8897 | RAJI 3+ |
| CD19 | SIR | P11(+) | 040524-EZcY2 | 8898 | RAJI 2.5+ |
| CD79b | SIR | (−) | 070924-BBkB2 | 8899 | RAJI+; Daudi 1.5+ |
| BCMA | zSIR | (−) | 061824-CLC1 | 8901 | L363+/−; MM.1S 0.5+ |
| PSMA | zSIR | P11(+) | 061824-CLH1 | 8902 | LnCaP 2+ |
| BCMA | zSIR | (−) | 061824-CLJ1 | 8903 | RAJI 0.5+; MM.1S+ |
| CD19 | zSIR | (−) | 061824-CLN1 | 8904 | RAJI 2.5+ |
| CD19-CD20 | zSIR | (−) | 061824-CLG2 | 8905 | RAJI 2+ |
| CD19 | zSIR | C(+) | 061924-EZcM1 | 8906 | RAJI 0.5+ |
| CD19 | zSIR | (−) | 061924-EZcN1 | 8907 | RAJI 3.5+ |
| BCMA | zSIR | (−) | 062124-CLM2 | 8908 | RAJI+; MM.1S 1.5+ |
| CD19 | zSIR | C(+) | 061924-EZcP2 | 8909 | RAJI 2+ |
| CD19 | zSIR | (−) | 061924-EZcJ2 | 8910 | RAJI+/− |
| CD19 | zSIR | (−) | 061824-CLF5 | 8911 | RAJI+/− |
| CD19 | zSIR | C(+) | 071524-MGH2 | 8913 | RAJI 2+ |
| CD19 | zSIR | C(+) | 071524-MGI1 | 8914 | RAJI+ |
| CD19 | zSIR | C(+) | 071524-MGJ2 | 8915 | RAJI 0.5+ |
| CD19-CD22 | CD16- | P11- | 060424-EZbD1 | 8916 | LnCaP+/− |
| | SAR | C(+) | | | |
| PSMA | CD16- | P11-(+) | 060424-EZbD1 | 8917 | LnCaP 4+ |
| | SAR | | | | |
| PSMA | CD16- | P8-C(+) | 060424-EZbH2 | 8918 | LnCaP 1.5+ |
| | SAR | | | | |
| PSMA | z16SAR | P11(+) | 051824-EZxW1 | 8919 | LnCaP 0.5+ |
| PSMA | z16SAR | P11(+) | 051824-EZxY1 | 8920 | LnCaP 0.5+ |
| PSMA | z16SAR | P11(+) | 051824-EZyA1 | 8921 | LnCaP 0.5+ |
| CD19 | z16SAR | (−) | 061924-EZcO1 | 8922 | RAJI 1.5+ |
| CD19 | z16SAR | (−) | 110323-BBeK2 | 8923 | RAJI 1.5+ |
| CD19 | z16SAR | (−) | 061924-EZcK2 | 8924 | RAJI+ |
| CD79b | HC-SIR | (−) | 061924-EZdN1 | 8925 | RAJI+; Jeko+/− |
| CD79b | HC-SIR | (−) | 061924-EZdP2 | 8926 | RAJI 2+; Jeko+/− |
| CD79b | HC-SIR | (−) | 070924-BBjW1 | 8927 | RAJI+; Jeko+; Daudi 1.5+ |
| BCMA | HC-SIR | C(+) | 070924-EZdD1 | 8928 | L363 2+; MM.1S 3+ |
| CD20-CD79b | HC-SIR | (−) | 070924-BBjR1 | 8929 | RAJI 2+; Jeko+; Daudi 2+ |
| CD79b | HC-SIR | (−) | 070924-BBkC2 | 8930 | RAJI 1.5+; Daudi 1.5+ |
| CD79b | MC-SAR | (−) | 080124-EZtE1 | 8931 | RAJI 0.5+; Daudi+ |
| CD79b | MC-SAR | (−) | 080124-EZtM1 | 8932 | RAJI 0.5+; Daudi 2+ |
| CD79b | MC-SAR | (−) | 080124-EZtO1 | 8933 | RAJI 0.5+; Daudi 2+ |
| CD19-PSMA | MC-SAR | (−) | 092624-JSuA2 | 8934 | LnCaP+/− |
| CD19-BCMA | MC-SAR | (−) | 092624-JSuD1 | 8935 | RAJI 0.5+; MM.1S 0.5+ |
| CD19-BCMA | MC-SAR | (−) | 092624-JSuB1 | 8936 | RAJI 0.5+; MM.1S 0.5+ |
| CD19-BCMA | MC-SAR | (−) | 092624-JSuC2 | 8937 | RAJI 0.5+; MM.1S 0.5+ |
| DLL3-BCMA | MC-SAR | (−) | 100424-EZeT1 | 8938 | MM.1S 0.5+; H82+/−; |
| CD19-BCMA | MC-SAR | (−) | 100324-BBtQ1 | 8939 | RAJI 0.5+; MM.1S 0.5+ |
| TAJ | MC-SAR | P11(+) | 100424-EZeK1 | 8940 | HepG2+ |
| MPL | MC-SAR | P11(+) | 100424-EZeE1 | 8941 | HEL 0.5+ |
| MPL | MC-SAR | (−) | 100424-EZeF1 | 8942 | HEL 0.5+ |
| TAJ | MC-SAR | P11(+) | 100424-EZeG1 | 8943 | A2058+/−; Hutu-80 0.5+; |
| MPL | MC-SAR | (−) | 100424-EZeH1 | 8944 | HEL+/− |
| MPL | MC-SAR | (−) | 100424-EZeJ1 | 8945 | HEL 0.5+ |
| CD19 | MC-SAR | (−) | 100324-BBtP2 | 8946 | RAJI 0.5+ |
| CD19-BCMA | MC-SAR | (−) | 100324-BBtR2 | 8947 | RAJI 0.5+ |
| DLL3 | MC-SAR | (−) | 100424-XWA1 | 8948 | H82+/−; SK-MEL-5+/−; |
| DLL3 | MC-SAR | (−) | 100424-XWB1 | 8949 | H82+/−; SK-MEL-5+/−; |
| DLL3 | MC-SAR | (−) | 100424-XWC1 | 8950 | H82+/−; SK-MEL-5+/−; |
| CD79b | MC-SAR | (−) | 101124-EZfA1 | 8951 | RAJI+; Jeko+ |
| CD79b | MC-SAR | (−) | 101124-EZfB1 | 8952 | RAJI+; Jeko 1.5+ |
| CD79b | MC-SAR | (−) | 101124-EZfC1 | 8953 | RAJI+; Jeko 1.5+ |
| CD79b | MC-SAR | (−) | 101124-EZfD1 | 8954 | RAJI+; Jeko 1.5+ |
| CD79b | MC-SAR | (−) | 101124-EZfE1 | 8955 | RAJI+; Jeko 1.5+ |
| CD79b | MC-SAR | (−) | 101124-EZfF1 | 8956 | RAJI+; Jeko 1.5+ |
| CD79b | MC-SAR | (−) | 101124-EZfG1 | 8957 | RAJI+; Jeko 1.5+ |
| CD79b | MC-SAR | (−) | 101124-EZfH1 | 8958 | RAJI+; Jeko+ |
| CD79b | MC-SAR | (−) | 101124-EZfJ1 | 8959 | RAJI+; Jeko 1.5+ |
| DLL3-BCMA | MC-SAR | (−) | 100424-EZeU2 | 8960 | H1436+/−; COLO679+/− |
| CD19-BCMA | MC-SAR | (−) | 102524-EZeQ1 | 8961 | RAJI 0.5+; MM.1S 0.5+ |
| CD20 | MC-SAR | (−) | 010425-EZyN1 | 8962 | Jeko+/−; RAJI+/− |
| CD20 | MC-SAR | (−) | 010425-EZyQ1 | 8963 | Jeko+/−; RAJI 0.5+ |
| CD20 | MC-SAR | (−) | 010425-EZyT1 | 8964 | Jeko 0.5+; RAJI+ |
| CD20 | MC-SAR | (−) | 010425-EZyW1 | 8965 | Jeko 0.5+; RAJI+ |
| TGFBR2 | MC-SAR | (−) | 010425-EZyY1 | 8966 | Jeko+/− |
| CD20 | MC-SAR | (−) | 010425-EZzA1 | 8967 | Jeko+/− |
| CD20 | MC-SAR | (−) | 010425-EZzB1 | 8968 | Jeko 0.5+ |
| CD20 | MC-SAR | (−) | 010425-EZzD1 | 8969 | Jeko+/− |
| DLL3-BCMA | MC- | (−) | 100424-EZeS1 | 8970 | MM.1S+; H82+/ |
| | 16SAR | | | | |
| CD19-BCMA | MC- | (−) | 102524-EZeP1 | 8971 | RAJI 0.5+; MM.1S+ |
| | 16SAR | | | | |
| TAJ | MC- | P11(+) | 080124-EZtQ1 | 8972 | Hutu-80+/− |
| | zSAR | | | | |
| TAJ | MC- | P11(+) | 080124-EZtT1 | 8973 | Hutu-80+/− |
| | zSAR | | | | |
| TAJ | MC- | P11(+) | 100424-EZeA1 | 8974 | A2058 0.5+; HepG2+/−; |
| | zSAR | | | | Hutu-80 0.5+; SW1573+ |
| MPL | MC- | (−) | 100424-EZeB1 | 8975 | HEL 1.5+ |
| | zSAR | | | | |
| MPL | MC- | (−) | 100424-EZeC1 | 8976 | HEL 1.5+ |
| | zSAR | | | | |
| TAJ | MC- | P11(+) | 100424-EZeD1 | 8977 | A2058+/−; HepG2+/−; |
| | zSAR | | | | |

[0424] The presence or absence of Tag and the type of Tag is shown as (+) and (−). C(+) indicates that the SHARP-tagged protein is co-expressed with the SAR. Abbreviations used are MC-SAR, multichain SAR; MC-zSAR, multichain zSAR; MC-16SAR, multi-chain CD16 SAR; HC-SAR, Hybrid Chain SAR; zSIR, CD3z synthetic immune receptor; SIR, Synthetic Immune Receptor; CAR, chimeric antigen receptor.

TABLE 7
Table 7: Malibu-Glo Assay

| SEQ ID | Cell line | Fold Increase |
|---|---|---|
| 8979 | RAJI | 117.02 |
| 8980 | RAJI | 144.08 |
| 8981 | RAJI | 114.69 |
| 8982 | RAJI | 119.35 |
| 8983 | RAJI | 160.99 |
| 8984 | RAJI | 50.82 |
| 8985 | RAJI | 121.15 |
| 8986 | RAJI | 47.57 |
| 8987 | RAJI | 1.13 |
| 8988 | RAJI | 39.22 |
| 8989 | RAJI | 38.28 |
| 8990 | RAJI | 270.34 |
| 8991 | RAJI | 39.11 |
| 8992 | RAJI | 26.86 |
| 8993 | RAJI | 21.17 |
| 8994 | RAJI | 17.30 |
| 9001 | RAJI | 0.48 |
| 9057 | RAJI | 481.39 |
| 9058 | RAJI | 125.51 |
| 9059 | RAJI | 64.94 |
| 9060 | RAJI | 26.92 |
| 9061 | RAJI | 2.47 |
| 9062 | RAJI | 628.83 |
| 9067 | RAJI | 68.28 |
| 9068 | RAJI | 68.73 |
| 9069 | RAJI | 66.56 |
| 9070 | RAJI | 33.56 |
| 9071 | RAJI | 2.19 |
| 9072 | RAJI | 1.93 |
| 9080 | RAJI | 7.40 |
| 9081 | RAJI | 2.05 |
| 9082 | RAJI | 6.97 |
| 9083 | RAJI | 8.37 |
| 9084 | RAJI | 9.36 |
| 9085 | RAJI | 17.40 |
| 9086 | RAJI | 96.80 |
| 8995 | HL60 | 6.13 |
| 8997 | HL60 | 7.19 |
| 9006 | HL60 | 5.02 |
| 9007 | HL60 | 1.31 |
| 9008 | HL60 | 3.70 |
| 9009 | PA-1 | 18.63 |
| 9010 | PA-1 | 16.56 |
| 9011 | PA-1 | 6.65 |
| 9012 | PA-1 | 2.47 |
| 9013 | PA-1 | 9.96 |
| 9014 | PA-1 | 4.13 |
| 9015 | PA-1 | 9.03 |
| 9016 | PA-1 | 152.05 |
| 9017 | PA-1 | 685.82 |
| 9019 | MM1S | 2.40 |
| 9020 | MM1S | 2.37 |
| 9021 | MM1S | 5.94 |
| 9022 | MM1S | 3.42 |
| 9023 | MM1S | 1.59 |
| 9024 | MM1S | 1.29 |
| 9025 | MM1S | 1.16 |
| 9027 | MM1S | 1.12 |
| 9028 | MM1S | 1.06 |
| 9034 | MM1S | 7.19 |
| 9037 | MM1S | 12.23 |
| 9038 | MM1S | 9.38 |
| 9048 | MM1S | 4.37 |
| 9049 | MM1S | 6.30 |
| 9050 | MM1S | 3.56 |
| 9051 | MM1S | 4.76 |
| 9052 | MM1S | 15.81 |
| 9053 | MM1S | 1.53 |
| 9055 | MM1S | 10.88 |
| 9056 | MM1S | 7.43 |
| 9087 | SKOV3 | 9.12 |
| 9088 | SKOV3 | 11.52 |
| 9089 | SKOV3 | 2.04 |
| 9090 | SKOV3 | 1.49 |
| 9091 | SKOV3 | 1.31 |
| 9092 | SKOV3 | 1.22 |
| 9093 | SKOV3 | 1.24 |
| 9099 | SK-MEL-5 | 2.61 |
| 9100 | SK-MEL-5 | 0.88 |
| 9101 | SK-MEL-5 | 29.65 |
| 9102 | SK-MEL-5 | 14.67 |
| 9103 | NCI-H82 | 23.80 |
| 9104 | 786-O | 15.38 |
| 9105 | SKOV3 | 671.60 |
| 9106 | LNCaP | 27.37 |
| 9107 | HepG2 | 278.48 |
| 9108 | HepG2 | 87.82 |
| 9109 | HepG2 | 85.78 |
| 9110 | MM1S | 1.92 |
| 9111 | LoVo | 1.25 |
| 9112 | MM1S | 4.28 |
| 9116 | MM1S | 2.46 |
| 9122 | MM1S | 5.74 |
| 9123 | MM1S | 4.49 |
| 9130 | LoVo | 1.84 |
| 9131 | LoVo | 1.44 |
| 9132 | LoVo | 2.02 |
| 9133 | LoVo | 10.00 |
| 9140 | HL60 | 11.80 |
| 9141 | HL60 | 8.29 |
| 9142 | HL60 | 10.11 |
| 9143 | HL60 | 5.11 |
| 9144 | HL60 | 3.94 |
| 9145 | HL60 | 2.95 |
| 9000 | HL60 | 5.40 |
| 9002 | HL60 | 5.34 |
| 9003 | HL60 | 7.51 |
| 9004 | HL60 | 10.00 |
| 8998 | HL60 | 17.02 |
| 8999 | HL60 | 28.67 |
| 9094 | SK-MEL-5 | 1.84 |
| 9095 | SK-MEL-5 | 3.87 |
| 9096 | SK-MEL-5 | 3.14 |
| 9097 | SK-MEL-5 | 3.82 |
| 9098 | SK-MEL-5 | 2.77 |

### Definitions

[0425] The invention will now be further described. In the following passages, different aspects of the invention are defined in more detail. Each aspect so defined may be combined with any other aspect or aspects unless clearly indicated to the contrary. In particular, any feature indicated as being preferred or advantageous may be combined with any other feature or features indicated as being preferred or advantageous.

[0426] Unless stated otherwise, or implicit from context, the following terms and phrases include the meanings provided below. Unless explicitly stated otherwise, or apparent from context, the terms and phrases below do not exclude the meaning that the term or phrase has acquired in the art to which it pertains. The definitions are provided to aid in describing particular embodiments, and are not intended to limit the claimed invention, because the scope of the invention is limited only by the claims.

[0427] Unless otherwise defined, all technical and scientific terms used herein have the same meaning as commonly understood by one of ordinary skill in the art to which this invention belongs.

[0428] As used herein the term “comprising” or “comprises” is used in reference to compositions, methods, and respective component(s) thereof, that are useful to an embodiment, yet open to the inclusion of unspecified elements, whether useful or not. It will be understood by those within the art that, in general, terms used herein are generally intended as “open” terms (e.g., the term “including” should be interpreted as “including but not limited to,” the term “having” should be interpreted as “having at least,” the term “includes” should be interpreted as “includes but is not limited to,” etc.).

[0429] Generally, nomenclatures used in connection with, and techniques of, cell and tissue culture, pathology, oncology, molecular biology, immunology, microbiology, genetics and protein and nucleic acid chemistry and hybridization described herein are those well-known and commonly used in the art. The methods and techniques of the disclosure are generally performed according to conventional methods well-known in the art and as described in various general and more specific references that are cited and discussed throughout the present specification unless otherwise indicated. See, e.g., Sambrook et al., Molecular Cloning: A Laboratory Manual (4th ed., Cold Spring Harbor Laboratory Press, Cold Spring Harbor, N.Y. (2013)). The nomenclatures used in connection with, and the laboratory procedures and techniques of, immunology, molecular biology, analytical chemistry, synthetic organic chemistry, and medicinal and pharmaceutical chemistry described herein are those well-known and commonly used in the art. Standard techniques are used for chemical syntheses, chemical analyses, pharmaceutical preparation, formulation, and delivery, and treatment of patients.

[0430] The term “autonomous antigen binding domain” or “AABD” as used herein refers to an antigen binding domain that can bind to an antigen autonomously, i.e., in the absence of another antigen binding domain. In an embodiment, the AABD is a non-scFv antigen binding domain. An exemplary non-scFV based autonomous antigen binding domain includes but is not limited to a vHH domain, a humanized vHH domain, a single variable domain-TCR (svd-TCR), and non-immunoglobulin antigen binding scaffold such as a DARPIN, an affibody, a ZIP domain (e.g., RZIP, EZIP, E4, R4 etc.), an affilin, an adnectin, an affitin, an obody, a repebody, a fynomer, an alphabody, an avimer, an atrimer, a centyrin, a pronectin, an anticalin, a kunitz domain, an Armadillo repeat protein or a fragment thereof. Additional examples of non-scFV based autonomous antigen binding domains include the ligand binding domain of a receptor (e.g., CD16-V158A, NKG2D) or a fragment thereof, the receptor binding domain of a ligand (e.g., APRIL, Thrombopoietin etc.) or a fragment thereof, an adaptor (e.g., RZIP, EZIP, NKG2D-AF etc.) or a fragment thereof, an adaptor binding protein (e.g. ULBP2R, ULBP2-S3 etc.) or a fragment thereof, an epitope or a tag (e.g., SHARP-tag etc.), an autoantigen or a fragment thereof and the like.

[0431] The disclosure described the use of AABD, such as human V_{H} (or vH) domains, such as multiple human V_{H} domains, as building blocks to make unispecific, bispecific and multi-specific SARs. In an embodiment, the disclosure describes the use of AABD, such as human V_{H} domains, such as multiple human V_{H} domains, as building blocks to make unispecific, bispecific and multispecific novel SARs.

[0432] The term “about” when referring to a measurable value such as an amount, a temporal duration, and the like, is meant to encompass variations of ±20% or in some instances ±10%, or in some instances ±5%, or in some instances ±1%, or in some instances ±0.1% from the specified value, as such variations are appropriate to perform the disclosed methods or describe the compositions herein. Moreover, any value or range (e.g., less than 20 or similar terminology) explicitly includes any integer between such values or up to the value. Thus, for example, “one to five mutations” explicitly includes 1, 2, 3, 4, and/or 5 mutations.

[0433] The term “Ab-TCR” or “AbTCR” refers to a next generation CAR platform as described in WO 2017/070608 A1 which is incorporated herein by reference. In an embodiment, an Ab-TCR comprises an antibody moiety that specifically binds to a target antigen fused to a TCR module capable of recruiting at least one TCR signaling module. Exemplary TCR modules that can be used in the construction of Ab-TCR are provided in SEQ ID NO:6009-6014 and in WO 2017/070608 A1 which is incorporated herein by reference.

[0434] The term “accessory module” refers to any one or more of PDL1, PDL2, CD80, CD86, 41BBL, CD40L, vFLIP-K13, MC159, cFLIP-L/MRITa, cFLIP-p22, a multi-purpose switch (e.g., IL2-tBCMA, IL15-tBCMA, IL2-RQR, IL15-RQR etc.), NKG2C, CD94, DAP10, DAP12, CD3ε, CD3γ, CD3δ, CD3ζ, FcRγ, and combination thereof that is expressed in an immune cell (e.g., NK cell or T cell, e.g., SAR-NK cell, SAR-T cell or TCR-T cell) to decrease, regulate or modify the activity of the immune cell. In an embodiment, an accessory module is a therapeutic control (e.g., iCaspase 9).

[0435] As used herein “affinity” is meant to describe a measure of binding strength. Affinity generally refers to the “ability” of the binding agent to bind its target. There are numerous ways used in the art to measure “affinity”. In an embodiment, the antibodies, antibody fragments (e.g., scFV), antibody-conjugates (e.g., antibody drug conjugates) that bind with 1.5-fold, 2-fold, 5-fold, 10-fold, 20-fold or 50-fold lower affinity to a variant epitope tag described herein as compared to the wild-type epitope tag represented by SEQ ID NO; 1-11. In an embodiment, the antibodies, antibody fragments (e.g., scFV), antibody-conjugates (e.g., antibody drug conjugates) that bind with 1.5-fold, 2-fold, 5-fold, 10-fold, 20-fold or 50-fold higher affinity to a variant epitope tag described herein as compared to the wild-type epitope tag represented by SEQ ID NO; 1-11.

[0436] The term “antibody,” as used herein, refers to a protein, or polypeptide sequence derived from an immunoglobulin molecule which specifically binds with an antigen. Antibodies can be monoclonal, or polyclonal, multiple or single chain, or intact immunoglobulins, and may be derived from natural sources or from recombinant sources. The antibody may be ‘humanized’, ‘chimeric’, fully human or non-human. An antibody may have a single domain (e.g., a single vH domain).

[0437] The term “antibody fragment” refers to at least one portion of an antibody, that retains the ability to specifically interact with (e.g., by binding, steric hindrance, stabilizing/destabilizing, spatial distribution) an epitope of an antigen. Examples of antibody fragments include, but are not limited to, Fab, Fab′, F(ab′)2, Fv fragments, scFv antibody fragments, disulfide-linked Fvs (sdFv), a Fd fragment consisting of the VH and CH1 domains, linear antibodies, single domain antibodies (sdAb) such as either vL or vH, camelid vHH domains, multi-specific antibodies formed from antibody fragments such as a bivalent fragment comprising two Fab fragments linked by a disulfide bridge at the hinge region, and an isolated CDR or other epitope binding fragments of an antibody. An antigen binding fragment can also be incorporated into single domain antibodies, maxibodies, minibodies, nanobodies, intrabodies, diabodies, triabodies, tetrabodies, v-NAR and bis-scFv (see, e.g., Hollinger and Hudson, Nature Biotechnology 23:1126-1136, 2005). Antigen binding fragments can also be grafted into scaffolds based on polypeptides such as a fibronectin type III (Fn3) (see U.S. Pat. No. 6,703,199, which describes fibronectin polypeptide mini-bodies).

[0438] The term “antibody heavy chain,” refers to the larger of the two types of polypeptide chains present in antibody molecules in their naturally occurring conformations, and which normally determines the class to which the antibody belongs.

[0439] The term “antibody light chain,” refers to the smaller of the two types of polypeptide chains present in antibody molecules in their naturally occurring conformations. Kappa (K) and lambda (k) light chains refer to the two major antibody light chain isotypes. [00463]“Anticancer agent” refers to agents that inhibit aberrant cellular division and growth, inhibit migration of neoplastic cells, inhibit invasiveness or prevent cancer growth and metastasis. The term includes chemotherapeutic agents, biological agent.

[0440] The term “anticancer effect” or “anti-tumor effect” refers to a biological effect which can be manifested by various means, including but not limited to, a decrease in tumor volume, a decrease in the number of cancer cells.

[0441] The term “antigen” or “Ag” refers to a molecule that provokes an immune response. This immune response may involve either antibody production, or the activation of specific immunologically-competent cells, or both. Non-limiting examples of antigen or antigens that can be specifically bound by any of the antigen-binding domains are described in Table 1.

[0442] An “antigen binding domain” or “antigen binding module” or “antigen binding segment” or “antigen specific domain” (ASD) or “binding domain” refers to a polypeptide or peptide that due to its primary, secondary or tertiary sequence, post-translational modifications and/or charge binds to an antigen with a high degree of specificity. In exemplary embodiments, the target antigens and SEQ ID Nos of various antigen binding domains are set forth herein in Tables 2-4 of this disclosure. In further exemplary embodiments, the target antigen and SEQ ID NOs of vL, vH, scFVs, and their CDR regions are set forth herein in Tables 6A-C of patent application PCT/US18/53247 and in Tables 3-4 of patent application PCT/US19/035096, which are incorporated in their entirety by reference herein.

[0443] The term “Association constant (Ka)” is defined as the equilibrium constant of the association of a receptor and ligand.

[0444] The term “autoantigen” refers to an endogenous antigen that stimulates production of an autoimmune response, such as production of autoantibodies. Examples of autoantigens include, but are not limited to, desmoglein 1, desmoglein 3, and fragments thereof.

[0445] As used herein, the term “backbone” or “architecture” or “design” refers to the configuration of the different components (e.g., antigen binding domains, hinge domains, transmembrane domains, signaling domains) that comprise different SAR and any accessory module which is generally optional. The expression of nucleic acids encoding two or more components of the SAR and accessory modules may be driven by separate promoters. Exemplary promoters include EF1α, EFS, RSV, MNDU3 (SEQ ID NO: 3526-7), Hsp70 and Hsp90.

[0446] As referred to here, the term “binds” or “binding” or “recognized by” refers to a non-covalent binding, in particular ionic bonds, Van der Wall forces, hydrogen bonds and/or hydrophobic interactions.

[0447] The term “cTCR” refers to a wild-type TCR nucleic acid coding sequence and the corresponding wild-type TCR protein linked to an antigen binding domain that is not derived from a TCR. cTCR have been described in (Gross, Waks, & Eshhar, 1989). cTCRs are used in some embodiments and as reference controls.

[0448] As used herein, an “epitope” is defined to be the portion of an antigen capable of eliciting an immune response, or the portion of an antigen that binds to an antibody or antibody fragment. Epitopes can be a protein sequence or subsequence.

[0449] The term “expression vector” refers to a vector comprising a recombinant polynucleotide comprising expression control sequences operatively linked to a nucleotide sequence to be expressed.

[0450] A “functional portion” (“biologically active portion”) of a protein refers to a portion of a protein that retains one or more functions of full length or mature protein.

[0451] “Functional variant” or “Variant” of a given entity (tag, antibody, protein, etc.) means a version that may not be exactly identical in sequence but performs substantially the same function. For example, a functional variant of the SHARP-tag may have one or two amino acids substituted yet still be bound by SABR. A functional variant of SABR may be a variant with slightly different sequence but still binds is SHARP tag with high affinity. Functional variants of a SAR or protein retain the intended activity (antigen recognition, signaling, etc.).

[0452] The term “FcRγ” or “FCER1G” or “FCRG” or “FcRy” as used herein refers to gene represented by Gene ID: 2207.

[0453] The term “functional portion” when used in reference to a SAR refers to any part or fragment of the SAR, which part or fragment retains the biological activity of the SAR of which it is a part (the parent SAR). Functional portions encompass, for example, those parts of a SAR that retain the ability to recognize target cells, or detect, treat, or prevent a disease, to a similar extent, the same extent, or to a higher extent, as the parent SAR. In reference to the parent SAR, the functional portion can comprise, for instance, about 10%, 25%, 30%, 50%, 68%, 80%, 90%, 95%, or more, of the parent SAR.

[0454] The term “flexible polypeptide linker” as used herein refers to a peptide linker that consists of amino acids such as glycine and/or serine residues used alone or in combination, to link polypeptide chains together (e.g., variable heavy and variable light chain regions together).

[0455] “Host cell” or “engineered cell” or “Genetically modified cells,” or “redirected cells,” or “genetically engineered cells” refers to a cell that has been genetically modified to express a recombinant polypeptide (here, typically a SAR or a SHARP-tagged construct). “Transduced,” “transfected,” or “transformed” are used interchangeably to denote introduction of genetic material into a cell (via viral vector, plasmid, mRNA electroporation, etc.).

[0456] An “HLA-independent TCR” or an “MHC-independent TCR” as defined herein is a TCR that can recognize an antigen independent of MHC restriction.

[0457] As used herein, the term “heterologous gene” refers to a gene that is not in its natural environment. For example, a heterologous gene includes a gene from one species introduced into another species. A heterologous gene also includes a gene native to an organism that has been altered in some way (e.g., mutated, added in multiple copies, linked to non-native regulatory sequences, etc.).

[0458] The term “heterologous” when used in context of protein domains refer to domains that is not in its natural environment. For example, a heterologous protein domain is not part of a single naturally occurring polypeptide or protein. Stated in another way, two domains are heterologous if they are derived from two different polypeptides or proteins found in nature. For example, TCRα constant domain and TCRβ transmembrane domains are heterologous to each other as they are derived from two different polypeptide or proteins.

[0459] The two domains are considered “interspecies heterologous domains” if they are derived from homologs of the same protein but are derived from two different species and if there is <80% amino acid sequence identity between the two domains. For example, human TCRα constant domain and mouse TCRα transmembrane domains are heterologous to each other if the human TCRα constant domain is less than 80% identical to mouse TCRα constant domain at the amino acid level or if the human TCRα transmembrane domain is less than 80% identical to mouse TCRα transmembrane at the amino acid level. For the purpose of this disclosure, two domains are not considered interspecies heterologous domains if <20% of amino acid residues of a protein domain belonging to one species are replaced by the corresponding residues found in a different species. For example, human TCRα transmembrane domain and a variant of human TCR constant domain are not considered interspecies heterologous if <20% amino acid residues of the human TCRα constant domain are replaced by the corresponding residues found in the mouse TCRα constant domain.

[0460] “Hinge region” (HR) as used herein refers to the hydrophilic region which is between the antigen binding domain and the transmembrane domain of a SAR.

[0461] “Hybrid TCR Chain” or “Hybrid Chain” as the term is used herein, refers to a chain that comprises at least one domain selected from the group of TCR constant domain (CD or C), TCR connecting peptide (ConnP), TCR transmembrane (TM) domain and TCR intracytoplasmic domain (CP or IC) that is heterologous. In an example embodiment, a hybrid TCR chain refers to a TCR chain in which the TM domain is derived from one TCR chain and at least one of the domains selected from CD, ConnP, and IC is derived from a different TCR chain. For example, if TM is derived from human TCRα, then at least one of the domains selected from CD, ConnP, and IC is derived from TCRβ1/β2, TCRγ, TCRS or pre-TCRα. A hybrid chain may also comprise of domains derived from two different species. Thus, a hybrid chain may comprise of human TCRα constant domain and a non-human TCRα transmembrane domain. A hybrid TCR chain may have 1, 2, 3 or more domains that are heterologous. Hybrid chains are also described in PCT/US2024/10592 (incorporated by reference herein).

[0462] “Hybrid Chain SIR” or (HC-SIR) or a Hybrid Chain SAR (HC-SAR) as the term is used herein, refers to a heterodimeric synthetic immune receptor (SIR) or synthetic antigen receptor (SAR) in which at least one TCR constant chain is a hybrid chain. A hybrid chain SIR or a hybrid chain SAR may have both TCR chains that are hybrid. HC-SIR and HC-SAR are also described in PCT/US2024/10592.

[0463] As used herein, the term “hydrophilic” refers to a molecular property or characteristic of a compound, moiety, residue, or domain that exhibits an affinity for water or aqueous environments. Examples of hydrophilic residues include, but are not limited to, serine (Ser), threonine (Thr), asparagine (Asn), glutamine (Gln), arginine (Arg), lysine (Lys), aspartic acid (Asp), and glutamic acid (Glu).

[0464] As used herein, the term “hydrophobic” refers to a molecular property or characteristic of a compound, moiety, residue, or domain that repels or is insoluble in water and tends to associate with non-polar solvents or lipid environments.

[0465] As used herein, the term “intracellular protein” refers to a protein or polypeptide that is normally localized within the interior of a cell, including but not limited to the cytoplasm, nucleus, mitochondria, endoplasmic reticulum, Golgi, lysosomes, or other subcellular compartments.

[0466] As used herein, the term “polar” refers to a molecule, group, or residue that exhibits an unequal distribution of electric charge, resulting in a permanent electric dipole moment. Polar amino acid residues include, but are not limited to, serine (Ser), threonine (Thr), tyrosine (Tyr), asparagine (Asn), and glutamine (Gln). Charged residues (e.g., Lys, Arg, Asp, Glu) are also considered polar.

[0467] A “hydrophobic portion,” as used herein, means any amino acid sequence having a three-dimensional structure that is thermodynamically stable in a cell membrane, and generally ranges in length from about 15 amino acids to about 30 amino acids.

[0468] As used herein, the term “hypoimmunogenic” refers to a molecule, polypeptide, domain, or composition that elicits a reduced or attenuated immune response compared to a reference immunogenic molecule when administered to a subject. A hypoimmunogenic entity may still be recognized by components of the immune system (e.g., T cells, B cells, antibodies), but to a significantly lesser extent than a naturally occurring, wild-type, or unmodified counterpart. Hypoimmunogenicity may be achieved, for example, through sequence modification, removal of known T-cell epitopes, PEGylation, glycosylation, or other engineering strategies that minimize antigen presentation or immune recognition.

[0469] As used herein, the term “non-immunogenic” refers to a molecule, polypeptide, domain, or composition that does not elicit a detectable immune response when administered to a subject under conditions in which a comparable immunogenic control would produce such a response. A non-immunogenic entity lacks epitopes capable of stimulating B cell or T cell activation and is not subject to antigen-specific immune surveillance or memory response. For the purposes of the present disclosure, a “non-immunogenic” sequence may include naturally occurring human-derived sequences or engineered sequences that exhibit no detectable antibody generation or T cell activation in a validated in vivo or in vitro immune assay.

[0470] “Immune effector cell,” as that term is used herein, refers to a cell that is involved in an immune response, e.g., in the promotion of an immune effector response. Examples of immune effector cells include T cells, e.g., alpha/beta T cells and gamma/delta T cells, B cells, natural killer (NK) cells, natural killer T (NKT) cells, mast cells, monocytes/macrophages, and myeloid-derived phagocytes.

[0471] “Immune effector function” or “immune effector response,” “effector function” refers to the specialized function of a differentiated cell. Effector function of a T-cell or NK-cells, for example, may be cytolytic activity or helper activity including the secretion of cytokines. For example, an immune effector function or response refers a property of a T or NK cell that promotes killing or the inhibition of growth or proliferation, of a target cell.

[0472] An “intracellular signaling domain,” (ISD) or “activation domain” “effector domain” as the term is used herein, refers to an intracellular signaling portion of a molecule.

[0473] The term “isolated” as used herein refers to molecules or biologicals or cellular materials being substantially free from other materials. An “isolated SHAPR-tagged cell” is one that has been separated from unmodified cells, typically by use of the SABR in a selection process.

[0474] “Junction amino acids” or “junction amino acid residues” refer to one or more (e.g., about 2-20) amino acid residues between two adjacent motifs, regions or domains of a polypeptide.

[0475] A “long linker” or “long linker domain” is a linker that is between 25 to 500 amino acids in length. In an embodiment, a long linker is about 25-500 amino acids and any number in between in length.

[0476] As used herein, the term “linker” (also “linker domain” or “linker region”) refers to an oligo or a polypeptide (or an oligo encoding the polypeptide) that joins together two or more domains or regions of a polynucleotide or polypeptide, respectively, disclosed herein. In an embodiment, the polypeptide can be a SAR (e.g., a CAR, SIR, zSIR, Ab-TCR, z16SAR, TCR etc.), an antibody, an antibody fragment, a non-immunoglobulin antigen binding scaffold, a cytokine, a chemokine or any recombinant protein. The linker may join two or more domains or regions of a SAR (e.g., a CAR, SIR, zSIR, Ab-TCR, z16SAR, TCR etc.). The linker may join the epitope tag described herein to a region of a SAR (e.g., a CAR, SIR, zSIR, Ab-TCR, z16SAR, TCR etc.). The linker may join two or more epitope tags. The linker can be anywhere from 1 to 500 amino acids in length or 3 to 1500 nucleotide in length. In some embodiments the “linker” is cleavable or non-cleavable. The linker may be 5-10 amino acids in length, 5-15 amino acids in length, 6-120 amino acids in length. The linker may be 2, 3, 4, 5, 6, 7, 8, 9, 10, 11, 12, 13, 14, 15, 16, 17, 19, 20, 21, 22, 23 24, 25, 26, 27, 28, 29, 30 amin acids in length. The linker may be about 5-15 amino acids in length, about 6-20 amino acids, about 7-30 amino acids in length. In some embodiment, the one or more epitope tags may serve as the linker. For example, the epitope tag may join the antigen binding domain of a CAR (i.e., scFv region of a CAR) to the hinge domain of the CAR. Alternatively, the epitope tag may join the vL and/or vH regions of a SAR (e.g., SIR, Ab-TCR, zSIR, z16SAR etc.) to the signaling chains (e.g., TCRα/TCRβ, TCRγ/TCRδ or CD3ζ/CD3ζ etc.). In an embodiment, the linker joins the one or more epitope tags to an antibody (e.g., monoclonal antibody, a camelid vHH domain, a single vH domain etc.), an antibody fragment (e.g., scFv, Fab etc.), a non-immunoglobulin antigen binding scaffold (e.g., a DARPIN, Centyrin etc.), a cytokine, a chemokine or any recombinant protein. In an embodiment, the linker is a flexible linker, Exemplary flexible linkers are provided in SEQ ID NO: 1330-1331 and 1453. Additional flexible linkers are known in the art.

[0477] The term “lentivirus” refers to a genus of the Retroviridae family. The term “lentiviral vector” refers to a vector derived from at least a portion of a lentivirus genome, including especially a self-inactivating lentiviral vector. Example of a vector is provided in SEQ ID NO: 3530.

[0478] A “multipurpose switch” or “multipurpose gene” encodes for a protein that provide suicide, survival and marker functions. In an embodiment, all the above functions are provided by a single polypeptide chain. Example multipurpose switches include SEQ ID NO: 679-684, 688, 699.

[0479] The term “multi-chain synthetic antigen receptor” “multi-chain SAR” means a synthetic antigen receptor comprising two or more polypeptide chains. A multi-chain SAR can be a double chain SAR or a three chain SAR. A double chain SAR comprises two membrane associated domain (e.g., transmembrane or membrane anchoring domains).

[0480] “Native” or “Naturally occurring” or “endogenous” or “Natural” as used herein refers to an amino acid, nucleotide, gene, protein, peptide, nucleic acid (e.g., DNA, RNA etc.) or fragment thereof that is native to a cell or is naturally expressed in a cell. An “endogenous peptide”, “Native peptide” or “Naturally occurring peptide” or “Natural peptide” refers to a peptide or polypeptide that is naturally produced or expressed within a particular organism, tissue, or cell type, without the introduction of exogenous genetic material or recombinant expression systems. An endogenous or a natural peptide may be a fragment of an endogenous protein or polypeptide and/or derived from an endogenous protein or polypeptide. An endogenous or a natural peptide is identical in amino acid sequence to a peptide found in nature. An endogenous peptide or a natural peptide may be isolated directly from a biological source or produced synthetically or recombinantly, provided its sequence match those occurring in a naturally derived counterpart. Endogenous or natural peptides are distinguished from synthetic, engineered, or mutated peptides that contain non-naturally occurring sequences, modifications, or amino acid analogs. In an example embodiment, SEQ ID NO: 1 to 10 represent endogenous peptides that are derived from human CD79b. In the context of a TCR chain, a native or endogenous TCRα chain polypeptide of a T cell consists of a variable domain (Vα) joined to a TCRα constant chain. Examples of a naturally occurring amino acids or natural amino acids include Glycine, Serine, Alanine etc. Examples of non-naturally occurring amino acids include beta-amino acids, N-methyl amino acids, alpha-methyl amino acids, homo-amino acids, D-amino acids, norleucin, citrulline, ornithine, peptoid derivatives etc. The epitope tag and polypeptide described herein may comprise naturally occurring or non-naturally occurring amin acids.

[0481] “Native receptor” or “Naturally occurring receptor” “natural receptor” or “endogenous receptor” or “native receptor” as used herein refers to any receptor that occurs in nature and comprises an antigen binding or a ligand binding domain. The term includes functional variants, isoforms, and homologs from other mammalian species. A native receptor can be “native signaling receptor” or a “naturally occurring signaling receptor” if it is capable of transmitting a cell signal upon binding to its target. A naturally occurring receptor or native receptor is native to a cell or is naturally expressed in a cell. Examples of naturally occurring signaling receptors or native receptors include, but are not limited to, CD16A, CD16B, NKp30, NKp44, NKp46, KIR2DS4, NKG2D etc. For the purpose of this disclosure, the CD3 signaling chains (CD3E, CD37, CD36 and CD3ζ) are not included within the definition of a “naturally occurring receptor” and are instead classified as a signaling adaptor.

[0482] As used herein, the term “non-TCR naturally occurring receptor” or “non-TCR naturally occurring signaling receptor” or “non-TCR receptor” or ‘non-TCR signaling receptor” refers to a receptor that is not a T cell receptor (TCR). A non-TCR receptor can be expressed in cells other than a T cell. A non-TCR receptor can be expressed in cells that lack the expression of CD3ζ, CD3R, CD36 and/or CD37 chains.

[0483] As used herein, the term “non-T cell receptor module” or ““non-TCR module” or “non-TCR signaling module” or “NTCRM” refers to a module that lacks sequences comprised of the T cell receptor transmembrane domains and may further lack all or a portion of T cell receptor connecting peptides and/or intracellular domains. An NTCRM lacks sequences comprised of the transmembrane domains of TCRα, TCRβ, TCRγ, TCRδ or pre-TCRα. An NTCRM may further lack all or a portion of the connecting peptides and/or intracellular domains of TCRα, TCRβ, TCRγ, TCRδ or pre-TCRα. An example non-TCR module (NTCRM) comprises of two CD3z transmembrane domains. Another example NTCRM comprises of a CD3z transmembrane domain and a CD16 transmembrane domain.

[0484] As used herein, the term “non-CD3 adaptor module” or “non-CD3 adaptor” or “non-TCR/CD3 adaptor” or ““non-TCR/CD3 signaling adaptor” or ““NCAM” refers to a signaling adaptor that is not a component of the T cell receptor/CD3 receptor complex. In an embodiment, a “non-TCR/CD3 adaptor” does not comprise the transmembrane and/or cytosolic regions of CD3ε, CD3ζ, CD3γ or CD3δ chains or variants thereof.

[0485] The term “near the N-terminus” as used herein means within the N-terminal 30 amino acids. For example, the term “an AABD operably linked to the N-terminus or near the N-terminus of a vL and/or vH domain”, mean an AABD that is operably linked at the N-terminus of a vL or a vH fragment or operably linked to the N-terminal 2, 3, 4, 5, 6, 7, 8, 9, 10, 11, 12, 13, 14, 15, 16, 17, 18, 19, 25 or 30 amino acid comprising the vL or the vH domain. Similarly, the term “an AABD operably linked to the N-terminus or near the N-terminus of a Va and/or Vb domain”, mean an AABD that is operably linked at the N-terminus of a Va or a Vb fragment or operably linked to the N-terminal 2, 3, 4, 5, 6, 7, 8, 9, 10, 11, 12, 13, 14, 15, 16, 17, 18, 19, 20, 21, 22, 23, 24, 25 or 30 amino acid comprising the Va or the Vb domain. An AABD of the disclosure may be operably linked to or near the N-terminus of another domain either directly or via an intervening linker sequence.

[0486] As used herein a “non-naturally occurring agent” or “non-native” or “exogenous”, “heterologous” or “non-endogenous” or “non-natural” refers to an agent (e.g., a gene, protein, compound, molecule) that is not naturally expressed in a cell or a subject. Stated another way, the non-naturally occurring agent or heterologous agent is “engineered” to be expressed in a cell.

[0487] As used herein a “non-naturally occurring immune receptor” or “exogenous immune receptor” “non-naturally occurring receptor” refers to an immune receptor that is not naturally expressed in an immune cell. Stated another way, the non-naturally occurring immune receptor is “engineered” to be expressed in an immune cell. An example non-naturally occurring immune receptors is a SAR (e.g., 2^{nd} generation CAR, SIR, cTCR, STAR, zSIR, Ab-TCRs, TFPs and recombinant TCR).

[0488] As used herein a “non-naturally occurring TCR antigen binding domain” or “exogenous TCR antigen binding domain” refers to a binding domain operably linked to a TCR constant region that is chimeric and non-naturally occurring with respect to a TCR present in nature. Stated another way, the non-naturally occurring TCR antigen binding domain is “engineered” using recombinant molecular biology techniques to be operably linked to a TCR and moreover, that the antigen binding domain is obtain or derived from a molecule that is distinct from a TCR found in nature. An antigen binding domain that is distinct from a TCR in nature includes antibody, antibody fragments, vH and vL fragments, scFv, humanized antibody fragments, chimeric antibody fragments, adaptors, non-immunoglobulin antigen binding scaffold, receptor, ligands, and the like.

[0489] As used herein a “non-naturally occurring antigen binding domain” or “non-naturally occurring extracellular antigen binding domain” or “heterologous antigen binding domain” refers to an antigen binding domain that is not part of a naturally occurring receptor. Example heterologous antigen binding domains include antibodies, antibody fragments (e.g., vL, vH, scFv, Fab, F(ab)2 etc.), single domain antibodies (e.g., sVH, FHVH, vHH etc.), non-immunoglobulin antigen binding domains, single variable domain-TCR (svd-TCR), recombinant TCRs, HLA-independent TCR, scTCR, epitopes, adaptors, ligands, and receptors.

[0490] The term “non-TCR antigen binding domain” refers to an antigen binding domain that is not a TCR antigen binding domain. A non-TCR antigen binding domain is structurally distinct from the variable domains (i.e., Vα, Vβ, Vγ and Vδ) found in a TCR. Example non-TCR antigen binding domains include antibody, antibody fragments (e.g., vL, vH, scFv, Fab, F(ab)2 etc.), single domain antibodies (e.g., sVH, FHVH, vHH etc.), chimeric antibody fragments, adaptors, non-immunoglobulin antigen binding scaffold (e.g., DARPIN, D domains etc.), adaptors, extracellular Fc binding domains of receptors (e.g., CD16, CD64 etc.), ligands, cytokines and the like.

[0491] The term “operably linked” or “functionally linked” or “operationally linked” refers to functional linkage or association between a first component and a second component such that each component can be functional.

[0492] “Percent identity” in the context of two or more nucleic acids or polypeptide sequences, refers to two or more sequences that are the same. Two sequences are “substantially identical” if two sequences have a specified percentage of amino acid residues or nucleotides that are the same (e.g., 60% identity, optionally 70%, 71%, 72%, 73%, 74%, 75%, 76%, 77%, 78%, 79%, 80%, 81%, 82%, 83%, 84%, 85%, 86%, 87%, 88%, 89%, 90%, 91%, 92%, 93%, 94%, 95%, 96%, 97%, 98%, 99% identity over a specified region, or, when not specified, over the entire sequence), when compared and aligned for maximum correspondence over a comparison window, or designated region as measured using one of the following sequence comparison algorithms or by manual alignment and visual inspection. Optionally, the identity exists over a region that is at least about 50 nucleotides (or 10 amino acids) in length, or more typically over a region that is 100 to 500 or 1000 or more nucleotides (or 20, 50, 200 or more amino acids) in length. Two examples of algorithms that can be used for determining percent sequence identity and sequence similarity are the BLAST and BLAST 2.0 algorithms.

[0493] The term “peptide” as used herein refers to a linear series of amino acids connected one to the other preferably by peptide bonds between the alpha-amino and carboxy groups of adjacent residues. As used herein the term “amino acid” refers to either natural and/or unnatural or synthetic amino acids, including glycine and both the D or L optical isomers, and amino acid analogs and peptidomimetics, with proteogenic amino acids being preferred. A “proteinogenic amino acid” is an amino acid that can be incorporated biosynthetically into proteins during translation. Currently, there are 22 known genetically encoded (proteinogenic) amino acids, 20 in the standard genetic code and an additional 2 that can be incorporated by special translation mechanisms. The “peptide” as used herein preferably comprises no more than about 50 amino acids.

[0494] The term “polypeptide” as used herein usually refers to a peptide having at least about 30, at least about 40, or at least about 50 amino acids. The term “protein” as used herein comprises one or more polypeptides.

[0495] The term “fusion protein” as used herein refers to a polypeptide or protein comprising two or more subunits. At least one of the subunits is preferably a protein or polypeptide, and at least one of the subunits is preferably a peptide. Within the fusion protein, these subunits may be linked by covalent or non-covalent linkage. Preferably, the fusion protein is a translational fusion between the two or more subunits. The translational fusion may be generated by genetically engineering the coding nucleotide sequence for one subunit in a reading frame with the coding nucleotide sequence of a further subunit. Subunits may be interspersed by a linker.

[0496] As used here “Polatuzumab vedotin”, “Polatuzumab” or “Pola” or “DCDS4501A”, “RG7596”, “RG-7596” “polatuzumab vedotin-piiq” “ACD79B-VCMMAE”, “R05541077-000” sold under the brand name Polivy®, is a CD79b-directed antibody-drug conjugate medication used for the treatment of diffuse large B-cell lymphoma. Polatuzumab vedotin-piiq contains an anti-CD79b monoclonal antibody linked to the toxin monomethyl auristatin E. The drug has CAS Number 1313206-42-6, IUPHAR/BPS number 8404, DrugBank number DB12240 and INN number 9714. The peptide sequence of the antibody is described in U.S. Pat. No. 8,088,378 as the claiming patent. The sequence of the heavy chain and light chain of Polatuzumab vedotin are presented in SEQ ID NO (PRT): 1194 and 1195, respectively.

[0497] As used herein, the term “receptor” refers to a polypeptide, or portion thereof, present on a cell membrane that selectively binds one or more ligand.

[0498] As used herein, the terms “region” or “portion” when used in reference to a nucleic acid molecule refers to a set of linked nucleotides that is less than the entire length of the molecule, such as a CD3ζ signaling region described herein.

[0499] The term “retrovirus vector” refers to a vector derived from at least a portion of a retrovirus genome. Examples of retrovirus vector include MSCVneo or MSCVpac.

[0500] The term “SABR” or “SHARP Antigen Binding Reagent” as used herein, refers to any reagent that binds to a SHARP-tag or an epitope tag described herein. Examples of SABR include antibodies, antibody fragments, antibody conjugates and non-immunoglobulin antigen binding scaffolds. Polatuzumab vedotin, SN8, 2F2, huMA79b, H2Mab-250 are some examples of SABRs described in this disclosure.

[0501] The term “SAR” or “Synthetic Antigen Receptor,” as used herein, refers to any non-native antigen binding receptor that is expressed on the surface of a cell (e.g., immune cell). The “Synthetic Antigen Receptor” or “SAR” is a non-naturally occurring receptor or a synthetic receptor that can be expressed on the surface of a cell and comprises at least one heterologous antigen binding domain and at least one membrane associated domain, wherein the membrane associated domain can be a transmembrane domain or a membrane anchoring domain (i.e., a GPI linked domain). The antigen binding domain of the SAR is heterologous to its membrane associated domain, i.e., the antigen binding domain is derived from a different source than the membrane associated domain. A SAR may further comprise a hinge domain, an extracellular ligand binding domain and/or an optional cytosolic domain. In an embodiment, a SAR comprises a polypeptide or a set of polypeptides, which when expressed in an effector cell, provides the cell with specificity for a target cell, typically a cancer cell, and with intracellular signal generation. A SAR can be single chain, two chains or more than two chains. A SAR can be unispecific, bispecific, or multi-specific. A SAR may have one or more heterologous antigen binding domains. The term SAR comprises conventional CARs (e.g., 2^{nd} generation CARs comprising 41BB or CD28 costimulatory domains and CD3z activation domain) and also encompasses newer approaches to conferring antigen specificity onto cells, such as Antibody-TCR chimeric molecules or Ab-TCR (WO 2017/070608 A1 incorporated herein by reference), TCR receptor fusion proteins or TFP (WO 2016/187349 A1 incorporated herein by reference), Synthetic Immune Receptors (SIRs) (see, WO 2018/102795 A1, incorporated herein by reference), STAR (see, WO 2020/029774), HLA-independent TCR (see, WO2019157454A1), Tri-functional T cell antigen coupler (Tri-TAC or TAC) (see, WO 2015/117229 A1, incorporated herein by reference) and zSIR (see, PCT/US2019/035096, incorporated herein by reference). Bispecific and multi-specific SARs have been described in PCT/US2021/022641. The term “SAR” covers CAR as well as other antigen binding receptors, including but not limited to recombinant TCR. The SAR also comprises compositions comprising one or more regions derived from CD16A, CD16B, CD3ζ, DAP10, DAP12, FcRγ, TCRαβ and TCRγδ etc. and variants and fragments thereof.

[0502] The term “single-chain synthetic antigen receptor” or “single chain SAR” means a synthetic antigen receptor comprising a single polypeptide chain.

[0503] The term “double-chain synthetic antigen receptor” or “double chain SAR” means a synthetic antigen receptor comprising two polypeptide chains wherein each chain comprises at least one antigen binding domain and a signaling chain. Example double chain SARs include Synthetic Immune Receptors (SIRs) (see, WO 2018/102795 A1, incorporated herein by reference), and zSIR (see, PCT/US2019/035096, incorporated herein by reference). Bispecific and multi-specific SARs have been described in PCT/US2021/022641.

[0504] The term “One and half-chain synthetic antigen receptor” means a synthetic antigen receptor comprising two polypeptide chains wherein one chain comprises at least one antigen binding domain and a signaling chain (e.g., TCRα constant chain) and the other chain comprises a signaling chain (e.g., TCRβ constant chain) but lacks an antigen binding domain. Example one and a half chain SARs include Synthetic Immune Receptors (SIRs) (see, WO 2018/102795 A1, incorporated herein by reference).

[0505] Typically, the term “SAR-T” is used, to refer to T-cells that have been engineered to express a Synthetic antigen receptor. The term “SAR-NK” refers to an NK cell that has been engineered to express a SAR.

[0506] The term “Synthetic Immune Receptor” or alternatively an “SIR” refers to a set of polypeptides, typically two in some embodiments, which when expressed in an effector cell, provides the cell with specificity for a target cell, typically a cancer cell, and with intracellular signal generation. SIRs represent next generation CAR platforms that are described in WO 2018/102795 A1 which is incorporated herein by reference. In a typical embodiment, a SIR comprises one or more antigen binding domains (e.g., antibody or antibody fragment, a ligand, or a receptor) that bind to antigens as described herein and are joined to one or more T cell receptor constant chains or regions via an optional linker. In some embodiments, the set of polypeptides are contiguous with each other. In some embodiments, a SIR comprises two or more sets of two or more polypeptides. The polypeptides of each set of SIRs are contiguous with each other (functional polypeptide unit 1) but are not contiguous with the polypeptides of the other set (functional polypeptide unit 2). In some embodiments, the T cell receptor constant chains (or regions) of the SIR is chosen from the constant chain of human T cell receptor-alpha (TCR-alpha or TCRα or TCRa or hTCR-alpha or hTCRα or hTCRa or Cα), human T cell receptor-beta1 (TCR-beta1 or TCRβ1 or TCRb1 or hTCR-beta1 or hTCRβ1 or hTCRb1 or Cβ1), human T cell receptor-beta 2 (TCR-beta2 or TCRβ2 or TCRb2 or hTCR-beta2 or hTCRβ2 or hTCRb2 or Cβ2 also designated TCR-beta, TCRβ or TCRb or Cβ), human Pre-T cell receptor alpha ((preTCR-alpha or preTCRα or preTCRa or preCα), human T cell receptor-gamma (TCR-gamma or TCRγ or TCRg or hTCRgamma or hTCRγ or hTCRg or hTCRγ1 or hTCRgamma1, or Cγ), or human T cell receptor-delta (TCR-delta or TCRd or TCRδ or hTCR-delta or hTCRd or hTCRδ or Cδ). In some embodiments, the TCR constant chains of SIR are encoded by their wild-type nucleotide sequences while in other aspects the TCR constant chains of SIR are encoded by the nucleotide sequences that are not wild-type. In some embodiments, the TCR constant chains of SIR are encoded by their human codon optimized sequences. In some embodiments, the TCR constant chains of SIR encode for the wild-type polypeptide sequences while in other embodiments the TCR constant chains of SIR encoded for polypeptides that carry one or more mutations. In some embodiments, the TCR constant chains of SIR are encoded by their codon optimized sequences that carry one or more mutations.

[0507] As use herein, the term “specifically binds” or “is specific for” refers to measurable and reproducible interactions, such as binding between a target and an antibody or antibody moiety, that is determinative of the presence of the target in the presence of a heterogeneous population of molecules, including biological molecules.

[0508] The term “signaling domain” refers to the functional region of a protein which transmits information within the cell to regulate cellular activity via defined signaling pathways by generating second messengers or functioning as effectors by responding to such messengers.

[0509] The term “signaling module” refers to a molecule or molecular complex comprising one or more signaling mediators or signaling adaptors that is capable of initiating a cell signal.

[0510] The term “signaling mediator” or “signaling adaptor” refers to molecule that is capable of initiating or inhibiting a cell signal when recruited by a natural or a non-natural signaling receptor.

[0511] The term “signaling chain” or “signaling fragment” refers to a polypeptide comprising the transmembrane and/or intracellular region and optionally the extracellular hinge/connecting peptide regions of a cell signaling receptor. Example signaling chains include the constant chains of TCRα, TCRβ, TCRγ and TCRδ. Additional example signaling chains include chains comprising the transmembrane and/or intracellular regions of CD16, NKp30, NKp44, NKp46, DAP10, DAP12, DNAM-1, NKG2D, CD32, CD64, KIR3DL1, KIR2DS4, FcRγ and CD3z.

[0512] The term SVH domain as used herein refers to a single human V_{H} domain antibody (V_{H} sdAb). These terms are thus used interchangeably. The term SVH is also used interchangeably with independent vH domains.

[0513] The term “subject” is intended to include living organisms in which an immune response can be elicited (e.g., any domesticated mammals or a human).

[0514] As used herein, “tag cassette”, “tag”, “epitope tag”, “mAb specific-epitope”, “SHARP-tag”. or “SHARP-tag” refers to a unique peptide sequence affixed to, fused to, or that is part of a protein of interest, to which a heterologous or non-endogenous cognate binding molecule (e.g., receptor, ligand, antibody, or other binding partner) is capable of specifically binding where the binding property can be used to detect, identify, isolate or purify, track, enrich for, or target a tagged protein or cells expressing a tagged protein, particularly when a tagged protein is part of a heterogeneous population of proteins or other material, or when cells expressing a tagged protein are part of a heterogeneous population of cells (e.g., a biological sample like peripheral blood). In certain embodiments, a cell expressing a tagged protein can be contacted with a heterologous or non-endogenous cognate binding molecule and induce a biological response, such as promote cell activation, cell proliferation or cell death. In the provided fusion proteins, the ability of the tag cassette(s) to be specifically bound by the cognate binding molecule(s) is distinct from or in addition to the ability of the binding domain(s) to specifically bind to the target molecule(s). The tag cassette generally is not an antigen-binding molecule, for example, is not an antibody or TCR or an antigen-binding portion thereof. Examples of tags (e.g., SHARP-tags) are provided in SEQ ID NO: 1-123, 150-167, 251-440, 550-579, 631-650, 651-654, 656, 674-676, 686, 689, and 692-720. Tags may be present in multiple copies in fusion proteins of this disclosure. For example, a fusion protein of this disclosure can have one, two, three, four or five tag cassettes. In certain embodiments, a connector region of a TAG-SAR includes one tag cassette, two tag cassettes, three tag cassettes, four tag cassettes, or five tag cassettes. Each of the plurality of tag cassettes may be the same or different composition (e.g., P8, P9, P10, P11 etc.). Each of the plurality of tag cassettes may be recognized by the same or different binding agents (e.g., monoclonal antibody). For example, a TAG-SAR may comprise P11 (SEQ ID NO: 674), P13 (SEQ ID NO: 675) or P16 (SEQ ID NO: 675) tags that are all recognized by Polatuzumab vedotin, SN8 or 2F2 antibodies. Alternatively, a TAG-SAR may comprise a P11 tag (SEQ ID NO: 674) and a Her2 tag (SEQ ID NO: 557) that are recognized by Polatuzumab and H2Mab-250 antibodies, respectively. Alternatively, a TAG-SAR will have multiple tag cassettes of the same type or same amino acid sequence, such as two, three, four or five tag cassettes (e.g., P8, P9, P10, P11 etc.).

[0515] Unless otherwise indicated, “SHARP-tag” encompasses the sequences represented by SEQ ID NO: 1-123, 150-167, 251-440, 550-579, 631-650, 651-654, 656, 674-676, 686, 689, and 692-720 as well as variants that maintain function (i.e., recognition by SABR). Such variants may include insertions, deletions, or substitutions of one or more residues (for example, up to 1-3 conservative substitutions) or longer versions (e.g., 9-15 amino acids) that retain the core epitope conformation. A SHARP-tag that is recognized by Polatuzumab is referred as a “Pola-tag” or “Pola tag”. The P8, P9, P10, P11, P12, P13 tags refer to SEQ ID NO:47-55, respectively. A SHARP-tag that is recognized by H2Mab-250 is referred as a “Her2-tag” or “H-tag”. The examples of Her2 or H-tags include SEQ ID NO:557-566 and functional variants that specifically bind to H2Mab-250.

[0516] A SHARP-tagged polypeptide, such as a TAG-SAR, may have two different epitope tags or tag cassettes. In some embodiments, a first tag cassette can provide a stimulation signal and a distinct second tag cassette might be used to associate with a detection reagent or associate with an antibody-toxin conjugate or with an antibody-imaging agent conjugate. In further embodiments, the two or more first tag cassettes may be located in different areas of a TAG-SAR. In certain embodiments, a first tag cassette in the connector region and a second tag cassette is located at the amino-terminus or carboxy terminus or both of a TAG-SAR.

[0517] In the fusion protein of the invention, the peptide, i.e. the epitope tag, may be located at any position of the fusion protein. The peptide may be fused to the N-terminus or the C-terminus of the polypeptide. Alternatively, the peptide may be fused to the polypeptide at a position between the N-terminus and the C-terminus of the polypeptide. As an illustrative example, the peptide may be fused in between two domains of the polypeptide.

[0518] The polypeptide comprised in the fusion protein may have a stable fold that is independent from the presence or absence of the peptide. This means that the peptide preferably does not alter or interfere with the native structure of the polypeptide.

[0519] In the fusion protein of the invention, the peptide may be fused to the polypeptide either by direct fusion or through a linker. A “linker” as used herein joins together two or more subunits of a fusion protein as described herein. The linkage can be covalent. A preferred covalent linkage is via a peptide bond, such as a peptide bond between amino acids. A preferred linker is a peptide linker. Said linker preferably comprises one or more amino acids, such as 1-20 or more amino acids. Preferred peptide linkers include glycine-serine (GS) linkers, glycosylated GS linkers, and proline-alanine-serine polymer (PAS) linkers.

[0520] The polypeptide comprised in the fusion protein of the invention may comprise at least one protein domain. A “protein domain” as used herein refers to a part of a given protein sequence and (tertiary) structure that can function and/or exist independently of the rest of the protein chain. The protein domain preferably forms a compact three-dimensional structure and often can be independently stable and folded. A protein domain may further form a functional unit. A preferred location for the peptide may be outside of the protein domain. This can be N-terminal or C-terminal of the at least one protein domain of the polypeptide, or in between two protein domains of the polypeptide. The polypeptide comprised in the fusion protein of the invention may be a globular protein, and membrane protein, a fibrous protein, or a natively unfolded protein, or a subunit or domain of the globular protein, membrane protein, fibrous protein, or natively unfolded protein.

[0521] This sequence defines the core structure of the peptide and may further comprise up to two additional amino acids at the N terminus and up to two additional amino acids at the C terminus. Such additional amino acids at the ends of the core structure of the peptide usually do not necessarily influence the secondary structure of the of the peptide or specific binding of the peptide to an antibody specific for the peptide but may serve as linker structures in the fusion protein. Accordingly, type and number of the additional amino acids may depend on the location of the peptide in the fusion protein and may vary depending on whether the peptide is located N-terminal or C-terminal or somewhere in between of the polypeptide.

[0522] In certain embodiments, a tag is located within a connector region of a fusion protein of this disclosure. For example, a connector region may further comprise a linker module adjacent to a tag cassette, wherein the linker module comprises a flexible linker. Exemplary flexible linkers are provided in SEQ ID NO: 1330-1331 and 1453. Additional flexible linkers are known in the art.

[0523] As used herein, the term “TCR” or “T cell receptor” refers to a dimeric heterologous cell surface signaling protein forming an alpha-beta or gamma-delta receptor typically involved in recognizing an antigen presented by an MHC molecule.

[0524] As used herein, the term “TCR constant chain” refers to the constant chain TCRα, TCRβ1, TCRβ2, TCRγ, TCRS and pre-TCRα and functional variants, mutants, alternative spliced isoforms, and homologs from non-human species.

[0525] As used herein, the term “T lymphocyte” or “T cell” refers to a cell expressing CD3 (CD3+) and a T Cell Receptor (TCR+). The term “non-T cell” refers to a cell that is not a T cell. In an embodiment, a non-T cell lacks the cell surface expression of CD3 and a T cell receptor.

[0526] The term “T cell receptor module,” or “TCRM,” refers to a heterodimer comprising sequences derived from a T cell receptor. The TCRM comprises T cell receptor transmembrane domains and may further comprise all or a portion of T cell receptor connecting peptides and/or intracellular domains.

[0527] The term “canonical TCRM” refers to a TCRM that is formed by heterodimerization between canonical TCR chains, i.e., TCRα and TCRβ1 or TCRβ2 chains, TCRγ and TCRδ chains, and pre-TCRα and TCRβ1 or P2 chains. Further, a canonical TCRM refers to a TCRM that is formed between two TCR chains that belong to the same species (e.g., human, mouse etc.).

[0528] The term “non-canonical TCRM” refers to a TCRM that is not formed by the heterodimerization between canonical TCR chains, i.e., TCRα and TCRβ1 or TCRβ2 chains, TCRγ and TCRδ chains, and pre-TCRα and TCRβ1 or P2 chains. A non-canonical TCRM can be formed by heterodimerization of TCRα and TCRγ chains, TCRβ and TCRδ chains. A non-canonical TCRM is also formed between variants of TCRα, β, γ and δ chains, including their deletion mutants and hybrid chains.

[0529] The term “interspecies non-canonical TCRM” refers to a TCRM that is formed by heterodimerization of two TCR chains that belong to different species (e.g., between human TCRα and mouse TCRβ chain).

[0530] The term “Fv” as used here refers to an antigen binding module that is formed by the variable domains of an antibody. A Fv can be formed by the vL and vH domains.

[0531] As used herein a “transmembrane module” or “TMM” refers to a molecule or a molecular complex comprising a transmembrane protein (e.g., TCRα, TCRβ, CD16A or CD3z).

[0532] The term “membrane associated module” or “MAM” refers to a molecule or a molecular complex comprising a transmembrane protein (e.g., CD16A, CD3ζ) or a membrane anchored protein (e.g., CD16B). The term encompasses transmembrane proteins, such as CD16A, CD3z (or CD3ζ) and GPI-linked proteins, such as CD16B. A MAM may further comprise all or portions of hinge domains and/or cytosolic domains.

[0533] The term “TAG-SAR” refers to a SAR comprising at least (i.e., one or more) one tag cassette, e.g., a tag described herein, e.g., SEQ ID NO: 1-123, 150-167, 251-440, 550-579, 631-650, 651-654, 656, 674-676, 686, 689, and 692-720. The tag can be present at any location in a TAG-SAR. The TAG-SAR may comprise one or more than one copy of the tag. The SAR may be a single chain SAR (e.g., a second-generation CAR) or a double chain SAR (e.g., SIR, cTCR, Ab-TCR, STAR, zSIR, z16-SAR, TCR, uTCR-SAR etc.).

[0534] The term “TAG-cell” refers to a cell that expresses a recombinant polypeptide (e.g., a TAG-polypeptide) comprising at least one SHARP-tag or a tag cassette, e.g., a tag described herein, e.g., SEQ ID NO: 1-123, 150-167, 251-440, 550-579, 631-650, 651-654, 656, 674-676, 686, 689, and 692-720. In an embodiment, the recombinant polypeptide comprising a tag cassette can encode for CD79b, including its isoforms. In another embodiment, the recombinant polypeptide comprising a tag cassette can encode for a protein other than CD79b (e.g., a SAR, a multipurpose switch, a cytokine etc.). A TAG-cell can be derived from any cell, e.g., immune effector cell, hematopoietic stem cell, lung cell, breast cell, skin cell, brain cell, muscle cell, iPSC, embryonic stem cell etc. In an embodiment, the TAG-cell is an immune effector cell, e.g., a T cell, NK cell, NKT, macrophage, monocyte, B cell etc. In an embodiment, the TAG-cell is not a B cell. In an embodiment, a TAG-cell is used for the purpose of cell therapy.

[0535] The term “TAG-polypeptide” refers to a recombinant polypeptide comprising at least one SHARP-tag or tag cassette, e.g., a tag described herein, e.g., SEQ ID NO: 1-123, 150-167, 251-440, 550-579, 631-650, 651-654, 656, 674-676, 686, 689, and 692-720.

[0536] The term “TAG-polynucleotide” refers to a recombinant polynucleotide that encodes for at least one SHARP-tag or tag cassette, e.g., a tag described herein, e.g., SEQ ID NO: 1-123, 150-167, 251-440, 550-579, 631-650, 651-654, 656, 674-676, 686, 689, and 692-720. In an embodiment, the recombinant polynucleotide comprising a tag cassette can encode for CD79b, including its isoforms. In another embodiment, the recombinant polynucleotide comprising a tag cassette can encode for a protein other than CD79b (e.g., a SAR, a multipurpose switch, a cytokine etc.). Examples of TAG-polynucleotides are presented in SEQ ID NO: 3105-3123, 3129-3135, 3137-3138, 3140-41, 4757 and 5075-5457. In an embodiment, a TAG-polynucleotide is ectopically introduced in a cell for the purpose of cell therapy. [00561]“Therapeutic agents” as used herein refers to agents that are used to, for example, treat, inhibit, prevent, mitigate the effects of, reduce the severity of, reduce the likelihood of developing, slow the progression of and/or cure, a disease. “Therapeutic Controls” as used herein refers to an element used for controlling the activity of a SAR expressing cell. Examples of therapeutic controls are provided in Table 24 of the provisional application. The term “therapeutic effect” refers to a biological effect which can be manifested by various means, including but not limited to, e.g., decrease in tumor volume, a decrease in the number of cancer cells etc. The phrase “therapeutically effective amount” as used herein means a sufficient amount of the composition to treat a disorder, at a reasonable benefit/risk ratio applicable to any medical treatment.

[0537] The term “transfer vector” refers to a composition of matter which comprises an isolated nucleic acid and which can be used to deliver the isolated nucleic acid to the interior of a cell. Numerous vectors are known in the art including, but not limited to, linear polynucleotides, polynucleotides associated with ionic compounds, plasmids, and viruses. [00563]“Transmembrane domain” (or TM domain) as used herein refers to the region of a receptor, (e.g., a SAR) which crosses the plasma membrane.

[0538] The term “variant” or “functional variant” or “biological variant” refers to a molecule (e.g., DNA, RNA, or protein) that is derived from a reference sequence through one or more alterations, such as substitutions, deletions, insertions, or combinations thereof, and retains at least one biological function or binding specificity of the reference molecule. Unless specified otherwise, the term variant refers to a functional variant or a biological variant. [00565]“Vector,” “cloning vector” and “expression vector” as used herein refer to the vehicle by which a polynucleotide sequence (e.g., a foreign gene) can be introduced into a host cell, so as to transform the host and promote expression (e.g., transcription and translation) of the introduced sequence. Vectors include plasmids, phages, viruses, etc.

[0539] The term “viral vector” refers to a vector obtained or derived from a virus.

[0540] The term “zeta” or alternatively “zeta chain”, “CD3-zeta” or “TCR-zeta” “CD3ζ” is defined as the protein provided as GenBank Ace. No. BAG36664.1, or the equivalent residues from a non-human species, e.g., mouse, rodent, monkey, ape and the like.

### Embodiments

EMBODIMENT 1. A fusion protein comprising: (a) a peptide tag that is at least 60% identical in composition to a peptide present in the extracellular region of an endogenous protein, wherein the peptide tag has the following characteristics:
[0541] a. is between 5-50 amino acids in length;
[0542] b. lacks a disulfide bond;
[0543] c. is hydrophilic;
   (b) and a polypeptide.
   EMBODIMENT 2. The fusion protein of embodiment 1, wherein the peptide tag has one or more of features selected from the group consisting of:
[0544] a) is hypoimmunogenic, nonimmunogenic or minimally immunogenic;
[0545] b) has more than 60% sequence identity to a peptide located in the N-terminal, C-terminal, the juxta membrane region, hinge and/or stalk regions of the extracellular region of an endogenous protein;
[0546] c) has more than 60% sequence identity to a peptide located in the unfolded region of an endogenous protein;
[0547] d) has more than 60% sequence identity to a peptide located in the random coil or unstructured region of an endogenous protein;
[0548] e) lacks a cysteine residue
[0549] f) lacks an Asn-X-Ser/Thr motif, wherein X can be any amino acid residue;
[0550] g) lacks an N-linked glycosylation site;
[0551] h) has an α-helical secondary structure;
[0552] i) is recognized by a drug that is approved by a regulatory agency;
[0553] j) is recognized by a drug that is approved by a regulatory agency for in vivo administration to a subject, optionally wherein the subject is a human subject;
[0554] k) has less than 50% sequence identity to a region of an endogenous protein that is a mutational hot-spot and/or is associated with a congenital or acquired disease;
[0555] l) is not an autoantigen;
[0556] m) has less than 50% sequence identity to a peptide present in the human La protein;
[0557] n) is not a nuclear antigen;
[0558] o) comprises a linear epitope; and/or
[0559] p) does not comprise, consist of, or contain any sequence represented by SEQ ID NOs: 450-455 or a variant with at least 80% sequence identity thereto.
   EMBODIMENT 3. The fusion protein of embodiment 1, wherein the peptide tag comprises a sequence represented by SEQ ID NO: 1-123, 150-167, 251-440, 550-579, 631-650, 651-654, 656, 674-676, 686, 689, and 692-720, or functional variants thereof.
   EMBODIMENT 4. The fusion protein of embodiment 1, wherein the peptide tag comprises or consists of a sequence selected from the group consisting of one or more of the following:
[0560] a) X₁X₂EX₃X₄X₅X₆ wherein X₁ is selected form R, E, or H; X₂ is selected form S, T or A; X₃ is selected form D, S, N, G, A, T, K, L; X₄ is selected form R or H; X₅ is selected form Y or M; and X₆ is any amino acid or any naturally occurring amino acid;
[0561] b) X₁X₂EX₃X₄X₅X₆ wherein X₁ is selected form R, E, or H; X₂ is selected form S, T or A; X₃ is selected form D, S, N, G, A, T, K, L; X₄ is selected form R or H; X₅ is selected form Y or M; and X₆ is selected form R, K, E, D, G, H, L, M, Q, V, W, S, F, I, Y, P, N, T or A;
[0562] c) X₁X₂EX₃X₄X₅X₆ wherein X₁ is selected from R, E, S, N, D, F or H; X₂ is S, T, I, L, M, V, F, H, G, or A; X₃ is D, S, N, G, A, T, K, Q, L, Y, W, R, or V; X₄ is R, H, P, L, T or C; X₅ is Y, M, F, H, D, A, G, I or V; and X₆ is any amino acid or any naturally occurring amino acid;
[0563] d) X₁X₂EX₃X₄X₅X₆ wherein X₁ is selected from R, E, S, N, D, F or H; X₂ is selected from S, T, I, L, M, V, F, H, G, or A; X₃ is selected from D, S, N, G, A, T, K, Q, L, Y, W, R, or V; X₄ is R, H, P, L, T or C; X₅ is selected from Y, M, F, H, D, A, G, I or V; and X₆ is selected from R, K, E, D, G, H, L, M, Q, V, W, S, F, I, Y, P, N, T or A;
[0564] e) X₁X₂EX₃X₄X₅X₆ wherein X₁ is selected from K or R; X₂ is selected from S, T, I, L, M, V, F, H, G, or A; X₃ is selected from D, S, N, G, A, T, K, Q, L, Y, W, R, or V; X₄ is selected from L, R, H, P, T or C; X₅ is selected from Y, M, F, H, D, A, G, I or V; and X₆ is any amino acid or any naturally occurring amino acid;
[0565] f) X₁EX₂ X₃X₄X₅X₆ wherein X₁ is selected from S, T, I, L, M, V, F, H, G, or A; X₂ is selected from D, S, N, G, A, T, K, Q, L, Y, W, R, or V; X₃ is selected from L, R, H, P, T or C; X₄ is selected from Y, M, F, H, D, A, G, I or V; X₅ is P; and X₆ is any amino acid or any naturally occurring amino acid; and/or
[0566] g) X₁X₂X₃EX₄X₅X₆ wherein X₁ is selected from A, G or S; X₂ is selected from K or R; X₃ is selected from S, T, I, L, M, V, F, H, G, or A; X₄ is selected from D, S, N, G, A, T, K, Q, L, Y, W, R, or V; X₅ is selected from L, R, H, P, T or C; and X₆ is selected from Y, M, F, H, D, A, G, I or V.
   EMBODIMENT 5. The fusion protein of embodiment 1, wherein the peptide specifically binds to an antibody, an antibody fragment or an antibody conjugate, wherein the antibody, the antibody fragment or the antibody conjugate comprises
[0567] a) a variable light chain (vL) region represented by SEQ ID NO: 774-794, 808-818 and 2173-2178, and 2183 or variants thereof with up to 20 amino acid substitutions in the framework regions and a complementary variable heavy chain (vH) region represented by SEQ ID NO: 899-919, 937-941, 2179-2182 and 2184 or variants thereof with up to 20 amino acid substitutions in the framework regions; or
[0568] b) a variable light chain (vL) region represented by SEQ ID NO: 783-789 and 791 or variants thereof with up to 20 amino acid substitutions in the framework regions and a complementary variable heavy chain (vH) region represented by SEQ ID NO: 908-914 and 916 or variants thereof with up to 20 amino acid substitutions in the framework regions; or
[0569] c) a variable light chain (vL) region represented by SEQ ID NO: 797 or variants thereof with up to 20 amino acid substitutions in the framework regions and a complementary variable heavy chain (vH) region represented by SEQ ID NO: 922 or variants thereof with up to 20 amino acid substitutions in the framework regions; or
[0570] d) a variable light chain (vL) region represented by SEQ ID NO: 846-847 or variants thereof with up to 20 amino acid substitutions in the framework regions and a complementary variable heavy chain (vH) region represented by SEQ ID NO: 966-970 or variants thereof with up to 20 amino acid substitutions in the framework regions;
[0571] f) a variable light chain (vL) region comprising the light chain CDR1, CDR2 and CDR3 represented by SEQ ID NO: 6653-6673, 7022-7042, 7391-7411, respectively, and a complementary variable heavy chain (vH) region comprising the heavy chain CDR1, CDR2 and CDR3 represented by SEQ ID NO: 6778-6798, 7147-7167, and 7516-7536, respectively.
   EMBODIMENT 6. The antibody, the antibody fragment or the antibody conjugate of embodiment 5, wherein the antibody, the antibody fragment or the antibody conjugate has one or more features selected from the group consisting of:
[0572] a) is approved by the US Food and Drug administration (FDA), optionally wherein the antibody, the antibody fragment or the antibody conjugate is approved for in vivo administration to a human subject;
[0573] b) the antibody fragment or the antibody conjugate is chimeric, partially humanized, or fully human;
[0574] c) is an antibody drug conjugate or a radiolabeled antibody;
[0575] d) is Polatuzumab vedotin, 2F2, SN8, 10D10 or H2Mab-250 or a variant thereof, optionally wherein in the variant is a generic variant.
   EMBODIMENT 7. A fusion protein comprising a peptide tag that the antibody of any one of embodiment 5 binds to
   EMBODIMENT 8. A nucleic acid encoding a fusion protein of embodiment 1.
   EMBODIMENT 0.9. A vector comprising a nucleic acid of embodiment 8.
   EMBODIMENT 10. A host cell comprising the nucleic acid of embodiment 8 or the vector of embodiment 9 or expressing the fusion protein of embodiment 1 or the antibody of any one of embodiment 5.
   EMBODIMENT 11. Use of a peptide tag as defined in embodiment 1 as an epitope tag or for the detection, immobilization, isolation, regulation, control or purification of the fusion protein of embodiment 1 or for the detection, immobilization, isolation, control, depletion, elimination or purification of a host cell of embodiment 10.
   EMBODIMENT 12. A method of detecting, isolating, regulating, controlling or purifying the fusion protein of embodiment 1 or the host cell of embodiment 11, comprising contacting the fusion protein with an antibody of embodiment 5.
   EMBODIMENT 13. A method of enrichment, selection or depletion of a host cell of embodiment 11 by use of an antibody that recognizes the peptide tag of embodiment 1, wherein optionally the antibody is Polatuzumab vedotin.
   EMBODIMENT 14. A kit comprising a nucleic acid or a nucleic acid expression construct encoding a peptide as defined in embodiment 1, or a vector of embodiment 9 and optionally an antibody of embodiment 5.

[0576] The foregoing detailed description and examples are intended to illustrate the breadth and versatility of the invention, not to limit it. It will be evident to those skilled in the art that various modifications and adaptations can be made without departing from the scope of the invention as defined in the claims below.

What is claimed is:

1. A fusion protein comprising:
(a) a peptide tag that is at least 60% identical in composition to a peptide present in the extracellular region of an endogenous protein, wherein the peptide tag has the following characteristics:
a. is between 5-50 amino acids in length;
b. lacks a disulfide bond;
c. is hydrophilic;
(b) and a polypeptide.

2. The fusion protein of claim 1, wherein the peptide tag has one or more of features selected from the group consisting of:
a) is hypoimmunogenic, nonimmunogenic or minimally immunogenic;
b) has more than 60% sequence identity to a peptide located in the N-terminal, C-terminal, the juxta membrane region, hinge and/or stalk regions of the extracellular region of an endogenous protein;
c) has more than 60% sequence identity to a peptide located in the unfolded region of an endogenous protein;
d) has more than 60% sequence identity to a peptide located in the random coil or unstructured region of an endogenous protein;
e) lacks a cysteine residue
f) lacks an Asn-X-Ser/Thr motif, wherein X can be any amino acid residue;
g) lacks an N-linked glycosylation site;
h) has an α-helical secondary structure;
i) is recognized by a drug that is approved by a regulatory agency;
j) is recognized by a drug that is approved by a regulatory agency for in vivo administration to a subject, optionally wherein the subject is a human subject;
k) has less than 50% sequence identity to a region of an endogenous protein that is a mutational hot-spot and/or is associated with a congenital or acquired disease;
l) is not an autoantigen;
m) has less than 50% sequence identity to a peptide present in the human La protein;
n) is not a nuclear antigen;
o) comprises a linear epitope; and/or
p) does not comprise, consist of, or contain any sequence represented by SEQ ID NOs: 450-455 or a variant with at least 80% sequence identity thereto.

3. The fusion protein of claim 1, wherein the peptide tag comprises a sequence represented by SEQ ID NO: 1-123, 150-167, 251-440, 550-579, 631-650, 651-654, 656, 674-676, 686, 689, and 692-720, or functional variants thereof.

4. The fusion protein of claim 1, wherein the peptide tag comprises or consists of a sequence selected from the group consisting of one or more of the following:
a) X₁X₂EX₃X₄X₅X₆ wherein X₁ is selected form R, E, or H; X₂ is selected form S, T or A; X₃ is selected form D, S, N, G, A, T, K, L; X₄ is selected form R or H; X₅ is selected form Y or M; and X₆ is any amino acid or any naturally occurring amino acid;
b) X₁X₂EX₃X₄X₅X₆ wherein X₁ is selected form R, E, or H; X₂ is selected form S, T or A; X₃ is selected form D, S, N, G, A, T, K, L; X₄ is selected form R or H; X₅ is selected form Y or M; and X₆ is selected form R, K, E, D, G, H, L, M, Q, V, W, S, F, I, Y, P, N, T or A;
c) X₁X₂EX₃X₄X₅X₆ wherein X₁ is selected from R, E, S, N, D, F or H; X₂ is S, T, I, L, M, V, F, H, G, or A; X₃ is D, S, N, G, A, T, K, Q, L, Y, W, R, or V; X₄ is R, H, P, L, T or C; X₅ is Y, M, F, H, D, A, G, I or V; and X₆ is any amino acid or any naturally occurring amino acid;
d) X₁X₂EX₃X₄X₅X₆ wherein X₁ is selected from R, E, S, N, D, F or H; X₂ is selected from S, T, I, L, M, V, F, H, G, or A; X₃ is selected from D, S, N, G, A, T, K, Q, L, Y, W, R, or V; X₄ is R, H, P, L, T or C; X₅ is selected from Y, M, F, H, D, A, G, I or V; and X₆ is selected from R, K, E, D, G, H, L, M, Q, V, W, S, F, I, Y, P, N, T or A;
e) X₁X₂EX₃X₄X₅X₆ wherein X₁ is selected from K or R; X₂ is selected from S, T, I, L, M, V, F, H, G, or A; X₃ is selected from D, S, N, G, A, T, K, Q, L, Y, W, R, or V; X₄ is selected from L, R, H, P, T or C; X₅ is selected from Y, M, F, H, D, A, G, I or V; and X₆ is any amino acid or any naturally occurring amino acid;
f) X₁EX₂ X₃X₄X₅X₆ wherein X₁ is selected from S, T, I, L, M, V, F, H, G, or A; X₂ is selected from D, S, N, G, A, T, K, Q, L, Y, W, R, or V; X₃ is selected from L, R, H, P, T or C; X₄ is selected from Y, M, F, H, D, A, G, I or V; X₅ is P; and X₆ is any amino acid or any naturally occurring amino acid; and/or
g) X₁X₂X₃EX₄X₅X₆ wherein X₁ is selected from A, G or S; X₂ is selected from K or R; X₃ is selected from S, T, I, L, M, V, F, H, G, or A; X₄ is selected from D, S, N, G, A, T, K, Q, L, Y, W, R, or V; X₅ is selected from L, R, H, P, T or C; and X₆ is selected from Y, M, F, H, D, A, G, I or V.

5. The fusion protein of claim 1, wherein the peptide specifically binds to an antibody, an antibody fragment or an antibody conjugate, wherein the antibody, the antibody fragment or the antibody conjugate comprises
a) a variable light chain (vL) region represented by SEQ ID NO: 774-794, 808-818 and 2173-2178, and 2183 or variants thereof with up to 20 amino acid substitutions in the framework regions and a complementary variable heavy chain (vH) region represented by SEQ ID NO: 899-919, 937-941, 2179-2182 and 2184 or variants thereof with up to 20 amino acid substitutions in the framework regions; or
b) a variable light chain (vL) region represented by SEQ ID NO: 783-789 and 791 or variants thereof with up to 20 amino acid substitutions in the framework regions and a complementary variable heavy chain (vH) region represented by SEQ ID NO: 908-914 and 916 or variants thereof with up to 20 amino acid substitutions in the framework regions; or
c) a variable light chain (vL) region represented by SEQ ID NO: 797 or variants thereof with up to 20 amino acid substitutions in the framework regions and a complementary variable heavy chain (vH) region represented by SEQ ID NO: 922 or variants thereof with up to 20 amino acid substitutions in the framework regions; or
d) a variable light chain (vL) region represented by SEQ ID NO: 846-847 or variants thereof with up to 20 amino acid substitutions in the framework regions and a complementary variable heavy chain (vH) region represented by SEQ ID NO: 966-970 or variants thereof with up to 20 amino acid substitutions in the framework regions;
f) a variable light chain (vL) region comprising the light chain CDR1, CDR2 and CDR3 represented by SEQ ID NO: 6653-6673, 7022-7042, 7391-7411, respectively, and a complementary variable heavy chain (vH) region comprising the heavy chain CDR1, CDR2 and CDR3 represented by SEQ ID NO: 6778-6798, 7147-7167, and 7516-7536, respectively.

6. The antibody, the antibody fragment or the antibody conjugate of claim 5, wherein the antibody, the antibody fragment or the antibody conjugate has one or more features selected from the group consisting of:
a) is approved by the US Food and Drug administration (FDA), optionally wherein the antibody, the antibody fragment or the antibody conjugate is approved for in vivo administration to a human subject;
b) the antibody fragment or the antibody conjugate is chimeric, partially humanized, or fully human;
c) is an antibody drug conjugate or a radiolabeled antibody;
d) is Polatuzumab vedotin, 2F2, SN8, 10D10 or H2Mab-250 or a variant thereof, optionally wherein in the variant is a generic variant.

7. A fusion protein comprising a peptide tag that the antibody of any one of claim 5 binds to.

8. A nucleic acid encoding a fusion protein of claim 1.

9. A vector comprising a nucleic acid of claim 8.

10. A host cell comprising the nucleic acid of claim 8 or the vector of claim 9 or expressing the fusion protein of claim 1 or the antibody of any one of claim 5.

11. Use of a peptide tag as defined in claim 1 as an epitope tag or for the detection, immobilization, isolation, regulation, control or purification of the fusion protein of claim 1 or for the detection, immobilization, isolation, control, depletion, elimination or purification of a host cell of claim 10.

12. A method of detecting, isolating, regulating, controlling or purifying the fusion protein of claim 1 or the host cell of claim 11, comprising contacting the fusion protein with an antibody of claim 5.

13. A method of enrichment, selection or depletion of a host cell of claim 11 by use of an antibody that recognizes the peptide tag of claim 1, wherein optionally the antibody is Polatuzumab vedotin, 2F2 or H2Mab-250.

14. A kit comprising a nucleic acid or a nucleic acid expression construct encoding a peptide as defined in claim 1, or a vector of claim 9 and optionally an antibody of claim 5.

15. An isolated peptide tag that is at least 60% identical in composition to a peptide present in the extracellular region of an endogenous protein, wherein the peptide tag has the following characteristics:
a. is between 5-50 amino acids in length;
b. lacks a disulfide bond; and
c. is hydrophilic.

16. The peptide tag of claim 15, wherein the peptide tag has one or more of features selected from the group consisting of:
a) is hypoimmunogenic, nonimmunogenic or minimally immunogenic;
b) has more than 60% sequence identity to a peptide located in the N-terminal, C-terminal, the juxta membrane region, hinge and/or stalk regions of the extracellular region of an endogenous protein;
c) has more than 60% sequence identity to a peptide located in the unfolded region of an endogenous protein;
d) has more than 60% sequence identity to a peptide located in the random coil or unstructured region of an endogenous protein;
e) lacks a cysteine residue
f) lacks an Asn-X-Ser/Thr motif, wherein X can be any amino acid residue;
g) lacks an N-linked glycosylation site;
h) has an α-helical secondary structure;
i) is recognized by a drug that is approved by a regulatory agency;
j) is recognized by a drug that is approved by a regulatory agency for in vivo administration to a subject, optionally wherein the subject is a human subject;
k) has less than 50% sequence identity to a region of an endogenous protein that is a mutational hot-spot and/or is associated with a congenital or acquired disease;
l) is not an autoantigen;
m) has less than 50% sequence identity to a peptide present in the human La protein;
n) is not a nuclear antigen;
o) comprises a linear epitope; and/or
p) does not comprise, consist of, or contain any sequence represented by SEQ ID NOs: 450-455 or a variant with at least 80% sequence identity thereto.

17. The peptide tag of claim 1, wherein the peptide tag comprises a sequence represented by SEQ ID NO: 1-123, 150-167, 251-440, 550-579, 631-650, 651-654, 656, 674-676, 686, 689, and 692-720, or functional variants thereof.

18. The peptide tag of claim 1, wherein the peptide tag comprises or consists of a sequence selected from the group consisting of one or more of the following:
a) X₁X₂EX₃X₄X₅X₆ wherein X₁ is selected form R, E, or H; X₂ is selected form S, T or A; X₃ is selected form D, S, N, G, A, T, K, L; X₄ is selected form R or H; X₅ is selected form Y or M; and X₆ is any amino acid or any naturally occurring amino acid;
b) X₁X₂EX₃X₄X₅X₆ wherein X₁ is selected form R, E, or H; X₂ is selected form S, T or A; X₃ is selected form D, S, N, G, A, T, K, L; X₄ is selected form R or H; X₅ is selected form Y or M; and X₆ is selected form R, K, E, D, G, H, L, M, Q, V, W, S, F, I, Y, P, N, T or A;
c) X₁X₂EX₃X₄X₅X₆ wherein X₁ is selected from R, E, S, N, D, F or H; X₂ is S, T, I, L, M, V, F, H, G, or A; X₃ is D, S, N, G, A, T, K, Q, L, Y, W, R, or V; X₄ is R, H, P, L, T or C; X₅ is Y, M, F, H, D, A, G, I or V; and X₆ is any amino acid or any naturally occurring amino acid;
d) X₁X₂EX₃X₄X₅X₆ wherein X₁ is selected from R, E, S, N, D, F or H; X₂ is selected from S, T, I, L, M, V, F, H, G, or A; X₃ is selected from D, S, N, G, A, T, K, Q, L, Y, W, R, or V; X₄ is R, H, P, L, T or C; X₅ is selected from Y, M, F, H, D, A, G, I or V; and X₆ is selected from R, K, E, D, G, H, L, M, Q, V, W, S, F, I, Y, P, N, T or A;
e) X₁X₂EX₃X₄X₅X₆ wherein X₁ is selected from K or R; X₂ is selected from S, T, I, L, M, V, F, H, G, or A; X₃ is selected from D, S, N, G, A, T, K, Q, L, Y, W, R, or V; X₄ is selected from L, R, H, P, T or C; X₅ is selected from Y, M, F, H, D, A, G, I or V; and X₆ is any amino acid or any naturally occurring amino acid;
f) X₁EX₂ X₃X₄X₅X₆ wherein X₁ is selected from S, T, I, L, M, V, F, H, G, or A; X₂ is selected from D, S, N, G, A, T, K, Q, L, Y, W, R, or V; X₃ is selected from L, R, H, P, T or C; X₄ is selected from Y, M, F, H, D, A, G, I or V; X₅ is P; and X₆ is any amino acid or any naturally occurring amino acid; and/or
g) X₁X₂X₃EX₄X₅X₆ wherein X₁ is selected from A, G or S; X₂ is selected from K or R; X₃ is selected from S, T, I, L, M, V, F, H, G, or A; X₄ is selected from D, S, N, G, A, T, K, Q, L, Y, W, R, or V; X₅ is selected from L, R, H, P, T or C; and X₆ is selected from Y, M, F, H, D, A, G, I or V.

19. The peptide tag of claim 1, wherein the peptide specifically binds to an antibody, an antibody fragment or an antibody conjugate, wherein the antibody, the antibody fragment or the antibody conjugate comprises
a) a variable light chain (vL) region represented by SEQ ID NO: 774-794, 808-818 and 2173-2178, and 2183 or variants thereof with up to 20 amino acid substitutions in the framework regions and a complementary variable heavy chain (vH) region represented by SEQ ID NO: 899-919, 937-941, 2179-2182 and 2184 or variants thereof with up to 20 amino acid substitutions in the framework regions; or
b) a variable light chain (vL) region represented by SEQ ID NO: 783-789 and 791 or variants thereof with up to 20 amino acid substitutions in the framework regions and a complementary variable heavy chain (vH) region represented by SEQ ID NO: 908-914 and 916 or variants thereof with up to 20 amino acid substitutions in the framework regions; or
c) a variable light chain (vL) region represented by SEQ ID NO: 797 or variants thereof with up to 20 amino acid substitutions in the framework regions and a complementary variable heavy chain (vH) region represented by SEQ ID NO: 922 or variants thereof with up to 20 amino acid substitutions in the framework regions; or
d) a variable light chain (vL) region represented by SEQ ID NO: 846-847 or variants thereof with up to 20 amino acid substitutions in the framework regions and a complementary variable heavy chain (vH) region represented by SEQ ID NO: 966-970 or variants thereof with up to 20 amino acid substitutions in the framework regions;
f) a variable light chain (vL) region comprising the light chain CDR1, CDR2 and CDR3 represented by SEQ ID NO: 6653-6673, 7022-7042, 7391-7411, respectively, and a complementary variable heavy chain (vH) region comprising the heavy chain CDR1, CDR2 and CDR3 represented by SEQ ID NO: 6778-6798, 7147-7167, and 7516-7536, respectively.

20. The antibody, the antibody fragment or the antibody conjugate of claim 19 wherein the antibody, the antibody fragment or the antibody conjugate has one or more features selected from the group consisting of:
a) is approved by the US Food and Drug administration (FDA), optionally wherein the antibody, the antibody fragment or the antibody conjugate is approved for in vivo administration to a human subject;
b) the antibody fragment or the antibody conjugate is chimeric, partially humanized, or fully human;
c) is an antibody drug conjugate or a radiolabeled antibody;
d) is Polatuzumab vedotin, 2F2, SN8, 10D10 or H2Mab-250 or a variant thereof, optionally wherein in the variant is a generic variant.

The application's sequence listing, which the Patent Office published only in electronic form, follows.

SEQUENCE LISTING (9153 sequences)

SEQ ID NO: 1 - protein, 6 aa, synthetic construct
RSEDRY

SEQ ID NO: 2 - protein, 7 aa, synthetic construct
RSEDRYR

SEQ ID NO: 3 - protein, 8 aa, synthetic construct
RSEDRYRN

SEQ ID NO: 4 - protein, 9 aa, synthetic construct
RSEDRYRNP

SEQ ID NO: 5 - protein, 10 aa, synthetic construct
RSEDRYRNPK

SEQ ID NO: 6 - protein, 11 aa, synthetic construct
RSEDRYRNPKG

SEQ ID NO: 7 - protein, 12 aa, synthetic construct
RSEDRYRNPKGS

SEQ ID NO: 8 - protein, 13 aa, synthetic construct
RSEDRYRNPKGSA

SEQ ID NO: 9 - protein, 14 aa, synthetic construct
RSEDRYRNPKGSAC

SEQ ID NO: 10 - protein, 15 aa, synthetic construct
RSEDRYRNPKGSACK

SEQ ID NO: 11 - protein, 15 aa, synthetic construct
RSEDRYRNPKGSACS

SEQ ID NO: 12 - protein, 6 aa, synthetic construct
RSEDHY

SEQ ID NO: 13 - protein, 6 aa, synthetic construct
RSESRY

SEQ ID NO: 14 - protein, 6 aa, synthetic construct
RSENRY

SEQ ID NO: 15 - protein, 6 aa, synthetic construct
RSEGRY

SEQ ID NO: 16 - protein, 6 aa, synthetic construct
RSEARY

SEQ ID NO: 17 - protein, 6 aa, synthetic construct
RSEQRY

SEQ ID NO: 18 - protein, 6 aa, synthetic construct
RSEKRY

SEQ ID NO: 19 - protein, 6 aa, synthetic construct
RSELRY

SEQ ID NO: 20 - protein, 6 aa, synthetic construct
RSETRY

SEQ ID NO: 21 - protein, 7 aa, synthetic construct
RSEDRYK

SEQ ID NO: 22 - protein, 7 aa, synthetic construct
RSEDRYS

SEQ ID NO: 23 - protein, 7 aa, synthetic construct
RSEDRYF

SEQ ID NO: 24 - protein, 7 aa, synthetic construct
RSEDRYI

SEQ ID NO: 25 - protein, 7 aa, synthetic construct
RSEDRYN

SEQ ID NO: 26 - protein, 7 aa, synthetic construct
RSEDRYT

SEQ ID NO: 27 - protein, 7 aa, synthetic construct
RSEDRYA

SEQ ID NO: 28 - protein, 7 aa, synthetic construct
RSEDHYR

SEQ ID NO: 29 - protein, 7 aa, synthetic construct
RSESRYR

SEQ ID NO: 30 - protein, 7 aa, synthetic construct
RSENRYR

SEQ ID NO: 31 - protein, 7 aa, synthetic construct
RSEGRYR

SEQ ID NO: 32 - protein, 7 aa, synthetic construct
RSEARYR

SEQ ID NO: 33 - protein, 7 aa, synthetic construct
RSEQRYR

SEQ ID NO: 34 - protein, 7 aa, synthetic construct
RSEKRYR

SEQ ID NO: 35 - protein, 7 aa, synthetic construct
RSELRYR

SEQ ID NO: 36 - protein, 7 aa, synthetic construct
RSETRYR

SEQ ID NO: 37 - protein, 7 aa, synthetic construct
RSEDHYK

SEQ ID NO: 38 - protein, 7 aa, synthetic construct
RSESRYK

SEQ ID NO: 39 - protein, 7 aa, synthetic construct
RSENRYK

SEQ ID NO: 40 - protein, 7 aa, synthetic construct
RSEGRYK

SEQ ID NO: 41 - protein, 7 aa, synthetic construct
RSEARYK

SEQ ID NO: 42 - protein, 7 aa, synthetic construct
RSEKRYK

SEQ ID NO: 43 - protein, 7 aa, synthetic construct
RSELRYK

SEQ ID NO: 44 - protein, 7 aa, synthetic construct
RSETRYK

SEQ ID NO: 45 - protein, 7 aa, synthetic construct
RSEQRYK

SEQ ID NO: 46 - protein, 7 aa, synthetic construct
ARSEDRY

SEQ ID NO: 47 - protein, 8 aa, synthetic construct
ARSEDRYR

SEQ ID NO: 48 - protein, 9 aa, synthetic construct
ARSEDRYRN

SEQ ID NO: 49 - protein, 10 aa, synthetic construct
ARSEDRYRNP

SEQ ID NO: 50 - protein, 11 aa, synthetic construct
ARSEDRYRNPK

SEQ ID NO: 51 - protein, 12 aa, synthetic construct
ARSEDRYRNPKG

SEQ ID NO: 52 - protein, 13 aa, synthetic construct
ARSEDRYRNPKGS

SEQ ID NO: 53 - protein, 14 aa, synthetic construct
ARSEDRYRNPKGSA

SEQ ID NO: 54 - protein, 15 aa, synthetic construct
ARSEDRYRNPKGSAC

SEQ ID NO: 55 - protein, 16 aa, synthetic construct
ARSEDRYRNPKGSACK

SEQ ID NO: 56 - protein, 16 aa, synthetic construct
ARSEDRYRNPKGSACS

SEQ ID NO: 57 - protein, 11 aa, synthetic construct
ARSEDRYRNPK

SEQ ID NO: 58 - protein, 11 aa, synthetic construct
ARSDDRYRNPK

SEQ ID NO: 59 - protein, 11 aa, synthetic construct
ARSDERYRNPK

SEQ ID NO: 60 - protein, 11 aa, synthetic construct
ARAEDRYRNPK

SEQ ID NO: 61 - protein, 11 aa, synthetic construct
ARNEDRYRNPK

SEQ ID NO: 62 - protein, 11 aa, synthetic construct
ARNEDRYRSPK

SEQ ID NO: 63 - protein, 8 aa, synthetic construct
ARSEDRYR

SEQ ID NO: 64 - protein, 8 aa, synthetic construct
ARSEDRYK

SEQ ID NO: 65 - protein, 8 aa, synthetic construct
ARSEDRYS

SEQ ID NO: 66 - protein, 8 aa, synthetic construct
ARSEDRYF

SEQ ID NO: 67 - protein, 8 aa, synthetic construct
ARSEDRYI

SEQ ID NO: 68 - protein, 8 aa, synthetic construct
ARSEDRYN

SEQ ID NO: 69 - protein, 8 aa, synthetic construct
ARSEDRYT

SEQ ID NO: 70 - protein, 8 aa, synthetic construct
ARSEDRYA

SEQ ID NO: 71 - protein, 8 aa, synthetic construct
ARSEDRYY

SEQ ID NO: 72 - protein, 8 aa, synthetic construct
ARSEDRYP

SEQ ID NO: 73 - protein, 8 aa, synthetic construct
ARSEDRYD

SEQ ID NO: 74 - protein, 8 aa, synthetic construct
ARSEDHYR

SEQ ID NO: 75 - protein, 8 aa, synthetic construct
ARSESRYR

SEQ ID NO: 76 - protein, 8 aa, synthetic construct
ARSENRYR

SEQ ID NO: 77 - protein, 8 aa, synthetic construct
ARSEGRYR

SEQ ID NO: 78 - protein, 8 aa, synthetic construct
ARSEARYR

SEQ ID NO: 79 - protein, 8 aa, synthetic construct
ARSEQRYR

SEQ ID NO: 80 - protein, 8 aa, synthetic construct
ARSEKRYR

SEQ ID NO: 81 - protein, 8 aa, synthetic construct
ARSELRYR

SEQ ID NO: 82 - protein, 8 aa, synthetic construct
ARSETRYR

SEQ ID NO: 83 - protein, 8 aa, synthetic construct
ARSEDRYK

SEQ ID NO: 84 - protein, 8 aa, synthetic construct
ARSEDHYK

SEQ ID NO: 85 - protein, 8 aa, synthetic construct
ARSESRYK

SEQ ID NO: 86 - protein, 8 aa, synthetic construct
ARSENRYK

SEQ ID NO: 87 - protein, 8 aa, synthetic construct
ARSEGRYK

SEQ ID NO: 88 - protein, 8 aa, synthetic construct
ARSEARYK

SEQ ID NO: 89 - protein, 8 aa, synthetic construct
ARSEKRYK

SEQ ID NO: 90 - protein, 8 aa, synthetic construct
ARSELRYK

SEQ ID NO: 91 - protein, 8 aa, synthetic construct
ARSETRYK

SEQ ID NO: 92 - protein, 8 aa, synthetic construct
ARSEQRYK

SEQ ID NO: 93 - protein, 6 aa, synthetic construct
  VARIANT 4: note = D, S, N, G, A, T, K, L
  VARIANT 5: note = R, H
RSEXXY

SEQ ID NO: 94 - protein, 7 aa, synthetic construct
  VARIANT 4: note = D, S, N, G, A, T, K, L
  VARIANT 7: note = X can be any amino acid
  VARIANT 5: note = R, H
RSEXXYX

SEQ ID NO: 95 - protein, 7 aa, synthetic construct
  VARIANT 5: note = D, S, N, G, A, T, K, L
  VARIANT 6: note = R, H
ARSEXXY

SEQ ID NO: 96 - protein, 8 aa, synthetic construct
  REGION 5..6: note = misc_feature - Xaa can be any naturally occurring amino acid
  SITE 8: note = misc_feature - Xaa can be any naturally occurring amino acid
ARSEXXYX

SEQ ID NO: 97 - protein, 7 aa, synthetic construct
  VARIANT 4: note = D, S, N, G, A, T, K or L
  VARIANT 7: note = R, K, S, F, I, N, T or A
  VARIANT 5: note = R or H
RSEXXYX

SEQ ID NO: 98 - protein, 7 aa, synthetic construct
  REGION 4..5: note = misc_feature - Xaa can be any naturally occurring amino acid
  SITE 7: note = misc_feature - Xaa can be any naturally occurring amino acid
RSEXXYX

SEQ ID NO: 99 - protein, 8 aa, synthetic construct
  VARIANT 5: note = D, S, N, G, A, T, K or L
  VARIANT 8: note = R, K, S, F, I, N, T or A
  VARIANT 6: note = R or H
ARSEXXYX

SEQ ID NO: 100 - protein, 8 aa, synthetic construct
  VARIANT 5: note = D, S, N, G, A, T, K, L
  SITE 8: note = misc_feature - Xaa can be any naturally occurring amino acid
  VARIANT 6: note = R or H
ARSEXXYX

SEQ ID NO: 101 - protein, 8 aa, synthetic construct
  SITE 1: note = misc_feature - Xaa can be any naturally occurring amino acid
  VARIANT 5: note = D, S, N, G, A, T, K or L
  VARIANT 8: note = R, K, S, F, I, N, T, A, L, V or M
  VARIANT 6: note = R or H
XRSEXXYX

SEQ ID NO: 102 - protein, 6 aa, synthetic construct
  VARIANT 4: note = X can be any amino acid
  VARIANT 5: note = X can be any amino acid
RSEXXY

SEQ ID NO: 103 - protein, 7 aa, synthetic construct
  SITE 4..5: note = X can be any amino acid
  VARIANT 7: note = X can be any amino acid
RSEXXYX

SEQ ID NO: 104 - protein, 7 aa, synthetic construct
  SITE 5..6: note = X can be any amino acid
ARSEXXY

SEQ ID NO: 105 - protein, 8 aa, synthetic construct
  SITE 5..6: note = X can be any amino acid
  VARIANT 7: note = X can be any amino acid
ARSEXXYX

SEQ ID NO: 106 - protein, 8 aa, synthetic construct
  VARIANT 1: note = X can be any amino acid
  SITE 5..6: note = X can be any amino acid
  VARIANT 7: note = X can be any amino acid
XRSEXXYX

SEQ ID NO: 107 - protein, 8 aa, synthetic construct
  VARIANT 5: note = D, S, N, G, A, T, K, L
  VARIANT 6: note = R, H
  VARIANT 8: note = X can be any amino acid
ARSEXXYX

SEQ ID NO: 108 - protein, 7 aa, synthetic construct
  VARIANT 4: note = D, S, N, G, A, T, K or L
  VARIANT 5: note = R or H
  VARIANT 7: note = R, K, S, F, I, Y, P, N, T, A, L, V or  M
RSEXXYX

SEQ ID NO: 109 - protein, 5 aa, synthetic construct
  VARIANT 5: note = X can be any amino acid
ARSEX

SEQ ID NO: 110 - protein, 5 aa, synthetic construct
  VAR_SEQ 4: note = D, S, N, G, A, T, K or L
RSEXR

SEQ ID NO: 111 - protein, 8 aa, synthetic construct
AHSEDRYR

SEQ ID NO: 112 - protein, 7 aa, synthetic construct
HSEDRYR

SEQ ID NO: 113 - protein, 6 aa, synthetic construct
HSEDRY

SEQ ID NO: 114 - protein, 6 aa, synthetic construct
  VARIANT 4: note = D, S, N, G, A, T, K or L
HSEXRY

SEQ ID NO: 115 - protein, 7 aa, synthetic construct
  VARIANT 4: note = D, S, N, G, A, T, K or L
  VARIANT 5: note = R or H
  VARIANT 7: note = R, K, S, F, I, N, T, A, L, V or M
HSEXXYX

SEQ ID NO: 116 - protein, 7 aa, synthetic construct
  VARIANT 4: note = D, S, N, G, A, T, K or L
  VARIANT 5: note = R or H
  VARIANT 7: note = X can be any amino acid
HSEXXYX

SEQ ID NO: 117 - protein, 8 aa, synthetic construct
AESEDRYR

SEQ ID NO: 118 - protein, 7 aa, synthetic construct
ESEDRYR

SEQ ID NO: 119 - protein, 6 aa, synthetic construct
ESEDRY

SEQ ID NO: 120 - protein, 6 aa, synthetic construct
  VARIANT 4: note = D, S, N, G, A, T, K or L
ESEXRY

SEQ ID NO: 121 - protein, 16 aa, synthetic construct
  SITE 4..5: note = X can be any amino acid
  SITE 7..16: note = X can be any amino acid
RSEXXYXXXXXXXXXX

SEQ ID NO: 122 - protein, 7 aa, synthetic construct
  VARIANT 4: note = D, S, N, G, A, T, K or L
  VARIANT 5: note = R or H
  VARIANT 7: note = R, K, S, F, I, N, T, A, L, V or M
ESEXXYX

SEQ ID NO: 123 - protein, 7 aa, synthetic construct
  VARIANT 4: note = D, S, N, G, A, T, K or L
  VARIANT 5: note = R or H
  VARIANT 7: note = X can be any amino acid
ESEXXYX

SEQ ID NO: 124 - protein, 6 aa, synthetic construct
GGGGGG

SEQ ID NO: 125 - protein, 6 aa, synthetic construct
GGGGGG

SEQ ID NO: 126 - protein, 6 aa, synthetic construct
GGGGGG

SEQ ID NO: 127 - protein, 6 aa, synthetic construct
GGGGGG

SEQ ID NO: 128 - protein, 6 aa, synthetic construct
GGGGGG

SEQ ID NO: 129 - protein, 6 aa, synthetic construct
GGGGGG

SEQ ID NO: 130 - protein, 6 aa, synthetic construct
GGGGGG

SEQ ID NO: 131 - protein, 6 aa, synthetic construct
GGGGGG

SEQ ID NO: 132 - protein, 6 aa, synthetic construct
GGGGGG

SEQ ID NO: 133 - protein, 6 aa, synthetic construct
GGGGGG

SEQ ID NO: 134 - protein, 6 aa, synthetic construct
GGGGGG

SEQ ID NO: 135 - protein, 6 aa, synthetic construct
GGGGGG

SEQ ID NO: 136 - protein, 6 aa, synthetic construct
GGGGGG

SEQ ID NO: 137 - protein, 6 aa, synthetic construct
GGGGGG

SEQ ID NO: 138 - protein, 6 aa, synthetic construct
GGGGGG

SEQ ID NO: 139 - protein, 6 aa, synthetic construct
GGGGGG

SEQ ID NO: 140 - protein, 6 aa, synthetic construct
GGGGGG

SEQ ID NO: 141 - protein, 6 aa, synthetic construct
GGGGGG

SEQ ID NO: 142 - protein, 6 aa, synthetic construct
GGGGGG

SEQ ID NO: 143 - protein, 6 aa, synthetic construct
GGGGGG

SEQ ID NO: 144 - protein, 6 aa, synthetic construct
GGGGGG

SEQ ID NO: 145 - protein, 6 aa, synthetic construct
GGGGGG

SEQ ID NO: 146 - protein, 6 aa, synthetic construct
GGGGGG

SEQ ID NO: 147 - protein, 6 aa, synthetic construct
GGGGGG

SEQ ID NO: 148 - protein, 6 aa, synthetic construct
GGGGGG

SEQ ID NO: 149 - protein, 6 aa, synthetic construct
GGGGGG

SEQ ID NO: 150 - protein, 7 aa, synthetic construct
RSEDRYR

SEQ ID NO: 151 - protein, 8 aa, synthetic construct
ARSEDRYR

SEQ ID NO: 152 - protein, 8 aa, synthetic construct
ARSESRYR

SEQ ID NO: 153 - protein, 8 aa, synthetic construct
ARSETRYR

SEQ ID NO: 154 - protein, 8 aa, synthetic construct
ARSENRYR

SEQ ID NO: 155 - protein, 8 aa, synthetic construct
ARSEGRYR

SEQ ID NO: 156 - protein, 8 aa, synthetic construct
ARAEDRYR

SEQ ID NO: 157 - protein, 8 aa, synthetic construct
ARTEDRYR

SEQ ID NO: 158 - protein, 8 aa, synthetic construct
ARSEDRYK

SEQ ID NO: 159 - protein, 8 aa, synthetic construct
ARSEDRYI

SEQ ID NO: 160 - protein, 11 aa, synthetic construct
ARSEDRYRNHY

SEQ ID NO: 161 - protein, 11 aa, synthetic construct
ARSEDRYRNHP

SEQ ID NO: 162 - protein, 11 aa, synthetic construct
ARSEDRYRNHA

SEQ ID NO: 163 - protein, 11 aa, synthetic construct
ARSEDRYRNPK

SEQ ID NO: 164 - protein, 11 aa, synthetic construct
ARSEDRYRNRH

SEQ ID NO: 165 - protein, 11 aa, synthetic construct
ARSEDRYRNLR

SEQ ID NO: 166 - protein, 11 aa, synthetic construct
ARSEDRYRNRL

SEQ ID NO: 167 - protein, 11 aa, synthetic construct
ARSEDRYRNPT

SEQ ID NO: 168 - protein, 11 aa, synthetic construct
ARSEDRYRNHS

SEQ ID NO: 169 - protein, 6 aa, synthetic construct
GGGGGG

SEQ ID NO: 170 - protein, 6 aa, synthetic construct
GGGGGG

SEQ ID NO: 171 - protein, 6 aa, synthetic construct
GGGGGG

SEQ ID NO: 172 - protein, 6 aa, synthetic construct
GGGGGG

SEQ ID NO: 173 - protein, 6 aa, synthetic construct
GGGGGG

SEQ ID NO: 174 - protein, 6 aa, synthetic construct
GGGGGG

SEQ ID NO: 175 - protein, 6 aa, synthetic construct
GGGGGG

SEQ ID NO: 176 - protein, 6 aa, synthetic construct
GGGGGG

SEQ ID NO: 177 - protein, 6 aa, synthetic construct
GGGGGG

SEQ ID NO: 178 - protein, 6 aa, synthetic construct
GGGGGG

SEQ ID NO: 179 - protein, 6 aa, synthetic construct
GGGGGG

SEQ ID NO: 180 - protein, 6 aa, synthetic construct
GGGGGG

SEQ ID NO: 181 - protein, 6 aa, synthetic construct
GGGGGG

SEQ ID NO: 182 - protein, 6 aa, synthetic construct
GGGGGG

SEQ ID NO: 183 - protein, 6 aa, synthetic construct
GGGGGG

SEQ ID NO: 184 - protein, 6 aa, synthetic construct
GGGGGG

SEQ ID NO: 185 - protein, 6 aa, synthetic construct
GGGGGG

SEQ ID NO: 186 - protein, 6 aa, synthetic construct
GGGGGG

SEQ ID NO: 187 - protein, 6 aa, synthetic construct
GGGGGG

SEQ ID NO: 188 - protein, 6 aa, synthetic construct
GGGGGG

SEQ ID NO: 189 - protein, 6 aa, synthetic construct
GGGGGG

SEQ ID NO: 190 - protein, 6 aa, synthetic construct
GGGGGG

SEQ ID NO: 191 - protein, 6 aa, synthetic construct
GGGGGG

SEQ ID NO: 192 - protein, 6 aa, synthetic construct
GGGGGG

SEQ ID NO: 193 - protein, 6 aa, synthetic construct
GGGGGG

SEQ ID NO: 194 - protein, 6 aa, synthetic construct
GGGGGG

SEQ ID NO: 195 - protein, 6 aa, synthetic construct
GGGGGG

SEQ ID NO: 196 - protein, 6 aa, synthetic construct
GGGGGG

SEQ ID NO: 197 - protein, 6 aa, synthetic construct
GGGGGG

SEQ ID NO: 198 - protein, 6 aa, synthetic construct
GGGGGG

SEQ ID NO: 199 - protein, 6 aa, synthetic construct
GGGGGG

SEQ ID NO: 200 - protein, 6 aa, synthetic construct
GGGGGG

SEQ ID NO: 201 - protein, 6 aa, synthetic construct
GGGGGG

SEQ ID NO: 202 - protein, 6 aa, synthetic construct
GGGGGG

SEQ ID NO: 203 - protein, 6 aa, synthetic construct
GGGGGG

SEQ ID NO: 204 - protein, 6 aa, synthetic construct
GGGGGG

SEQ ID NO: 205 - protein, 6 aa, synthetic construct
GGGGGG

SEQ ID NO: 206 - protein, 6 aa, synthetic construct
GGGGGG

SEQ ID NO: 207 - protein, 6 aa, synthetic construct
GGGGGG

SEQ ID NO: 208 - protein, 6 aa, synthetic construct
GGGGGG

SEQ ID NO: 209 - protein, 6 aa, synthetic construct
GGGGGG

SEQ ID NO: 210 - protein, 6 aa, synthetic construct
GGGGGG

SEQ ID NO: 211 - protein, 6 aa, synthetic construct
GGGGGG

SEQ ID NO: 212 - protein, 6 aa, synthetic construct
GGGGGG

SEQ ID NO: 213 - protein, 6 aa, synthetic construct
GGGGGG

SEQ ID NO: 214 - protein, 6 aa, synthetic construct
GGGGGG

SEQ ID NO: 215 - protein, 6 aa, synthetic construct
GGGGGG

SEQ ID NO: 216 - protein, 6 aa, synthetic construct
GGGGGG

SEQ ID NO: 217 - protein, 6 aa, synthetic construct
GGGGGG

SEQ ID NO: 218 - protein, 6 aa, synthetic construct
GGGGGG

SEQ ID NO: 219 - protein, 6 aa, synthetic construct
GGGGGG

SEQ ID NO: 220 - protein, 6 aa, synthetic construct
GGGGGG

SEQ ID NO: 221 - protein, 6 aa, synthetic construct
GGGGGG

SEQ ID NO: 222 - protein, 6 aa, synthetic construct
GGGGGG

SEQ ID NO: 223 - protein, 6 aa, synthetic construct
GGGGGG

SEQ ID NO: 224 - protein, 6 aa, synthetic construct
GGGGGG

SEQ ID NO: 225 - protein, 6 aa, synthetic construct
GGGGGG

SEQ ID NO: 226 - protein, 6 aa, synthetic construct
GGGGGG

SEQ ID NO: 227 - protein, 6 aa, synthetic construct
GGGGGG

SEQ ID NO: 228 - protein, 6 aa, synthetic construct
GGGGGG

SEQ ID NO: 229 - protein, 6 aa, synthetic construct
GGGGGG

SEQ ID NO: 230 - protein, 6 aa, synthetic construct
GGGGGG

SEQ ID NO: 231 - protein, 6 aa, synthetic construct
GGGGGG

SEQ ID NO: 232 - protein, 6 aa, synthetic construct
GGGGGG

SEQ ID NO: 233 - protein, 6 aa, synthetic construct
GGGGGG

SEQ ID NO: 234 - protein, 6 aa, synthetic construct
GGGGGG

SEQ ID NO: 235 - protein, 6 aa, synthetic construct
GGGGGG

SEQ ID NO: 236 - protein, 6 aa, synthetic construct
GGGGGG

SEQ ID NO: 237 - protein, 6 aa, synthetic construct
GGGGGG

SEQ ID NO: 238 - protein, 6 aa, synthetic construct
GGGGGG

SEQ ID NO: 239 - protein, 6 aa, synthetic construct
GGGGGG

SEQ ID NO: 240 - protein, 6 aa, synthetic construct
GGGGGG

SEQ ID NO: 241 - protein, 6 aa, synthetic construct
GGGGGG

SEQ ID NO: 242 - protein, 6 aa, synthetic construct
GGGGGG

SEQ ID NO: 243 - protein, 6 aa, synthetic construct
GGGGGG

SEQ ID NO: 244 - protein, 6 aa, synthetic construct
GGGGGG

SEQ ID NO: 245 - protein, 6 aa, synthetic construct
GGGGGG

SEQ ID NO: 246 - protein, 6 aa, synthetic construct
GGGGGG

SEQ ID NO: 247 - protein, 6 aa, synthetic construct
GGGGGG

SEQ ID NO: 248 - protein, 6 aa, synthetic construct
GGGGGG

SEQ ID NO: 249 - protein, 6 aa, synthetic construct
GGGGGG

SEQ ID NO: 250 - protein, 6 aa, synthetic construct
GGGGGG

SEQ ID NO: 251-264 - skipped (14 entries)

SEQ ID NO: 265 - protein, 7 aa, synthetic construct
ARSEDRY

SEQ ID NO: 266 - protein, 8 aa, synthetic construct
ARSEDRYR

SEQ ID NO: 267 - protein, 9 aa, synthetic construct
ARSEDRYRN

SEQ ID NO: 268 - protein, 10 aa, synthetic construct
ARSEDRYRNP

SEQ ID NO: 269 - protein, 11 aa, synthetic construct
ARSEDRYRNPK

SEQ ID NO: 270 - protein, 12 aa, synthetic construct
ARSEDRYRNPKG

SEQ ID NO: 271 - protein, 13 aa, synthetic construct
ARSEDRYRNPKGS

SEQ ID NO: 272 - protein, 14 aa, synthetic construct
ARSEDRYRNPKGSA

SEQ ID NO: 273 - protein, 15 aa, synthetic construct
ARSEDRYRNPKGSAC

SEQ ID NO: 274 - protein, 16 aa, synthetic construct
ARSEDRYRNPKGSACK

SEQ ID NO: 275 - protein, 16 aa, synthetic construct
ARSEDRYRNPKGSACS

SEQ ID NO: 276 - protein, 11 aa, synthetic construct
ARSEDRYRNPK

SEQ ID NO: 277 - protein, 11 aa, synthetic construct
ARSDDRYRNPK

SEQ ID NO: 278 - protein, 11 aa, synthetic construct
ARSDERYRNPK

SEQ ID NO: 279 - protein, 11 aa, synthetic construct
ARAEDRYRNPK

SEQ ID NO: 280 - protein, 11 aa, synthetic construct
ARNEDRYRNPK

SEQ ID NO: 281 - protein, 11 aa, synthetic construct
ARNEDRYRSPK

SEQ ID NO: 282 - protein, 15 aa, synthetic construct
RSEDRYRNPKGSACS

SEQ ID NO: 283 - protein, 15 aa, synthetic construct
RSEDRYRNPKGSACK

SEQ ID NO: 284 - protein, 14 aa, synthetic construct
RSEDRYRNPKGSAC

SEQ ID NO: 285 - protein, 13 aa, synthetic construct
RSEDRYRNPKGSA

SEQ ID NO: 286 - protein, 12 aa, synthetic construct
RSEDRYRNPKGS

SEQ ID NO: 287 - protein, 11 aa, synthetic construct
RSEDRYRNPKG

SEQ ID NO: 288 - protein, 10 aa, synthetic construct
RSEDRYRNPK

SEQ ID NO: 289 - protein, 9 aa, synthetic construct
RSEDRYRNP

SEQ ID NO: 290 - protein, 8 aa, synthetic construct
RSEDRYRN

SEQ ID NO: 291 - protein, 7 aa, synthetic construct
RSEDRYR

SEQ ID NO: 292 - protein, 7 aa, synthetic construct
RSEDRYK

SEQ ID NO: 293 - protein, 7 aa, synthetic construct
RSEDRYS

SEQ ID NO: 294 - protein, 7 aa, synthetic construct
RSEDRYF

SEQ ID NO: 295 - protein, 7 aa, synthetic construct
RSEDRYI

SEQ ID NO: 296 - protein, 7 aa, synthetic construct
RSEDRYN

SEQ ID NO: 297 - protein, 7 aa, synthetic construct
RSEDRYT

SEQ ID NO: 298 - protein, 7 aa, synthetic construct
RSEDRYA

SEQ ID NO: 299 - protein, 7 aa, synthetic construct
RSEDHYR

SEQ ID NO: 300 - protein, 7 aa, synthetic construct
RSEGRYR

SEQ ID NO: 301 - protein, 7 aa, synthetic construct
RSEARYR

SEQ ID NO: 302 - protein, 7 aa, synthetic construct
RSEYRYR

SEQ ID NO: 303 - protein, 7 aa, synthetic construct
RSEWRYR

SEQ ID NO: 304 - protein, 7 aa, synthetic construct
RSERRYR

SEQ ID NO: 305 - protein, 7 aa, synthetic construct
RSEVRYR

SEQ ID NO: 306 - protein, 7 aa, synthetic construct
RIEDRYR

SEQ ID NO: 307 - protein, 7 aa, synthetic construct
RLEDRYR

SEQ ID NO: 308 - protein, 7 aa, synthetic construct
RMEDRYR

SEQ ID NO: 309 - protein, 7 aa, synthetic construct
RVEDRYR

SEQ ID NO: 310 - protein, 7 aa, synthetic construct
RAEDRYR

SEQ ID NO: 311 - protein, 7 aa, synthetic construct
RFEDRYR

SEQ ID NO: 312 - protein, 7 aa, synthetic construct
RHEDRYR

SEQ ID NO: 313 - protein, 7 aa, synthetic construct
RGEDRYR

SEQ ID NO: 314 - protein, 7 aa, synthetic construct
RTEDRYR

SEQ ID NO: 315 - protein, 7 aa, synthetic construct
SSEDRYR

SEQ ID NO: 316 - protein, 7 aa, synthetic construct
HSEDRYR

SEQ ID NO: 317 - protein, 7 aa, synthetic construct
DSEDRYR

SEQ ID NO: 318 - protein, 7 aa, synthetic construct
FSEDRYR

SEQ ID NO: 319 - protein, 7 aa, synthetic construct
RSEDRFR

SEQ ID NO: 320 - protein, 7 aa, synthetic construct
RSEDRHR

SEQ ID NO: 321 - protein, 8 aa, synthetic construct
ARSEDRYR

SEQ ID NO: 322 - protein, 8 aa, synthetic construct
ARSEDRYK

SEQ ID NO: 323 - protein, 8 aa, synthetic construct
ARSEDRYS

SEQ ID NO: 324 - protein, 8 aa, synthetic construct
ARSEDRYF

SEQ ID NO: 325 - protein, 8 aa, synthetic construct
ARSEDRYI

SEQ ID NO: 326 - protein, 8 aa, synthetic construct
ARSEDRYN

SEQ ID NO: 327 - protein, 8 aa, synthetic construct
ARSEDRYT

SEQ ID NO: 328 - protein, 8 aa, synthetic construct
ARSEDRYA

SEQ ID NO: 329 - protein, 8 aa, synthetic construct
ARSEDRYY

SEQ ID NO: 330 - protein, 8 aa, synthetic construct
ARSEDRYP

SEQ ID NO: 331 - protein, 8 aa, synthetic construct
ARSEDRYD

SEQ ID NO: 332 - protein, 8 aa, synthetic construct
ARSEDHYR

SEQ ID NO: 333 - protein, 8 aa, synthetic construct
ARSEGRYR

SEQ ID NO: 334 - protein, 8 aa, synthetic construct
ARSEARYR

SEQ ID NO: 335 - protein, 8 aa, synthetic construct
ARSEWRYR

SEQ ID NO: 336 - protein, 8 aa, synthetic construct
ARSEYRYR

SEQ ID NO: 337 - protein, 8 aa, synthetic construct
ARSERRYR

SEQ ID NO: 338 - protein, 8 aa, synthetic construct
ARSEVRYR

SEQ ID NO: 339 - protein, 8 aa, synthetic construct
ARIEDRYR

SEQ ID NO: 340 - protein, 8 aa, synthetic construct
ARLEDRYR

SEQ ID NO: 341 - protein, 8 aa, synthetic construct
ARMEDRYR

SEQ ID NO: 342 - protein, 8 aa, synthetic construct
ARVEDRYR

SEQ ID NO: 343 - protein, 8 aa, synthetic construct
ARAEDRYR

SEQ ID NO: 344 - protein, 8 aa, synthetic construct
ARFEDRYR

SEQ ID NO: 345 - protein, 8 aa, synthetic construct
ARHEDRYR

SEQ ID NO: 346 - protein, 8 aa, synthetic construct
ARGEDRYR

SEQ ID NO: 347 - protein, 8 aa, synthetic construct
ARTEDRYR

SEQ ID NO: 348 - protein, 8 aa, synthetic construct
ASSEDRYR

SEQ ID NO: 349 - protein, 8 aa, synthetic construct
AHSEDRYR

SEQ ID NO: 350 - protein, 8 aa, synthetic construct
ADSEDRYR

SEQ ID NO: 351 - protein, 8 aa, synthetic construct
AFSEDRYR

SEQ ID NO: 352 - protein, 8 aa, synthetic construct
ARSEDRFR

SEQ ID NO: 353 - protein, 8 aa, synthetic construct
ARSEDRHR

SEQ ID NO: 354 - protein, 7 aa, synthetic construct
RSEDRFK

SEQ ID NO: 355 - protein, 7 aa, synthetic construct
RSEDRHK

SEQ ID NO: 356 - protein, 7 aa, synthetic construct
RSEDHYK

SEQ ID NO: 357 - protein, 7 aa, synthetic construct
RSEGRYK

SEQ ID NO: 358 - protein, 7 aa, synthetic construct
RSEARYK

SEQ ID NO: 359 - protein, 7 aa, synthetic construct
RSEWRYK

SEQ ID NO: 360 - protein, 7 aa, synthetic construct
RSEYRYK

SEQ ID NO: 361 - protein, 7 aa, synthetic construct
RSERRYK

SEQ ID NO: 362 - protein, 7 aa, synthetic construct
RSEVRYK

SEQ ID NO: 363 - protein, 7 aa, synthetic construct
RIEDRYK

SEQ ID NO: 364 - protein, 7 aa, synthetic construct
RLEDRYK

SEQ ID NO: 365 - protein, 7 aa, synthetic construct
RMEDRYK

SEQ ID NO: 366 - protein, 7 aa, synthetic construct
RVEDRYK

SEQ ID NO: 367 - protein, 7 aa, synthetic construct
RAEDRYK

SEQ ID NO: 368 - protein, 7 aa, synthetic construct
RFEDRYK

SEQ ID NO: 369 - protein, 7 aa, synthetic construct
RHEDRYK

SEQ ID NO: 370 - protein, 7 aa, synthetic construct
RGEDRYK

SEQ ID NO: 371 - protein, 7 aa, synthetic construct
RTEDRYK

SEQ ID NO: 372 - protein, 7 aa, synthetic construct
SSEDRYK

SEQ ID NO: 373 - protein, 7 aa, synthetic construct
HSEDRYK

SEQ ID NO: 374 - protein, 7 aa, synthetic construct
DSEDRYK

SEQ ID NO: 375 - protein, 7 aa, synthetic construct
FSEDRYK

SEQ ID NO: 376 - protein, 7 aa, synthetic construct
RSEDRFK

SEQ ID NO: 377 - protein, 7 aa, synthetic construct
RSEDRHK

SEQ ID NO: 378 - protein, 8 aa, synthetic construct
ARSEDRYK

SEQ ID NO: 379 - protein, 8 aa, synthetic construct
ARSEDRFK

SEQ ID NO: 380 - protein, 8 aa, synthetic construct
ARSEDRHK

SEQ ID NO: 381 - protein, 8 aa, synthetic construct
ARSEDHYK

SEQ ID NO: 382 - protein, 8 aa, synthetic construct
ARSEGRYK

SEQ ID NO: 383 - protein, 8 aa, synthetic construct
ARSEARYK

SEQ ID NO: 384 - protein, 8 aa, synthetic construct
ARSEWRYK

SEQ ID NO: 385 - protein, 8 aa, synthetic construct
ARSEYRYK

SEQ ID NO: 386 - protein, 8 aa, synthetic construct
ARSERRYK

SEQ ID NO: 387 - protein, 8 aa, synthetic construct
ARSEVRYK

SEQ ID NO: 388 - protein, 8 aa, synthetic construct
ARIEDRYK

SEQ ID NO: 389 - protein, 8 aa, synthetic construct
ARLEDRYK

SEQ ID NO: 390 - protein, 8 aa, synthetic construct
ARMEDRYK

SEQ ID NO: 391 - protein, 8 aa, synthetic construct
ARVEDRYK

SEQ ID NO: 392 - protein, 8 aa, synthetic construct
ARAEDRYK

SEQ ID NO: 393 - protein, 8 aa, synthetic construct
ARFEDRYK

SEQ ID NO: 394 - protein, 8 aa, synthetic construct
ARHEDRYK

SEQ ID NO: 395 - protein, 8 aa, synthetic construct
ARGEDRYK

SEQ ID NO: 396 - protein, 8 aa, synthetic construct
ARTEDRYK

SEQ ID NO: 397 - protein, 8 aa, synthetic construct
ASSEDRYK

SEQ ID NO: 398 - protein, 8 aa, synthetic construct
AHSEDRYK

SEQ ID NO: 399 - protein, 8 aa, synthetic construct
ADSEDRYK

SEQ ID NO: 400 - protein, 8 aa, synthetic construct
FDSEDRYK

SEQ ID NO: 401 - protein, 8 aa, synthetic construct
AFSEDRYR

SEQ ID NO: 402 - protein, 8 aa, synthetic construct
APSEDRYR

SEQ ID NO: 403 - protein, 8 aa, synthetic construct
AGSEDRYR

SEQ ID NO: 404 - protein, 8 aa, synthetic construct
ARSKDRYR

SEQ ID NO: 405 - protein, 8 aa, synthetic construct
ARSRDRYR

SEQ ID NO: 406 - protein, 8 aa, synthetic construct
ARSLDRYR

SEQ ID NO: 407 - protein, 8 aa, synthetic construct
ARSPDRYR

SEQ ID NO: 408 - protein, 8 aa, synthetic construct
ARREDRYR

SEQ ID NO: 409 - protein, 8 aa, synthetic construct
ARQEDRYR

SEQ ID NO: 410 - protein, 6 aa, synthetic construct
RSEDRY

SEQ ID NO: 411 - protein, 6 aa, synthetic construct
RSEDRF

SEQ ID NO: 412 - protein, 6 aa, synthetic construct
RSEDRH

SEQ ID NO: 413 - protein, 6 aa, synthetic construct
RSEDHY

SEQ ID NO: 414 - protein, 6 aa, synthetic construct
RSEGRY

SEQ ID NO: 415 - protein, 6 aa, synthetic construct
RSEARY

SEQ ID NO: 416 - protein, 6 aa, synthetic construct
RSEWRY

SEQ ID NO: 417 - protein, 6 aa, synthetic construct
RSEYRY

SEQ ID NO: 418 - protein, 6 aa, synthetic construct
RSERRY

SEQ ID NO: 419 - protein, 6 aa, synthetic construct
RSEVRY

SEQ ID NO: 420 - protein, 6 aa, synthetic construct
RIEDRY

SEQ ID NO: 421 - protein, 6 aa, synthetic construct
RLEDRY

SEQ ID NO: 422 - protein, 6 aa, synthetic construct
RMEDRY

SEQ ID NO: 423 - protein, 6 aa, synthetic construct
RVEDRY

SEQ ID NO: 424 - protein, 6 aa, synthetic construct
RAEDRY

SEQ ID NO: 425 - protein, 6 aa, synthetic construct
RFEDRY

SEQ ID NO: 426 - protein, 6 aa, synthetic construct
RHEDRY

SEQ ID NO: 427 - protein, 6 aa, synthetic construct
RGEDRY

SEQ ID NO: 428 - protein, 6 aa, synthetic construct
RTEDRY

SEQ ID NO: 429 - protein, 6 aa, synthetic construct
SSEDRY

SEQ ID NO: 430 - protein, 6 aa, synthetic construct
HSEDRY

SEQ ID NO: 431 - protein, 6 aa, synthetic construct
DSEDRY

SEQ ID NO: 432 - protein, 6 aa, synthetic construct
FSEDRY

SEQ ID NO: 433-440 - skipped (8 entries)

SEQ ID NO: 441 - protein, 6 aa, synthetic construct
GGGGGG

SEQ ID NO: 442 - protein, 6 aa, synthetic construct
GGGGGG

SEQ ID NO: 443 - protein, 6 aa, synthetic construct
GGGGGG

SEQ ID NO: 444 - protein, 6 aa, synthetic construct
GGGGGG

SEQ ID NO: 445 - protein, 6 aa, synthetic construct
GGGGGG

SEQ ID NO: 446 - protein, 6 aa, synthetic construct
GGGGGG

SEQ ID NO: 447 - protein, 6 aa, synthetic construct
GGGGGG

SEQ ID NO: 448 - protein, 6 aa, synthetic construct
GGGGGG

SEQ ID NO: 449 - protein, 6 aa, synthetic construct
GGGGGG

SEQ ID NO: 450 - protein, 10 aa, synthetic construct
DVVERSPHRP

SEQ ID NO: 451 - protein, 10 aa, synthetic construct
DVVERWPHRP

SEQ ID NO: 452 - protein, 10 aa, synthetic construct
YVVERWRHRP

SEQ ID NO: 453 - protein, 10 aa, synthetic construct
DVVERSRHRP

SEQ ID NO: 454 - protein, 10 aa, synthetic construct
KPLPEVTDEY

SEQ ID NO: 455 - protein, 20 aa, synthetic construct
LEKEALKKIIEDQQEALNKW

SEQ ID NO: 456 - protein, 20 aa, synthetic construct
  VARIANT 16: note = X can be any naturally occuring amino acid
LEKEALKKIIEDQQEXLNKW

SEQ ID NO: 457 - protein, 6 aa, synthetic construct
GGGGGG

SEQ ID NO: 458 - protein, 6 aa, synthetic construct
GGGGGG

SEQ ID NO: 459 - protein, 6 aa, synthetic construct
GGGGGG

SEQ ID NO: 460 - protein, 6 aa, synthetic construct
GGGGGG

SEQ ID NO: 461 - protein, 6 aa, synthetic construct
GGGGGG

SEQ ID NO: 462 - protein, 6 aa, synthetic construct
GGGGGG

SEQ ID NO: 463 - protein, 6 aa, synthetic construct
GGGGGG

SEQ ID NO: 464 - protein, 6 aa, synthetic construct
GGGGGG

SEQ ID NO: 465 - protein, 6 aa, synthetic construct
GGGGGG

SEQ ID NO: 466 - protein, 6 aa, synthetic construct
GGGGGG

SEQ ID NO: 467 - protein, 6 aa, synthetic construct
GGGGGG

SEQ ID NO: 468 - protein, 6 aa, synthetic construct
GGGGGG

SEQ ID NO: 469 - protein, 6 aa, synthetic construct
GGGGGG

SEQ ID NO: 470 - protein, 6 aa, synthetic construct
GGGGGG

SEQ ID NO: 471 - protein, 6 aa, synthetic construct
GGGGGG

SEQ ID NO: 472 - protein, 6 aa, synthetic construct
GGGGGG

SEQ ID NO: 473 - protein, 6 aa, synthetic construct
GGGGGG

SEQ ID NO: 474 - protein, 6 aa, synthetic construct
GGGGGG

SEQ ID NO: 475 - protein, 6 aa, synthetic construct
GGGGGG

SEQ ID NO: 476 - protein, 6 aa, synthetic construct
GGGGGG

SEQ ID NO: 477 - protein, 6 aa, synthetic construct
GGGGGG

SEQ ID NO: 478 - protein, 6 aa, synthetic construct
GGGGGG

SEQ ID NO: 479 - protein, 6 aa, synthetic construct
GGGGGG

SEQ ID NO: 480 - protein, 6 aa, synthetic construct
GGGGGG

SEQ ID NO: 481 - protein, 6 aa, synthetic construct
GGGGGG

SEQ ID NO: 482 - protein, 6 aa, synthetic construct
GGGGGG

SEQ ID NO: 483 - protein, 6 aa, synthetic construct
GGGGGG

SEQ ID NO: 484 - protein, 6 aa, synthetic construct
GGGGGG

SEQ ID NO: 485 - protein, 6 aa, synthetic construct
GGGGGG

SEQ ID NO: 486 - protein, 6 aa, synthetic construct
GGGGGG

SEQ ID NO: 487 - protein, 6 aa, synthetic construct
GGGGGG

SEQ ID NO: 488 - protein, 6 aa, synthetic construct
GGGGGG

SEQ ID NO: 489 - protein, 6 aa, synthetic construct
GGGGGG

SEQ ID NO: 490 - protein, 6 aa, synthetic construct
GGGGGG

SEQ ID NO: 491 - protein, 6 aa, synthetic construct
GGGGGG

SEQ ID NO: 492 - protein, 6 aa, synthetic construct
GGGGGG

SEQ ID NO: 493 - protein, 6 aa, synthetic construct
GGGGGG

SEQ ID NO: 494 - protein, 6 aa, synthetic construct
GGGGGG

SEQ ID NO: 495 - protein, 6 aa, synthetic construct
GGGGGG

SEQ ID NO: 496 - protein, 6 aa, synthetic construct
GGGGGG

SEQ ID NO: 497 - protein, 6 aa, synthetic construct
GGGGGG

SEQ ID NO: 498 - protein, 6 aa, synthetic construct
GGGGGG

SEQ ID NO: 499 - protein, 6 aa, synthetic construct
GGGGGG

SEQ ID NO: 500 - protein, 6 aa, synthetic construct
GGGGGG

SEQ ID NO: 501 - protein, 6 aa, synthetic construct
GGGGGG

SEQ ID NO: 502 - protein, 6 aa, synthetic construct
GGGGGG

SEQ ID NO: 503 - protein, 6 aa, synthetic construct
GGGGGG

SEQ ID NO: 504 - protein, 6 aa, synthetic construct
GGGGGG

SEQ ID NO: 505 - protein, 6 aa, synthetic construct
GGGGGG

SEQ ID NO: 506 - protein, 6 aa, synthetic construct
GGGGGG

SEQ ID NO: 507 - protein, 6 aa, synthetic construct
GGGGGG

SEQ ID NO: 508 - protein, 6 aa, synthetic construct
GGGGGG

SEQ ID NO: 509 - protein, 6 aa, synthetic construct
GGGGGG

SEQ ID NO: 510 - protein, 6 aa, synthetic construct
GGGGGG

SEQ ID NO: 511 - protein, 6 aa, synthetic construct
GGGGGG

SEQ ID NO: 512 - protein, 6 aa, synthetic construct
GGGGGG

SEQ ID NO: 513 - protein, 6 aa, synthetic construct
GGGGGG

SEQ ID NO: 514 - protein, 6 aa, synthetic construct
GGGGGG

SEQ ID NO: 515 - protein, 6 aa, synthetic construct
GGGGGG

SEQ ID NO: 516 - protein, 6 aa, synthetic construct
GGGGGG

SEQ ID NO: 517 - protein, 6 aa, synthetic construct
GGGGGG

SEQ ID NO: 518 - protein, 6 aa, synthetic construct
GGGGGG

SEQ ID NO: 519 - protein, 6 aa, synthetic construct
GGGGGG

SEQ ID NO: 520 - protein, 6 aa, synthetic construct
GGGGGG

SEQ ID NO: 521 - protein, 6 aa, synthetic construct
GGGGGG

SEQ ID NO: 522 - protein, 6 aa, synthetic construct
GGGGGG

SEQ ID NO: 523 - protein, 6 aa, synthetic construct
GGGGGG

SEQ ID NO: 524 - protein, 6 aa, synthetic construct
GGGGGG

SEQ ID NO: 525 - protein, 6 aa, synthetic construct
GGGGGG

SEQ ID NO: 526 - protein, 6 aa, synthetic construct
GGGGGG

SEQ ID NO: 527 - protein, 6 aa, synthetic construct
GGGGGG

SEQ ID NO: 528 - protein, 6 aa, synthetic construct
GGGGGG

SEQ ID NO: 529 - protein, 6 aa, synthetic construct
GGGGGG

SEQ ID NO: 530 - protein, 6 aa, synthetic construct
GGGGGG

SEQ ID NO: 531 - protein, 6 aa, synthetic construct
GGGGGG

SEQ ID NO: 532 - protein, 6 aa, synthetic construct
GGGGGG

SEQ ID NO: 533 - protein, 6 aa, synthetic construct
GGGGGG

SEQ ID NO: 534 - protein, 6 aa, synthetic construct
GGGGGG

SEQ ID NO: 535 - protein, 6 aa, synthetic construct
GGGGGG

SEQ ID NO: 536 - protein, 6 aa, synthetic construct
GGGGGG

SEQ ID NO: 537 - protein, 6 aa, synthetic construct
GGGGGG

SEQ ID NO: 538 - protein, 6 aa, synthetic construct
GGGGGG

SEQ ID NO: 539 - protein, 6 aa, synthetic construct
GGGGGG

SEQ ID NO: 540 - protein, 6 aa, synthetic construct
GGGGGG

SEQ ID NO: 541 - protein, 6 aa, synthetic construct
GGGGGG

SEQ ID NO: 542 - protein, 6 aa, synthetic construct
GGGGGG

SEQ ID NO: 543 - protein, 6 aa, synthetic construct
GGGGGG

SEQ ID NO: 544 - protein, 6 aa, synthetic construct
GGGGGG

SEQ ID NO: 545 - protein, 6 aa, synthetic construct
GGGGGG

SEQ ID NO: 546 - protein, 6 aa, synthetic construct
GGGGGG

SEQ ID NO: 547 - protein, 6 aa, synthetic construct
GGGGGG

SEQ ID NO: 548 - protein, 6 aa, synthetic construct
GGGGGG

SEQ ID NO: 549 - protein, 6 aa, synthetic construct
GGGGGG

SEQ ID NO: 550 - protein, 9 aa, synthetic construct
QAAAETLSE

SEQ ID NO: 551 - protein, 8 aa, synthetic construct
AAAETLSE

SEQ ID NO: 552 - protein, 7 aa, synthetic construct
AAQPNNS

SEQ ID NO: 553 - protein, 7 aa, synthetic construct
WVSQPPE

SEQ ID NO: 554 - protein, 8 aa, synthetic construct
QQQTLPKP

SEQ ID NO: 555 - protein, 6 aa, synthetic construct
QSKAQV

SEQ ID NO: 556 - protein, 8 aa, synthetic construct
RTEDLPKA

SEQ ID NO: 557 - protein, 8 aa, synthetic construct
MPIWKFPD

SEQ ID NO: 558 - protein, 7 aa, synthetic construct
MPIWKFP

SEQ ID NO: 559 - protein, 6 aa, synthetic construct
PIWKFP

SEQ ID NO: 560 - protein, 5 aa, synthetic construct
IWKFP

SEQ ID NO: 561 - protein, 7 aa, synthetic construct
PIWKFPD

SEQ ID NO: 562 - protein, 16 aa, synthetic construct
DLSYMPIWKFPDEEGA

SEQ ID NO: 563 - protein, 15 aa, synthetic construct
LSYMPIWKFPDEEGA

SEQ ID NO: 564 - protein, 14 aa, synthetic construct
SYMPIWKFPDEEGA

SEQ ID NO: 565 - protein, 13 aa, synthetic construct
YMPIWKFPDEEGA

SEQ ID NO: 566 - protein, 11 aa, synthetic construct
YMPIWKFPDEE

SEQ ID NO: 567 - protein, 12 aa, synthetic construct
NNTLVWKYADAG

SEQ ID NO: 568 - protein, 11 aa, synthetic construct
NTLVWKYADAG

SEQ ID NO: 569 - protein, 10 aa, synthetic construct
TLVWKYADAG

SEQ ID NO: 570 - protein, 8 aa, synthetic construct
VWKYADAG

SEQ ID NO: 571 - protein, 7 aa, synthetic construct
VWKYADA

SEQ ID NO: 572 - protein, 13 aa, synthetic construct
ANSFIFKYADPDR

SEQ ID NO: 573 - protein, 12 aa, synthetic construct
NSFIFKYADPDR

SEQ ID NO: 574 - protein, 10 aa, synthetic construct
NSFIFKYADP

SEQ ID NO: 575 - protein, 9 aa, synthetic construct
NSFIFKYAD

SEQ ID NO: 576 - protein, 7 aa, synthetic construct
PIYKYPD

SEQ ID NO: 577 - protein, 21 aa, synthetic construct
RGNLTMSFHLEITARPVLWHW

SEQ ID NO: 578 - protein, 16 aa, synthetic construct
RGNLTMSFHLEITARP

SEQ ID NO: 579 - protein, 12 aa, synthetic construct
TMSFHLEITARP

SEQ ID NO: 580 - protein, 122 aa, synthetic construct
EVQLVESGGGLVQPGGSLRLSCAASGPTVSMAWFRQAPGKLREGVAQIQAGGGRIYYADPVKGRFTISRDNSKNTLYLQMNSLRAEDTAVYYCAAQLRWDVWPIAWSLYNYWGQGTLVTVSS

SEQ ID NO: 581 - protein, 122 aa, synthetic construct
EVQLVESGGGLVQPGGSLRLSCAASGPTVSMAWFRQAPGKLREGVAQIQASGGRIYYADPVKGRFTISRDNSKNTLYLQMNSLRAEDTAVYYCAAQLRWDVWPIAWSLYNFWGQGTLVTVSS

SEQ ID NO: 582 - protein, 122 aa, synthetic construct
EVQLVESGGGLVQPGGSLRLSCAASGPTVSMAWFRQAPGKLREGVAQIQAGGGRIYYADPVKGRFTISRDNSKNTLYLQMNSLRAEDTAVYYCAAQLRWEVWPIAWSLYNFWGQGTLVTVSS

SEQ ID NO: 583 - protein, 122 aa, synthetic construct
EVQLVESGGGLVQPGGSLRLSCAASGPTVSMAWFRQAPGKLREGVAQIQAGGGRIYYADPVKGRFTISRDNSKNTLYLQMNSLRAEDTAVYYCAAQLRWDVWPVAWSLYNFWGQGTLVTVSS

SEQ ID NO: 584 - protein, 122 aa, synthetic construct
EVQLVESGGGLVQPGGSLRLSCAASGPTVSMAWFRQAPGKLREGVAQIQAGGGRIYYADPVKGRFTISRDNSKNTLYLQMNSLRAEDTAVYYCAAQIRWDVWPIAWSLYNYWGQGTLVTVSS

SEQ ID NO: 585 - protein, 118 aa, synthetic construct
EVQLVESGGGLVQPGGSLRLSCAASGIIFSNCGLAWYRQAPGKERELVSSISRRGTTIYADSVKGRATISRDNSKNTLYLQMNSLRAEDTAVYSCTTEPQLGLCARDWGQGTLVTVSS

SEQ ID NO: 586 - protein, 118 aa, synthetic construct
EVQLVESGGGLVQPGGSLRLSCAASGIIFSNCGLAWYRQAPGKERELVSSISRRGTTIYADSVKGRATISRDNSKNTLYLQMNSLRAEDTAVYSCTTDPQLGLCARDWGQGTLVTVSS

SEQ ID NO: 587 - protein, 125 aa, synthetic construct
EVQLLESGGGLVQPGGSLRLSCAASGYAYSPYCMAWFRQAPGKGLEGVSSIYTGSGATYYADSVKGRFTISRDNSKNTLYLQMNSLRAEDTAVYYCAAAYDLRSCGGTWYRFRHWGQGTLVTVSS

SEQ ID NO: 588 - protein, 125 aa, synthetic construct
EVQLLESGGGLVQPGGSLRLSCAASGYAYSPYCMAWFRQAPGKGLEGVSSIYTGSGGTYYADSVKGRFTISRDNSKNTLYLQMNSLRAEDTAVYYCAASYDLRSCGGTWYRFRHWGQGTLVTVSS

SEQ ID NO: 589 - protein, 125 aa, synthetic construct
EVQLLESGGGLVQPGGSLRLSCAASGYAYSPYCMAWFRQAPGKGLEGVSSIYTGSGSTYYADSVKGRFTISRDNSKNTLYLQMNSLRAEDTAVYYCAAAYDLRSCGGTWYRFRHWGQGTLVTVSS

SEQ ID NO: 590 - protein, 125 aa, synthetic construct
QVKLVESGGGSVQAGGSLRLSCVASGYAYSPYCMAWFRQAPGKEREGVASIYTGSGATYYPDSVKGRFTISQDKAKDTLYLQMNSLKPEDTAMYYCAAAYDLRSCGGTWYRFRHWGQGTQVTVSS

SEQ ID NO: 591 - protein, 125 aa, synthetic construct
QVKLVESGGGSVQAGGSLRLSCVASGYAYSPYCMAWFRQAPGKEREGVASIYTGSGATYYPDSVKGRFTISQDKAKDTLYLQMNSLKPEDTAMYYCAAAYDLRSCGGSWYRFRHWGQGTQVTVSS

SEQ ID NO: 592 - protein, 125 aa, synthetic construct
QVKLVESGGGSVQAGGSLRLSCVASGYAYSPYCMAWFRQAPGKEREGVASIYTGNGATYYPDSVKGRFTISQDKAKDTLYLQMNSLKPEDTAMYYCAAAYDLRSCGGTWYRFRHWGQGTQVTVSS

SEQ ID NO: 593 - protein, 124 aa, synthetic construct
EVQLVESGGGLVQPGGSLRLSCAASGSIFSLSAMGWYRQAPGNGLELVSAISTNGESTQYADSVKGRFTISRDNSKNTLYLQMNSLRAEDTAVYYCIAAPSFVVALIPSRIRSWGQGTMVTVSS

SEQ ID NO: 594 - protein, 124 aa, synthetic construct
EVQLVESGGGLVQPGGSLRLSCAASGSIFSLSAMGWYRQAPGNGLELVSAISTNGDSTQYADSVKGRFTISRDNSKNTLYLQMNSLRAEDTAVYYCIAAPSFVVALIPSRIRSWGQGTMVTVSS

SEQ ID NO: 595 - protein, 128 aa, synthetic construct
QVQLVESGGGVVQPGRSLRLSCVASGYTYSINCMGWFRQAPGKGREGIAAISTGGGTTGVADSVKGRFTISQDNAKNTVYLQMNSLRAEDTAMYYCAARSTYSGYACVYSEVNGYNYRGQGTQVTVSS

SEQ ID NO: 596 - protein, 128 aa, synthetic construct
QVQLVESGGGVVQPGRSLRLSCVASGYTYSINCMGWFRQAPGKGREGIAAISTGGGTTGVADSVKGRFTISQDNAKNTVYLQMNSLRAEDTAMYYCAAKSTYSGYACVYSEVNGYNYRGQGTQVTVSS

SEQ ID NO: 597 - protein, 128 aa, synthetic construct
QVQLVESGGGVVQPGRSLRLSCVASGYTYSINCMGWFRQAPGKGREGIAAISTGGGRTGVADSVKGRFTISQDNAKNTVYLQMNSLRAEDTAMYYCAAKSTYSGYACVYSEVNGYNYRGQGTQVTVSS

SEQ ID NO: 598 - protein, 127 aa, synthetic construct
EVQLVESGGGSVQAGGSLRLSCAASGYTYSINCMGWFRQAPGKEREGVAVISTGGGRTDYRDSVKGRFTISQDNAKNTVYLQMNSLKPEDTAMYYCAGRTTYPGYGCGLGRSAYNYWGQGTQVTVSS

SEQ ID NO: 599 - protein, 127 aa, synthetic construct
EVQLVESGGGSVQAGGSLRLSCAASGYTYSINCMGWFRQAPGKEREGVAAISTGGGTTDYRDSVKGRFTISQDNAKNTVYLQMNSLKPEDTAMYYCAGKTTYPGYGCGLGRSAYNYWGQGTQVTVSS

SEQ ID NO: 600 - protein, 127 aa, synthetic construct
EVQLVESGGGSVQAGGSLRLSCAASGYTYSINCMGWFRQAPGKEREGVAAISTGGGTTDYRDSVKGRFTISQDNAKNTVYLQMNSLKPEDTAMYYCAGRTTYPGYGCGLGRSAYNYWGQGTQVTVSS

SEQ ID NO: 601 - protein, 118 aa, synthetic construct
QVQLQQSGGGLVQAGGSLRLSCAASGSIFAINEINLMGWYRQAPGKQRELVAACASDGNTYYADSVKGRFTISRDNAEKTVYLQMNNLKPDDTAVYYCDANSRGNYYSGQGTQVTVSS

SEQ ID NO: 602 - protein, 118 aa, synthetic construct
QVQLQQSGGGLVQAGGSLRLSCAASGSIFSINEINLMGWYRQAPGKQRELVAACASDGNTYYADSVKGRFTISRDNAEKTVYLQMNNLKPDDTAVYYCDANSRGNYYSGQGTQVTVSS

SEQ ID NO: 603 - protein, 115 aa, synthetic construct
QVQLQESGGGLVQAGGSLRLSCVASGSIRSINVMGWYRQAPGKQRELVAACASDGNTYYADSVKGRFTISRDNAEKTVYLQMNNLKPDDTAVYYCDANSRGNYYSGQGTQVTVSS

SEQ ID NO: 604 - protein, 115 aa, synthetic construct
QVQLQESGGGLVQAGGSLRLSCVASGDIRSINVMGWYRQAPGKQRELVAACASDGNTYYADSVKGRFTISRDNAEKTVYLQMNNLKPDDTAVYYCDANSRGNYYSGQGTQVTVSS

SEQ ID NO: 605 - protein, 115 aa, synthetic construct
QVQLQESGGGLVQAGGSLRLSCVASGSTRSINVMGWYRQAPGKQRELVAACASDGNTYYADSVKGRFTISRDNAEKTVYLQMNNLKPDDTAVYYCDANSRGNYYSGQGTQVTVSS

SEQ ID NO: 606 - protein, 126 aa, synthetic construct
QVQLQESGGGLVQPGGSLRLSCAASGFTFNSYAMTWVRQAPGKGLEWVSDINSGGGSTNYADSVKGRFTISRDNAKNTLYLQMNSLKPEDTAVYYCATELRGSDYYRGPIREYAYWGQGTLVTVSS

SEQ ID NO: 607 - protein, 126 aa, synthetic construct
QVQLQESGGGLVQPGGSLRLSCAASGFTFSSYAMTWVRQAPGKGLEWVSDINSGGGSTNYADSVKGRFTISRDNAKNTLYLQMNSLKPEDTAVYYCATELRGSDYYRGPIREYAYWGQGTLVTVSS

SEQ ID NO: 608 - protein, 6 aa, synthetic construct
GGGGGG

SEQ ID NO: 609 - protein, 6 aa, synthetic construct
GGGGGG

SEQ ID NO: 610 - protein, 6 aa, synthetic construct
GGGGGG

SEQ ID NO: 611 - protein, 6 aa, synthetic construct
GGGGGG

SEQ ID NO: 612 - protein, 6 aa, synthetic construct
GGGGGG

SEQ ID NO: 613 - protein, 6 aa, synthetic construct
GGGGGG

SEQ ID NO: 614 - protein, 6 aa, synthetic construct
GGGGGG

SEQ ID NO: 615 - protein, 6 aa, synthetic construct
GGGGGG

SEQ ID NO: 616 - protein, 6 aa, synthetic construct
GGGGGG

SEQ ID NO: 617 - protein, 6 aa, synthetic construct
GGGGGG

SEQ ID NO: 618 - protein, 6 aa, synthetic construct
GGGGGG

SEQ ID NO: 619 - protein, 6 aa, synthetic construct
GGGGGG

SEQ ID NO: 620 - protein, 6 aa, synthetic construct
GGGGGG

SEQ ID NO: 621 - protein, 6 aa, synthetic construct
GGGGGG

SEQ ID NO: 622 - protein, 6 aa, synthetic construct
GGGGGG

SEQ ID NO: 623 - protein, 6 aa, synthetic construct
GGGGGG

SEQ ID NO: 624 - protein, 6 aa, synthetic construct
GGGGGG

SEQ ID NO: 625 - protein, 6 aa, synthetic construct
GGGGGG

SEQ ID NO: 626 - protein, 6 aa, synthetic construct
GGGGGG

SEQ ID NO: 627 - protein, 6 aa, synthetic construct
GGGGGG

SEQ ID NO: 628 - protein, 6 aa, synthetic construct
GGGGGG

SEQ ID NO: 629 - protein, 6 aa, synthetic construct
GGGGGG

SEQ ID NO: 630 - protein, 6 aa, synthetic construct
GGGGGG

SEQ ID NO: 631 - protein, 16 aa, synthetic construct
ARPAKSEDLYPNPKGS

SEQ ID NO: 632 - protein, 15 aa, synthetic construct
ARPAKSEDLYPNPKG

SEQ ID NO: 633 - protein, 14 aa, synthetic construct
ARPAKSEDLYPNPK

SEQ ID NO: 634 - protein, 13 aa, synthetic construct
ARPAKSEDLYPNP

SEQ ID NO: 635 - protein, 12 aa, synthetic construct
ARPAKSEDLYPN

SEQ ID NO: 636 - protein, 11 aa, synthetic construct
ARPAKSEDLYP

SEQ ID NO: 637 - protein, 10 aa, synthetic construct
ARPAKSEDLY

SEQ ID NO: 638 - protein, 9 aa, synthetic construct
RPAKSEDLY

SEQ ID NO: 639 - protein, 8 aa, synthetic construct
PAKSEDLY

SEQ ID NO: 640 - protein, 7 aa, synthetic construct
AKSEDLY

SEQ ID NO: 641 - protein, 11 aa, synthetic construct
AKSEDLYPNPK

SEQ ID NO: 642 - protein, 10 aa, synthetic construct
AKSEDLYPNP

SEQ ID NO: 643 - protein, 9 aa, synthetic construct
AKSEDLYPN

SEQ ID NO: 644 - protein, 8 aa, synthetic construct
AKSEDLYP

SEQ ID NO: 645 - protein, 7 aa, synthetic construct
AKSEDLY

SEQ ID NO: 646 - protein, 10 aa, synthetic construct
KSEDLYPNPK

SEQ ID NO: 647 - protein, 9 aa, synthetic construct
KSEDLYPNP

SEQ ID NO: 648 - protein, 8 aa, synthetic construct
KSEDLYPN

SEQ ID NO: 649 - protein, 7 aa, synthetic construct
KSEDLYP

SEQ ID NO: 650 - protein, 6 aa, synthetic construct
KSEDLY

SEQ ID NO: 651 - protein, 16 aa, synthetic construct
ARSEDRYRNPKGSACS

SEQ ID NO: 652 - protein, 11 aa, synthetic construct
ARSEDRYRNPK

SEQ ID NO: 653 - protein, 37 aa, synthetic construct
ARSEDRYRNPKGSACSGGGGSARSEDRYRNPKGSACS

SEQ ID NO: 654 - protein, 27 aa, synthetic construct
ARSEDRYRNPKGGGGSARSEDRYRNPK

SEQ ID NO: 655 - protein, 27 aa, synthetic construct
ARSEDRYRNPKGFSTLAQLKQRNTLKD

SEQ ID NO: 656 - protein, 125 aa, synthetic construct
MARLALSPVPSHWMVALLLLLSAEPVPAARSEDRYRNPKGFSTLAQLKQRNTLKDGIIMIQTLLIILFIIVPIFLLLDKDDSKAGMEEDHTYEGLDIDQTATYEDIVTLRTGEVKWSVGEHPGQE

SEQ ID NO: 657 - protein, 118 aa, synthetic construct
MALPVTALLLPLALLLHAARPARSEDRYRNPKGFSTLAQLKQRNTLKDGIIMIQTLLIILFIIVPIFLLLDKDDSKAGMEEDHTYEGLDIDQTATYEDIVTLRTGEVKWSVGEHPGQE

SEQ ID NO: 658 - protein, 222 aa, synthetic construct
MALPVTALLLPLALLLHAARPARSEDRYRNPKGSACSRIWQSPRFIARKRGFTVKMHCYMNSASGNVSWLWKQEMDENPQQLKLEKGRMEESQNESLATLTIQGIRFEDNGIYFCQQKCNNTSEVYQGCGTELRVMGFSTLAQLKQRNTLKDGIIMIQTLLIILFIIVPIFLLLDKDDSKAGMEEDHTYEGLDIDQTATYEDIVTLRTGEVKWSVGEHPGQE

SEQ ID NO: 659 - protein, 131 aa, synthetic construct
ARSEDRYRNPKGSACSRIWQSPRFIARKRGFTVKMHCYMNSASGNVSWLWKQEMDENPQQLKLEKGRMEESQNESLATLTIQGIRFEDNGIYFCQQKCNNTSEVYQGCGTELRVMGFSTLAQLKQRNTLKD

SEQ ID NO: 660 - protein, 229 aa, synthetic construct
MARLALSPVPSHWMVALLLLLSAEPVPAARSEDRYRNPKGSACSRIWQSPRFIARKRGFTVKMHCYMNSASGNVSWLWKQEMDENPQQLKLEKGRMEESQNESLATLTIQGIRFEDNGIYFCQQKCNNTSEVYQGCGTELRVMGFSTLAQLKQRNTLKDGIIMIQTLLIILFIIVPIFLLLDKDDSKAGMEEDHTYEGLDIDQTATYEDIVTLRTGEVKWSVGEHPGQE

SEQ ID NO: 661 - protein, 41 aa, synthetic construct
ARSEDRYRNPKGSACKGGGGSELPTQGTFSNVSTNVSPAKP

SEQ ID NO: 662 - protein, 170 aa, synthetic construct
MALPVTALLLPLALLLHAARPARSEDRYRNPKGSACKGGGGSELPTQGTFSNVSTNVSPAKPTTTACARSEDRYRNPKGSACKGGGGSPAPRPPTPAPTIASQPLSLRPEACRPAAGGAVHTRGLDFACDIYIWAPLAGTCGVLLLSLVITLYCNHRNRRRVCKCPRPVV

SEQ ID NO: 663 - protein, 52 aa, synthetic construct
ARSEDRYRNPKGGGGSELPTQGTFSNVSTNVSPAKPTTTACARSEDRYRNPK

SEQ ID NO: 664 - protein, 160 aa, synthetic construct
MALPVTALLLPLALLLHAARPARSEDRYRNPKGSGGSELPTQGTFSNVSTNVSPAKPTTTACARSEDRYRNPKGSGGSPAPRPPTPAPTIASQPLSLRPEACRPAAGGAVHTRGLDFACDIYIWAPLAGTCGVLLLSLVITLYCNHRNRRRVCKCPRPVV

SEQ ID NO: 665 - protein, 283 aa, synthetic construct
MALPVTALLLPLALLLHAARPARSEDRYRNPKGSGGSELPTQGTFSNVSTNVSPAKPTTTACARSEDRYRNPKGSGGSAPTSSSTKKTQLQLEHLLLDLQMILNGINNYKNPKLTRMLTFKFYMPKKATELKHLQCLEEELKPLEEVLNLAQSKNFHLRPRDLISNINVIVLELKGSETTFMCEYADETATIVEFLNRWITFCQSIISTLTAKPTTTPAPRPPTPAPTIASQPLSLRPEACRPAAGGAVHTRGLDFACDIYIWAPLAGTCGVLLLSLVITLYC

SEQ ID NO: 666 - protein, 214 aa, synthetic construct
MRISKPHLRSISIQCYLCLLLNSHFLTEAGIHVFILGCFSAGLPKTEANWVNVISDLKKIEDLIQSMHIDATLYTESDVHPSCKVTAMKCFLLELQVISLESGDASIHDTVENLIILANNSLSSNGNVTESGCKECEELEEKNIKEFLQSFVHIVQMFINTSARSEDRYRNPKGFSTLAQLKQRNTLKDGIIMIQTLLIILFIIVPIFLLLDKD

SEQ ID NO: 667 - protein, 168 aa, synthetic construct
MYRMQLLSCIALSLALVTNSAPTSSSTKKTQLQLEHLLLDLQMILNGINNYKNPKLTRMLTFKFYMPKKATELKHLQCLEEELKPLEEVLNLAQSKNFHLRPRDLISNINVIVLELKGSETTFMCEYADETATIVEFLNRWITFCQSIISTLTGGGSARSEDRYRNPK

SEQ ID NO: 668 - protein, 184 aa, synthetic construct
MYRMQLLSCIALSLALVTNSAPTSSSTKKTQLQLEHLLLDLQMILNGINNYKNPKLTRMLTFKFYMPKKATELKHLQCLEEELKPLEEVLNLAQSKNFHLRPRDLISNINVIVLELKGSETTFMCEYADETATIVEFLNRWITFCQSIISTLTGGGSARSEDRYRNPKGGGGSARSEDRYRNPK

SEQ ID NO: 669 - protein, 169 aa, synthetic construct
MYRMQLLSCIALSLALVTNSARSEDRYRNPKGGGGSAPTSSSTKKTQLQLEHLLLDLQMILNGINNYKNPKLTRMLTFKFYMPKKATELKHLQCLEEELKPLEEVLNLAQSKNFHLRPRDLISNINVIVLELKGSETTFMCEYADETATIVEFLNRWITFCQSIISTLT

SEQ ID NO: 670 - protein, 401 aa, synthetic construct
MYRMQLLSCIALSLALVTNSAPTSSSTKKTQLQLEHLLLDLQMILNGINNYKNPKLTRMLTFKFYMPKKATELKHLQCLEEELKPLEEVLNLAQSKNFHLRPRDLISNINVIVLELKGSETTFMCEYADETATIVEFLNRWITFCQSIISTLTGGGSDIQLTQSPSSLSASVGDRVTITCKASQSVDYDGDSFLNWYQQKPGKAPKLLIYAASNLESGVPSRFSGSGSGTDFTLTISSLQPEDFATYYCQQSNEDPLTFGQGTKVEIKRGGGGSGGGGSGGGGSEVQLVESGGGLVQPGGSLRLSCAASGYTFSSYWIEWVRQAPGKGLEWIGEILPGGGDTNYNEIFKGRATFSADTSKNTAYLQMNSLRAEDTAVYYCTRRVPIRLDYWGQGTLVTVSS

SEQ ID NO: 671 - protein, 178 aa, synthetic construct
MRISKPHLRSISIQCYLCLLLNSHFLTEAGIHVFILGCFSAGLPKTEANWVNVISDLKKIEDLIQSMHIDATLYTESDVHPSCKVTAMKCFLLELQVISLESGDASIHDTVKNLIILANNSLSSNGNVTESGCKECEELEEKNIKEFLQSFVHIVQMFINTSGGGGSARSEDRYRNPK

SEQ ID NO: 672 - protein, 193 aa, synthetic construct
MRISKPHLRSISIQCYLCLLLNSHFLTEAGIHVFILGCFSAGLPKTEANWVNVISDLKKIEDLIQSMHIDATLYTESDVHPSCKVTAMKCFLLELQVISLESGDASIHDTVKNLIILANNSLSSNGNVTESGCKECEELEEKNIKEFLQSFVHIVQMFINTSGGGSARSEDRYRNPKGGGGSARSEDRYRNPK

SEQ ID NO: 673 - protein, 189 aa, synthetic construct
MRISKPHLRSISIQCYLCLLLNSHFLTEAGIHVFILGCFSAGLPKTEAARSEDRYRNPKGGGGSARSEDRYRNPKNWVNVISDLKKIEDLIQSMHIDATLYTESDVHPSCKVTAMKCFLLELQVISLESGDASIHDTVKNLIILANNSLSSNGNVTESGCKECEELEEKNIKEFLQSFVHIVQMFINTS

SEQ ID NO: 674 - protein, 11 aa, synthetic construct
ARSEDRYRNPK

SEQ ID NO: 675 - protein, 13 aa, synthetic construct
ARSEDRYRNPKGS

SEQ ID NO: 676 - protein, 16 aa, synthetic construct
ARSEDRYRNPKGSACS

SEQ ID NO: 677 - protein, 54 aa, synthetic construct
ARSEDRYRNPKGSGGSELPTQGTFSNVSTNVSPAKPTTTACARSEDRYRNPKGS

SEQ ID NO: 678 - protein, 139 aa, synthetic construct
ARSEDRYRNPKGSGGSELPTQGTFSNVSTNVSPAKPTTTACARSEDRYRNPKGSGGSPAPRPPTPAPTIASQPLSLRPEACRPAAGGAVHTRGLDFACDIYIWAPLAGTCGVLLLSLVITLYCNHRNRRRVCKCPRPVV

SEQ ID NO: 679 - protein, 242 aa, synthetic construct
MALPVTALLLPLALLLHAARPARSEDRYRNPKGSGGSAPTSSSTKKTQLQLEHLLLDLQMILNGINNYKNPKLTRMLTFKFYMPKKATELKHLQCLEEELKPLEEVLNLAQSKNFHLRPRDLISNINVIVLELKGSETTFMCEYADETATIVEFLNRWITFCQSIISTLTAKPTTTPAPRPPTPAPTIASQPLSLRPEACRPAAGGAVHTRGLDFACDIYIWAPLAGTCGVLLLSLVITLYC

SEQ ID NO: 680 - protein, 222 aa, synthetic construct
MYRMQLLSCIALSLALVTNSARSEDRYRNPKGSGGSNWVNVISDLKKIEDLIQSMHIDATLYTESDVHPSCKVTAMKCFLLELQVISLESGDASIHDTVKNLIILANNSLSSNGNVTESGCKECEELEEKNIKEFLQSFVHIVQMFINTSKIEVMYPPPYLDNEKSNGTIIHVKGKHLCPSPLFPGPSKPFWVLVVVGGVLACYSLLVTVAFIIFWVRSKRS

SEQ ID NO: 681 - protein, 222 aa, synthetic construct; identical to SEQ ID NO: 680

SEQ ID NO: 682 - protein, 263 aa, synthetic construct
MYRMQLLSCIALSLALVTNSNWVNVISDLKKIEDLIQSMHIDATLYTESDVHPSCKVTAMKCFLLELQVISLESGDASIHDTVENLIILANNSLSSNGNVTESGCKECEELEEKNIKEFLQSFVHIVQMFINTSARSEDRYRNPKGSGGSELPTQGTFSNVSTNVSPAKPTTTACARSEDRYRNPKGSGGSKIEVMYPPPYLDNEKSNGTIIHVKGKHLCPSPLFPGPSKPFWVLVVVGGVLACYSLLVTVAFIIFWVRSKRS

SEQ ID NO: 683 - protein, 222 aa, synthetic construct
MYRMQLLSCIALSLALVTNSNWVNVISDLKKIEDLIQSMHIDATLYTESDVHPSCKVTAMKCFLLELQVISLESGDASIHDTVENLIILANNSLSSNGNVTESGCKECEELEEKNIKEFLQSFVHIVQMFINTSARSEDRYRNPKGSGGSKIEVMYPPPYLDNEKSNGTIIHVKGKHLCPSPLFPGPSKPFWVLVVVGGVLACYSLLVTVAFIIFWVRSKRS

SEQ ID NO: 684 - protein, 241 aa, synthetic construct
MYRMQLLSCIALSLALVTNSAPTSSSTKKTQLQLEHLLLDLQMILNGINNYKNPKLTRMLTFKFYMPKKATELKHLQCLEEELKPLEEVLNLAQSKNFHLRPRDLISNINVIVLELKGSETTFMCEYADETATIVEFLNRWITFCQSIISTLTARSEDRYRNPKGSGGSAKPTTTPAPRPPTPAPTIASQPLSLRPEACRPAAGGAVHTRGLDFACDIYIWAPLAGTCGVLLLSLVITLYC

SEQ ID NO: 685 - protein, 231 aa, synthetic construct
MARLALSPVSSHWLVALLLLLSAAEPVPAAKSEDLYPNPKGSACSRIWQSPRFIARKRGFTVKMHCYVTNSTFSIVSWLRKRETDKEPQQVNLEQGHMHQTQNSSVTTLIIQDIRFEDNGIYFCQQECSKTSEVYRGCGTELRVMGFSTLAQLKQRNTLKDGIIMIQTLLIILFIIVPIFLLLDKDDSKAGMEEDHTYEGLDIDQTATYEDIVTLRTGEVKWSVGEHPGQE

SEQ ID NO: 686 - protein, 16 aa, synthetic construct
ARPAKSEDLYPNPKGS

SEQ ID NO: 687 - protein, 142 aa, synthetic construct
ARPAKSEDLYPNPKGSGGSELPTQGTFSNVSTNVSPAKPTTTACAKSEDLYPNPKGSGGSPAPRPPTPAPTIASQPLSLRPEACRPAAGGAVHTRGLDFACDIYIWAPLAGTCGVLLLSLVITLYCNHRNRRRVCKCPRPVV

SEQ ID NO: 688 - protein, 163 aa, synthetic construct
MALPVTALLLPLALLLHAARPARPAKSEDLYPNPKGSGGSELPTQGTFSNVSTNVSPAKPTTTACAKSEDLYPNPKGSGGSPAPRPPTPAPTIASQPLSLRPEACRPAAGGAVHTRGLDFACDIYIWAPLAGTCGVLLLSLVITLYCNHRNRRRVCKCPRPVV

SEQ ID NO: 689 - protein, 14 aa, synthetic construct
ARPAKSEDLYPNPK

SEQ ID NO: 690 - protein, 135 aa, synthetic construct
ARPAKSEDLYPNPKELPTQGTFSNVSTNVSPAKPTTTACAKSEDLYPNPKGGSPAPRPPTPAPTIASQPLSLRPEACRPAAGGAVHTRGLDFACDIYIWAPLAGTCGVLLLSLVITLYCNHRNRRRVCKCPRPVV

SEQ ID NO: 691 - protein, 156 aa, synthetic construct
MALPVTALLLPLALLLHAARPARPAKSEDLYPNPKELPTQGTFSNVSTNVSPAKPTTTACAKSEDLYPNPKGGSPAPRPPTPAPTIASQPLSLRPEACRPAAGGAVHTRGLDFACDIYIWAPLAGTCGVLLLSLVITLYCNHRNRRRVCKCPRPVV

SEQ ID NO: 692 - protein, 10 aa, synthetic construct
EEPLVVKVEE

SEQ ID NO: 693 - protein, 7 aa, synthetic construct
MLQMAGQ

SEQ ID NO: 694 - protein, 7 aa, synthetic construct
LWMHKVP

SEQ ID NO: 695 - protein, 7 aa, synthetic construct
SKWVFEH

SEQ ID NO: 696 - protein, 6 aa, synthetic construct
LEEKKV

SEQ ID NO: 697 - protein, 8 aa, synthetic construct
EPLVVKVE

SEQ ID NO: 698 - protein, 7 aa, synthetic construct
EPLVVKV

SEQ ID NO: 699 - protein, 8 aa, synthetic construct
RTEDLPKA

SEQ ID NO: 700 - protein, 8 aa, synthetic construct
TKEDPNPP

SEQ ID NO: 701 - protein, 7 aa, synthetic construct
TKEDPNP

SEQ ID NO: 702 - protein, 7 aa, synthetic construct
DPNFWLQ

SEQ ID NO: 703 - protein, 10 aa, synthetic construct
QPALPQIVAT

SEQ ID NO: 704 - protein, 8 aa, synthetic construct
PALPQIVA

SEQ ID NO: 705 - protein, 6 aa, synthetic construct
SGPVKE

SEQ ID NO: 706 - protein, 9 aa, synthetic construct
ETELSVSAE

SEQ ID NO: 707 - protein, 8 aa, synthetic construct
TELSVSAE

SEQ ID NO: 708 - protein, 7 aa, synthetic construct
DFAESGQ

SEQ ID NO: 709 - protein, 8 aa, synthetic construct
IDMDHEAS

SEQ ID NO: 710 - protein, 7 aa, synthetic construct
NFEESQT

SEQ ID NO: 711 - protein, 7 aa, synthetic construct
GVQWVRP

SEQ ID NO: 712 - protein, 6 aa, synthetic construct
NQDLPV

SEQ ID NO: 713 - protein, 8 aa, synthetic construct
PYNKINQR

SEQ ID NO: 714 - protein, 7 aa, synthetic construct
PGWFLDS

SEQ ID NO: 715 - protein, 10 aa, synthetic construct
FPQDRPFEDT

SEQ ID NO: 716 - protein, 9 aa, synthetic construct
PQDRPFEDT

SEQ ID NO: 717 - protein, 8 aa, synthetic construct
PQDRPFED

SEQ ID NO: 718 - protein, 10 aa, synthetic construct
QVDIVPSQGE

SEQ ID NO: 719 - protein, 6 aa, synthetic construct
ASDSEP

SEQ ID NO: 720 - protein, 11 aa, synthetic construct
QAAAETLSEVA

SEQ ID NO: 721 - protein, 11 aa, synthetic construct
VSGWRLFKKIS

SEQ ID NO: 722 - protein, 109 aa, synthetic construct
QSVLTQPPSVSVSPGQTASITCSGDKLGDKFACWYQQKPGQSPVLVIYQDSKRPSGIPERFSGSNSGNTATLTISGTQAMDEADYYCQAWDSDGKATVVFGTGTKVEIK

SEQ ID NO: 723 - protein, 109 aa, synthetic construct
QSVLTQPPSVSVSPGQTASITCSGDKLGDKYACWYQQKPGQSPVLVIYQDSKRPSGIPERFSGSNSGNTATLTISGTQAMDEADYYCQAWDSDGKATVVFGTGTKVEIK

SEQ ID NO: 724 - protein, 109 aa, synthetic construct
QSVLTQPPSVSVSPGQTASITCSGDKLGDKYACWYQQKPGQSPVLVIYQDTKRPSGIPERFSGSNSGNTATLTISGTQAMDEADYYCQAWDSDGKATVVFGTGTKVEIK

SEQ ID NO: 725 - protein, 109 aa, synthetic construct
QSVLTQPPSVSVSPGQTASITCSGDKLGNKYACWYQQKPGQSPVLVIYQDSKRPSGIPERFSGSNSGNTATLTISGTQAMDEADYYCQAWDSDGKATVVFGTGTKVEIK

SEQ ID NO: 726 - protein, 114 aa, synthetic construct
NFMLTQPHSVSESPGKTVTISCTRSSGSIASNYVQWYQQRPGSAPTTVIYEDNQRPSGVPDRFSGSIDSSSNSASLTISGLKTEDEADYYCQSYDLAADVRVVFGTGTKVTVSS

SEQ ID NO: 727 - protein, 114 aa, synthetic construct
NFMLTQPHSVSESPGKTVTISCTRRSGSIASNYVQWYQQRPGSAPTTVIYEDNQRPSGVPDRFSGSIDSSSNSASLTISGLKTEDEADYYCQSYDLAADVRVVFGTGTKVTVSS

SEQ ID NO: 728 - protein, 114 aa, synthetic construct
NFMLTQPHSVSESPGKTVTISCTRNSGSIASNYVQWYQQRPGSAPTTVIYEDNQRPSGVPDRFSGSIDSSSNSASLTISGLKTEDEADYYCQSYDLAADVRVVFGTGTKVTVSS

SEQ ID NO: 729 - protein, 114 aa, synthetic construct
NFMLTQPHSVSESPGKTVTISCTRSSGSIANNYVQWYQQRPGSAPTTVIYEDNQRPSGVPDRFSGSIDSSSNSASLTISGLKTEDEADYYCQSYDLAADVRVVFGTGTKVTVSS

SEQ ID NO: 730 - protein, 105 aa, synthetic construct
DIVMTQTPATLSVSAGERVTITCKASQSVSNDVTWYQQKPGQAPRLLIYSASNRYSGVPARFSGSGYGTEFTFTISSVQSEDFAVYFCQQDYSSFGQGTKLEIKR

SEQ ID NO: 731 - protein, 105 aa, synthetic construct
DIQMTQSPSSLSASVGDRVTITCKASQSVSNDVTWYQQKPGQAPKLLIYSASNRYSGVPARFSGSGYGTEFTFTISSVQSEDFAVYFCQQDYSSFGQGTKLEIKR

SEQ ID NO: 732 - protein, 109 aa, synthetic construct
DIQMTQSPSSLSASVGDRVTITCRASSSVSSSYLHWYQQKPGKAPKVWIYSTSNLASGVPSRFSGSGSGTDFTLTISSLQPEDFATYYCQQYSGYPITFGQGTKVEIKR

SEQ ID NO: 733 - protein, 109 aa, synthetic construct
ENVLTQSPAIMSASPGEKVTMTCRASSSVSSSYLHWYQQKSGASPKVWIYSTSNLASGVPGRFSGSGSGTSYSLTISSVEAEDAATYYCQQYSGYPITFGAGTKVEVKR

SEQ ID NO: 734 - protein, 113 aa, synthetic construct
DIVMTQSPDSLAVSLGERATINCKSSQSLLNSGNQKNYLAWYQQKPGQPPKLLIYWGSTRSTGVPDRFSGSGSGTDFTLTISSLQAEDVAVYYCQNDYTYPFTFGQGTKLEIK

SEQ ID NO: 735 - protein, 113 aa, synthetic construct
DIVMTQSPDSLAVSLGERATINCKSSQSLLNSGNNKNYVTWYQQKPGQPPKLLIYWGSTRSTGVPDRFSGSGSGTDFTLTISSLQAEDVAVYYCQNDYTYPFTFGQGTKLEIK

SEQ ID NO: 736 - protein, 108 aa, synthetic construct
DIQMTQSPSSLSASVGDRVTITCKASDHINNWLAWYQQKPGQAPKLLIYGATTLETGVPSRFSGSGSGTDYTLTISSLQPEDFATYYCQQSWNTPWTFGQGTKLEIKR

SEQ ID NO: 737 - protein, 108 aa, synthetic construct; identical to SEQ ID NO: 736

SEQ ID NO: 738 - protein, 108 aa, synthetic construct
DIQMTQSPSSLSASVGDRVTITCKASDHINNWLAWYQQKPGKAPKLLIYGATTLETGVPSRFSGSGSGTDFTLTISSLQPEDFATYYCQQSWNTPWTFGQGTKVEIKR

SEQ ID NO: 739 - protein, 108 aa, synthetic construct; identical to SEQ ID NO: 738

SEQ ID NO: 740 - protein, 107 aa, synthetic construct
QIVLTQSPAIMSASPGEKVTMTCSASSSVSFMHWYQQKSGTSPKRWIYDTSTLASGVPARFGGSGSGTSYSLTISSMEAEDAATYYCQQWSSNPLTFGAGTKLELKR

SEQ ID NO: 741 - protein, 112 aa, synthetic construct
DIVMTQSPLSLPVTPGEPASISCRSSKSLLHSNGITYLYWYLQKPGQSPQLLIYRMSNRASGVPDRFSGSGSGTDFTLKISRVEAEDVGVYHCGQLLENPYTFGQGTKLEIK

SEQ ID NO: 742 - protein, 111 aa, synthetic construct
EIVLTQSPGTLSLSPGERATLSCKASQSVSISGINLMNWYQQKPGQQPRLLIYHASILASGIPDRFSGSGSGTDFTLTISRLEPEDFAVYYCQQTRESPLTFGQGTRLEIK

SEQ ID NO: 743 - protein, 112 aa, synthetic construct; identical to SEQ ID NO: 741

SEQ ID NO: 744 - protein, 111 aa, synthetic construct; identical to SEQ ID NO: 742

SEQ ID NO: 745 - protein, 107 aa, synthetic construct [sequence omitted]

SEQ ID NO: 746 - protein, 108 aa, synthetic construct
DIQMTQSPSSLSASVGDRVTITCRASQDVRNIVVWFQQKPGKAPKLLIYSGSYRYSGVPSRFSGSGSGTDFTLTISSLQPEDFATYYCQQHYSPPYTFGQGTKVEIKR

SEQ ID NO: 747 - protein, 112 aa, synthetic construct
DIVLTQSPLSLAVSLGQPAIISCRASQSVSFAGTSLMHWYHQKPGQQPRLLIYRASNLEAGVPDRFSGSGSKTDFTLTISPVEAEDAATYYCQQSREYPYTFGGGTKLEIKR

SEQ ID NO: 748 - protein, 109 aa, synthetic construct
DIQMTQSPSSLSASVGDRVTITCRASQDVNTAVAWYQQKPGKAPKLLIYSAYFLYSGVPSRFSGSRSGTDFTLTISSLQPEDFATYYCQQYSRYSPVTFGQGTKVEIKR

SEQ ID NO: 749 - protein, 109 aa, synthetic construct
DIQMTQSPSSLSASVGDRVTITCRASQDINTAVAWYQQKPGKAPKLLIYSAYFLYSGVPSRFSGSRSGTDFTLTISSLQPEDFATYYCQQYSRYSPVTFGQGTKVEIKR

SEQ ID NO: 750 - protein, 108 aa, synthetic construct
DIQMTQSPSSLSASVGDRVTITCRASQDVSTAVAWYQQKPGKAPKLLIYSASFLYSGVPSRFSGSRSGTDFTLTISSLQPEDFATYYCQQYLYQPWTFGQGTKVEIKR

SEQ ID NO: 751 - protein, 108 aa, synthetic construct
DIQMTQSPSSLSASVGDRVTITCKASDLIHNWLAWYQQKPGKAPKLLIYGATSLETGVPSRFSGSGSGTDFTLTISSLQPEDFATYYCQQYWTTPFTFGQGTKVEIKR

SEQ ID NO: 752 - protein, 107 aa, synthetic construct
EIVLTQSPATLSLSPGERATLSCRASQSVSSYLAWYQQKPGQAPRLLIYDASNRATGIPARFSGSGSGTDFTLTISSLEPEDFAVYYCQQRSNWPLTFGQGTKVEIK

SEQ ID NO: 753 - protein, 107 aa, synthetic construct
EIVLTQSPATLSLSPGERATLSCRASQSVSSYLAWYQQKPGQAPRLLIYDASNRATGIPARFSGSGSGTDFTLTISSLEPEDFAVYYCQQRSDWPLTFGGGTKVEIK

SEQ ID NO: 754 - protein, 108 aa, synthetic construct
DIVMTQSPATLSVSPGERATLSCRASQSVSNDVVWYQQKPGQAPRLLIYYASNRYTGIPARFSGSGSGTEFTLTISSLQSEDFAVYYCQQDYTSPWTFGQGTKLEIKR

SEQ ID NO: 755 - protein, 107 aa, synthetic construct [sequence omitted]

SEQ ID NO: 756 - protein, 112 aa, synthetic construct
DIQMTQSPSSLSASVGDRVTITCQASENIYSFLAWYQQKPGKAPKLLIYSASKLAAGVPSRFSGSGSGTDFTLTISSLQPEDFATYYCQQTNRYSNPDIYNVFGQGTKLTVL

SEQ ID NO: 757 - protein, 113 aa, synthetic construct
DIVMTQSPATLSVSPGERATISCRSSQSIVHSNGNTYLEWYQQKPGQAPRLLIYKVSNRFSGIPDRFSGSGSGTDFTLTISRLEPEDFAVYYCFQGSHVPRTFGGGTKLEIKR

SEQ ID NO: 758 - protein, 111 aa, synthetic construct
QSALTQPASVSGSPGQSITISCTGTSSDVGGYNYVSWYQQHPGKAPKLMIYDVSNRPSGVSNRFSGSKSGNTASLTISGLQAEDEADYFCSSYTSSSTPVVFGGGTKLTVL

SEQ ID NO: 759 - protein, 108 aa, synthetic construct
EIVMTQSPGTLSLSPGERATLSCRASQSVSSSYLAWYQQKPGQAPRLLIYGASSRATGIPDRFSGSGSGTDFTLTISRLEPEDFAVYYCQQYGSSPLTFGGGTKVEIK

SEQ ID NO: 760 - protein, 108 aa, synthetic construct
EIVLTQSPATLSLSPGERATLSCRASQSVSSYLAWYQQKPGQAPRLLIYGASSRATGIPARFSGSGSGTDFTLTISSLEPEDFAVYYCQQRSNWPPYTFGQGTKLEIK

SEQ ID NO: 761 - protein, 108 aa, synthetic construct; identical to SEQ ID NO: 760

SEQ ID NO: 762 - protein, 108 aa, synthetic construct; identical to SEQ ID NO: 759

SEQ ID NO: 763 - protein, 107 aa, synthetic construct
DIQMTQSPSSLSASVGDRVTITCRASQSISSYLNWYQQKPGKAPKLLIYDASTLQSGVPSRFSGSGSGTDFTLTISSLQPEDFATYYCQQSDGNPTTFGQGTKVEIK

SEQ ID NO: 764 - protein, 98 aa, synthetic construct
DIQMTQSPSSLSASVGDRVTITCLASEDIYDNLAWYQQKPGKAPKLLIYYASSLQDGVPSRFSGSGSGTDYTLTISSLQPEDFATYYCLQDSEYPWTF

SEQ ID NO: 765 - protein, 98 aa, synthetic construct
DIQMTQSPSSLSASVGDRVTITCLASEDIYNNLAWYQQKPGKAPKLLIYYASSLQDGVPSRFSGSGSGTDYTLTISSLQPEDFATYYCLQDSEYPWTF

SEQ ID NO: 766 - protein, 113 aa, synthetic construct
DIVMTQSPDSLAVSLGERATINCKSSQSLLYSSNSKNYLAWYQQKPGQPPKLLIYWASTRESGVPDRFSGSGSGTDFTLTISSLQAEDVAVYYCQQPYSYPLSFGAGTKLELK

SEQ ID NO: 767 - protein, 114 aa, synthetic construct
DIVMSQSPDSLAVSLGERVTLNCKSSQSLLYSGNQKNYLAWYQQKPGQSPKLLIYWASARESGVPDRFSGSGSGTDFTLTISSVQAEDVAVYYCQQYYSYPLTFGAGTKLELKR

SEQ ID NO: 768 - protein, 107 aa, synthetic construct
QIVLTQSPAIMSVSPGEKVTMTCSASSSVNYMHWFQQKPGTSPKLWVYSTSNLASGVPARFSGSGSGTSYSLTISSMEAEDAATYYCQQRSIYPPWTFGGGTKLEIK

SEQ ID NO: 769 - protein, 107 aa, synthetic construct
QIVLTQSPAIMSVSPGEKVTMTCSASSSVNYLHWFQQKPGTSPKLWLYSTSNLASGVPARFSGSGSGTSYSLTISSMEAEDAATYYCQQRSIYPPWTFGGGTKLEIK

SEQ ID NO: 770 - protein, 107 aa, synthetic construct
QIVLTQSPSIMSVSPGEKVTMTCSASSSVNYLHWFQQKPGTSPKLWLYSTSNLASGVPARFSGSGSGTSYSLTISRVAAEDAATYYCQQRSNYPPWTFGGGTKLEIK

SEQ ID NO: 771 - protein, 107 aa, synthetic construct
QIVLTQSPSIMSVSPGEKVTMTCSATSSVSYLHWFQQKPGTSPKLWLYSTSNLASGVPARFSGSGSGTSYSLTISRVAAEDAATYYCQQRSNYPPWTFGGGTKLEIK

SEQ ID NO: 772 - protein, 109 aa, synthetic construct
EIVLTQSPATLSLSPGERATLSCSVSSSISSSNLHWYQQKPGQAPRLLIYSTSNLASGIPARFSGSGSGTDFTLTISSLEPEDFAVYYCQQWSSYPHTFGGGTKVEIKR

SEQ ID NO: 773 - protein, 109 aa, synthetic construct
EIVLTQSPATLSLSPGERATLSCSVSSSVSSSYLHWYQQKPGQAPRLLIYSTSNLASGIPARFSGSGSGTDFTLTISSLEPEDFAVYYCQQWSSYPHTFGGGTKVEIKR

SEQ ID NO: 774 - protein, 112 aa, synthetic construct
DIQLTQSPSSLSASVGDRVTITCKASQSVDYDGDSFLNWYQQKPGKAPKLLIYAASNLESGVPSRFSGSGSGTDFTLTISSLQPEDFATYYCQQSNEDPLTFGQGTKVEIKR

SEQ ID NO: 775 - protein, 112 aa, synthetic construct; identical to SEQ ID NO: 774

SEQ ID NO: 776 - protein, 112 aa, synthetic construct
DIQLTQSPSSLSASVGDRVTITCKASQSVDYEGDSFLNWYQQKPGKAPKLLIYAASNLESGVPSRFSGSGSGTDFTLTISSLQPEDFATYYCQQSNEDPLTFGQGTKVEIKR

SEQ ID NO: 777 - protein, 112 aa, synthetic construct; identical to SEQ ID NO: 776

SEQ ID NO: 778 - protein, 111 aa, synthetic construct
DIVMTQSPDSLAVSLGERATINCKASQSVDYEGDSFLNWYQQKPGQPPKLLIYAASNLESGVPSRFSGSGSGTDFTLTISSLQPEDVAVYYCQQSNEDPLTFGQGTKVEIK

SEQ ID NO: 779 - protein, 111 aa, synthetic construct
DIVMTQSPDSLAVSLGERATINCKASQSVDYEGDSFLNWYQQKPGQPPKLLIYAARKLGRGVPSRFSGSGSGTDFTLTISSLQPEDVAVYYCQQSNEDPLTFGQGTKVEIK

SEQ ID NO: 780 - protein, 111 aa, synthetic construct
DIVMTQSPDSLAVSLGERATINCKASQSVDYDGDSFLNWYQQKPGQPPKLLIYAASNLESGVPSRFSGSGSGTDFTLTISSLQPEDVAVYYCQQSNDDPLTFGQGTKVEIK

SEQ ID NO: 781 - protein, 111 aa, synthetic construct; identical to SEQ ID NO: 780

SEQ ID NO: 782 - protein, 111 aa, synthetic construct; identical to SEQ ID NO: 780

SEQ ID NO: 783 - protein, 113 aa, synthetic construct
DIQMTQSPSSLSASVGDRVTITCKSSQSLLDSDGKTYLNWYQQKPGKAPKLLIYLVSKLDSGVPSRFSGSGSGTDFTLTISSLQPEDFATYYCFQGTHFPFTFGQGTKVEIKR

SEQ ID NO: 784 - protein, 113 aa, synthetic construct; identical to SEQ ID NO: 783

SEQ ID NO: 785 - protein, 113 aa, synthetic construct
DIQMTQSPSSLSASVGDRVTITCKSSQSLLDSDGKTYLNWYQQKPGKAPKLLIYLVSKLDSGVPSRFSGSGSGTDFTLTISSLQPEDFATYYCWQGTHFPFTFGQGTKVEIKR

SEQ ID NO: 786 - protein, 113 aa, synthetic construct; identical to SEQ ID NO: 785

SEQ ID NO: 787 - protein, 113 aa, synthetic construct
DIQMTQSPSSLSASVGDRVTITCKSSQSLLDSDGKTYLNWYQQKPGKAPKLLIYLVSKLDSGVPSRFSGSGSGTDFTLTISSLQPEDFATYYCFQGTHFPYTFGQGTKVEIKR

SEQ ID NO: 788 - protein, 113 aa, synthetic construct; identical to SEQ ID NO: 787

SEQ ID NO: 789 - protein, 113 aa, synthetic construct; identical to SEQ ID NO: 783

SEQ ID NO: 790 - protein, 111 aa, synthetic construct
DIVLTQSPASLAVSLGQRATISCKASQSVDYDGDSFLNWYQKPGQPPKLFIYAASNLESGIPARFSGSGSGTDFTLNIHPVEEEDAATYYCQQSNEDPLTFGAGTELELKR

SEQ ID NO: 791 - protein, 112 aa, synthetic construct
DIVMTQTPLTLSVTIGQPASISCKSSQSLLDSDGKTYLNWLLQRPGQSPERLIYLVSKLDSGVPDRFTGSGSGTDFTLKISRVEAEDLGVYYCWQGTHFPYTFGGGTKVEIK

SEQ ID NO: 792 - protein, 112 aa, synthetic construct; identical to SEQ ID NO: 776

SEQ ID NO: 793 - protein, 111 aa, synthetic construct; identical to SEQ ID NO: 780

SEQ ID NO: 794 - protein, 111 aa, synthetic construct; identical to SEQ ID NO: 778

SEQ ID NO: 795 - protein, 113 aa, synthetic construct
DFVMTQTPLSLPVTPGEPASISCRSSQSIVHHDGNTYLEWYLQKPGQSPKLLIYKVSNRFSGVPDRFSGSGSGTDFTLKISRVEAEDVGVYYCFQGSHVPWTFGGGTKVEIKR

SEQ ID NO: 796 - protein, 113 aa, synthetic construct
DVVMTQTPLSLPVTPGEPASISCRSSQSIVHSDGNTYFEWYLQKPGQSPQLLIYKVSNRFSGVPDRFSGSGSGTDFTLKISRVEAEDVGVYYCFQGSHVPWTFGGGTKVEIKR

SEQ ID NO: 797 - protein, 112 aa, synthetic construct
DIVLTQSPPSLAVSLGQRATISCRASESVDSYGKTFMHWHQQKPGQPPKLLIYRVSNLESGIPARFSGSGSRTDFTLTINPVEADDVATYYCQQSNEDPFTFGGGTKLEIKR

SEQ ID NO: 798 - protein, 112 aa, synthetic construct
DIVMTQSQKFMSTSVGDRVSVTCKASQNVGSHVGWYQQKSGQSPKALIYSASNRYIGVPDRFTGSGSGTDFTLTISNVQSEDLAEYFCQQYHIYPYTFGGGTRLEIKRTVAA

SEQ ID NO: 799 - protein, 112 aa, synthetic construct; identical to SEQ ID NO: 798

SEQ ID NO: 800 - protein, 112 aa, synthetic construct
DIVMTQSQKFMSTSVGDRVSVTCKASQNVGTHVAWYQQKSGQSPKALIYSASNRYTGVPDRFTGSGSGTDFTLTISNVQSEDLAEYFCQQYHIYPYTFGGGTRLEIKRTVAA

SEQ ID NO: 801 - protein, 112 aa, synthetic construct
DIVMTQSQKFMSTSVGDRVSVTCKASQNVGSNVAWYQQKSGQSPKALIYSASNRYNGVPDRFTGSGSGTDFTLTISNVQSEDLAEYFCQQYHIYPYTFGGGTRLEIKRTVAA

SEQ ID NO: 802 - protein, 108 aa, synthetic construct
SYVLTQPPSVSVAPGQTARITCGGNNIGSQSVHWYQQKPGQAPVLVVYDDSDRPSGIPERFSGSNSGNTATLTISRVEAGDEADYYCQVWDSSSDHVVFGGGTKLTVL

SEQ ID NO: 803 - protein, 108 aa, synthetic construct
SYVLTQPPSVSVAPGQTARITCGGNNIGSKGVHWYQQKPGQAPVLVVYDDSDRPSGIPERFSGSNSGNTATLTISRVEAGDEADYYCQVWDSSSDHVVFGGGTKLTVL

SEQ ID NO: 804 - protein, 108 aa, synthetic construct
DIQMTQSPSSLSASVGDRVTITCRASQSIRNYLNWYQQKPGKAPELLIHAASSLQSGVPSRFSGSGSGTDFTLTISSLQPEDFASYYCQQSYSAPPITFGQGTRLEIK

SEQ ID NO: 805 - protein, 108 aa, synthetic construct
DIQMTQSPSSLSASVGDRVTITCRASQSIRNYLNWYQQKPGKAPELLIHAASSLQSGVPSRFSGSGSGTDFTLTISSLQPEDFASYYCQQSYSTPPITFGQGTRLEIK

SEQ ID NO: 806 - protein, 108 aa, synthetic construct
DIQMTQSPSSLSASVGDRVTITCRASQNIRNYLNWYQQKPGKAPELLIHAASSLQSGVPSRFSGSGSGTDFTLTISSLQPEDFASYYCQQSYSTPPITFGQGTRLEIK

SEQ ID NO: 807 - protein, 108 aa, synthetic construct
DIQMTQSPSSLSASVGDRVTITCRASQSISSYLNWYQQKPGKAPELLIHAASSLQSGVPSRFSGSGSGTDFTLTISSLQPEDFATYYCQQSYSTPPITFGQGTRLEIK

SEQ ID NO: 808 - protein, 112 aa, synthetic construct
DIQLTQSPSSLSASVGDRVTITCKASQSVDYSGDSFLNWYQQKPGKAPKLLIYAASNLESGVPSRFSGSGSGTDFTLTISSLQPEDFATYYCQQSNEDPLTFGQGTKVEIKR

SEQ ID NO: 809 - protein, 112 aa, synthetic construct
DIQLTQSPSSLSASVGDRVTITCKASQSVDYSGDSFLNWYQQKPGKAPKLFIYAASNLESGVPSRFSGSGSGTDFTLTISSLQPEDFATYYCQQSNEDPLTFGQGTKVEIKR

SEQ ID NO: 810 - protein, 112 aa, synthetic construct
DIQLTQSPSSLSASVGDRVTITCKASQSVDYAGDSFLNWYQQKPGKAPKLLIYAASNLESGVPSRFSGSGSGTDFTLTISSLQPEDFATYYCQQSNEDPLTFGQGTKVEIKR

SEQ ID NO: 811 - protein, 112 aa, synthetic construct
DMQLTQSPSSLSASVGDRVTITCKASQSVDYAGDSFMNWYQQKPGKAPKLLIYAASNLESGVPSRFSGSGSGTDFTLTISSLQPEDFATYYCQQSNEDPYTFGQGTKVEIKR

SEQ ID NO: 812 - protein, 112 aa, synthetic construct
DMQLTQSPSSLSASVGDRVTITCKASQSVDYAGDSYMNWYQQKPGKAPKLLIYAASNLESGVPSRFSGSGSGTDFTLTISSLQPEDFATYYCQQSNEDPYTFGQGTKVEIKR

SEQ ID NO: 813 - protein, 112 aa, synthetic construct
DIQLTQSPSSLSASVGDRVTITCKASQSVDYDGDSYMNWYQQKPGKAPKLLIYAASNLESGVPSRFSGSGSGTDFTLTISSLQPEDFATYYCQQSNEDPLTFGQGTKVEIKR

SEQ ID NO: 814 - protein, 112 aa, synthetic construct
DMQLTQSPSSLSASVGDRVTITCKASQSVDYAGDSYMNWYQQKPGKAPKLLIYAASNLESGVPSRFSGSGSGTDFTLTISSLQPEDFATYYCQQSNEDPWTFGQGTKVEIKR

SEQ ID NO: 815 - protein, 112 aa, synthetic construct
DIQLTQSPSSLSASVGDRVTITCRASQSVDYEGDSFLNWYQQKPGKAPKLLIYAASNLESGVPSRFSGSGSGTDFTLTISSLQPEDFATYYCQQSNEDPLTFGQGTKVEIKR

SEQ ID NO: 816 - protein, 112 aa, synthetic construct
DIQLTQSPSSLSASVGDRVTITCKASQSVDYDGDSYMNWYQQKPGKAPKLLIYAASTLESGVPSRFSGSGSGTDFTLTISSLQPEDFATYYCQQSNEDPRTFGQGTKVEIKR

SEQ ID NO: 817 - protein, 112 aa, synthetic construct
DIQLTQSPSSLSASVGDRVTITCKASQSVDYDGDSYMSWYQQKPGKAPKLLIYGASNLESGVPSRFSGSGSGTDFTLTISSLQPEDFATYYCQQSNEDPYTFGQGTKVEIKR

SEQ ID NO: 818 - protein, 112 aa, synthetic construct
DIQLTQSPSSLSASVGDRVTITCKASQSVDYDGDSYMNWYQQKPGKAPKLLIYAASYLESGVPSRFSGSGSGTDFTLTISSLQPEDFATYYCQQSNEDPYTFGQGTKVEIKR

SEQ ID NO: 819 - protein, 107 aa, synthetic construct
QIVLTQSPAIMSVSPGEKVTMTCSASSSVNYMHWFQQKPGTSPKLWVYSTSNLASGVPARFSGSGSGTSYSLTISSMEAEDAATYYCQQRNNYPPWTFGGGTKLEIK

SEQ ID NO: 820 - protein, 107 aa, synthetic construct
QIVLTQSPAIMSVSPGEKVTMTCSASSSVNYMHWFQQKPGTSPKLWVYSTSNLASGVPARFSGSGSGTSYSLTISSMEAEDAATYYCQQRSNYPPWTFGGGTKLEIK

SEQ ID NO: 821 - protein, 107 aa, synthetic construct; identical to SEQ ID NO: 768

SEQ ID NO: 822 - protein, 107 aa, synthetic construct
QIVLTQSPAIMSVSPGEKVTMTCSASSSVSYMHWFQQKPGTSPKLWVYSTSNLASGVPARFSGSGSGTSYSLTISSMEAEDAATYYCQQRSIYPPWTFGGGTKLEIK

SEQ ID NO: 823 - protein, 107 aa, synthetic construct
QIVLTQSPAIMSVSPGEKVTMTCSASSSVSYMHWFQQKPGTSPKLWVYSTSNLASGVPARFSGSGSGTSYSLTISSMEAEDAATYYCQQRSTYPPWTFGGGTKLEIK

SEQ ID NO: 824 - protein, 107 aa, synthetic construct
QIVLTQSPAIMSVSPGEKVTMTCSASSSVSYMHWFQQKPGTSPKLWVYSTSNLASGVPARFSGSGSGTSYSLTISSMEAEDAATYYCQQRSNYPPWTFGGGTKLEIK

SEQ ID NO: 825 - protein, 107 aa, synthetic construct
QIVLTQSPAIMSVSPGEKVTMTCSASSSVSYMHWFQQKPGTSPKLWVYSTSNLASGVPARFSGSGSGTSYSLTISSMEAEDAATYYCQQRNNYPPWTFGGGTKLEIK

SEQ ID NO: 826 - protein, 107 aa, synthetic construct
QIVLTQSPAIMSVSPGEKVTMTCSASSSVNYMHWFQQKPGTSPKLWVYSTSNLASGVPARFSGSGSGTSYSLTISSMEAEDAATYYCQQRNIYPPWTFGGGTKLEIK

SEQ ID NO: 827 - protein, 107 aa, synthetic construct; identical to SEQ ID NO: 826

SEQ ID NO: 828 - protein, 107 aa, synthetic construct
EIVMTQSPATLSVSPGERATLSCRASQSVSSNLAWYQQKPGQAPRLLIYGASTRATGIPARFSGSGSGTEFTLTISSLQSEDFAVYYCQQYNNWPFTFGPGTKVDIK

SEQ ID NO: 829 - protein, 107 aa, synthetic construct
EIVMTQSPATLSVSPGERATLSCRASQSVNSNLAWYQQKPGQAPRLLIYGASTRATGIPARFSGSGSGTEFTLTISSLQSEDFAVYYCQQYNNWPFTFGPGTKVDIK

SEQ ID NO: 830 - protein, 113 aa, synthetic construct
AQVLTQTPSSVSAAVGGTVTINCQASQSVYKNNYLSWYQQKPGQPPRLLIYDASTLASGVPSRFKGSGSGTQFTLTISGVQCDDAATYYCLGEFSCSSGDCAAFGGGTEVVVK

SEQ ID NO: 831 - protein, 113 aa, synthetic construct
AQVLTQTPSSVSAAVGGTVTINCQASQSVYNNNYLSWYQQKPGQPPRLLIYDASTLASGVPSRFKGSGSGTQFTLTISGVQCDDAATYYCLGEFSCSSGDCAAFGGGTEVVVK

SEQ ID NO: 832 - protein, 113 aa, synthetic construct
AQVLTQTPSSVSAAVGGTVTINCQASQSVYKNNYLSWYQQKPGQPPRLLIYDASTLASGVPSRFKGSGSGTQFTLTISGVQCDDAATYYCLGEFSCSSGDCSAFGGGTEVVVK

SEQ ID NO: 833 - protein, 113 aa, synthetic construct
AQVLTQTPSSVSAAVGGTVTINCQASQSVYKNNYLSWYQQKPGQPPRLLIYDASTLASGVPSRFKGSGSGTQFTLTISGVQCDDAATYYCQGEFSCSSGDCAAFGGGTEVVVK

SEQ ID NO: 834 - protein, 113 aa, synthetic construct
AQVLTQTPSSVSAAVGGTVTINCQASQSVYNNNYLSWYQQKPGQPPRLLIYDASTLASGVPSRFKGSGSGTQFTLTISGVQCDDAATYYCQGEFSCSSGDCSAFGGGTEVVVK

SEQ ID NO: 835 - protein, 107 aa, synthetic construct
DIQMTQSPASLSASVGETVTITCRASESVYTYLAWYQQKQGKSPQLLVYNAKTLTEGVPSRFSGSGSGTQFSLRINSLQPEDFGSYYCQHHYGTPYTFGSGTKLEIK

SEQ ID NO: 836 - protein, 107 aa, synthetic construct
DIQMTQSPASLSASVGETVTITCRASESVYTYLAWYQQKQGKSPQLLVYNAKTLTEGVPSRFSGSGSGTQFSLRINSLQPEDFGSYYCQHHYGTPFTFGSGTKLEIK

SEQ ID NO: 837 - protein, 107 aa, synthetic construct
DIQMTQSPASLSASVGETVTITCRASESVYSYLAWYQQKQGKSPQLLVYNAKTLTEGVPSRFSGSGSGTQFSLRINSLQPEDFGSYYCQHHYGTPYTFGSGTKLEIK

SEQ ID NO: 838 - protein, 107 aa, synthetic construct
DIQMTQSPASLSASVGETVTITCRASENIYSYLAWYQQKQGKSPQLLVYNAKTLTEGVPSRFSGSGSGTQFSLRINSLQPEDFGSYYCQHHYGTPYTFGSGTKLEIK

SEQ ID NO: 839 - protein, 107 aa, synthetic construct
DIQMTQSPASLSASVGETVTITCRASESVYTYLAWYQQKQGKSPQLLVYNAKTLTEGVPSRFSGSGSGTQFSLRINSLQPEDFGSYYCQHHYGSPYTFGSGTKLEIK

SEQ ID NO: 840 - protein, 107 aa, synthetic construct
DIQMTQSPASLSASVGETVTITCRASESVYTYLAWYQQKQGKSPQLLVYNAKTLTEGVPSRFSGSGSGTQFSLRINSLQPEDFGSYYCQHHYGTPLTFGSGTKLEIK

SEQ ID NO: 841 - protein, 107 aa, synthetic construct
DIQMTQSPASLSASVGETVTITCRASESVYTYLAWYQQKQGKSPQLLVYNAKTLTEGVPSRFSGSGSGTQFSLRINSLQPEDFGSYYCQHHYGTPWTFGSGTKLEIK

SEQ ID NO: 842 - protein, 108 aa, synthetic construct
SSELTQDPAVSVALGQTVRITCQGDSLRSYYASWYQQKPGQAPVLVIYGKNNRPSGIPDRFSGSSSGNTASLTITGAQAEDEADYYCNSSPRLKHRVVFGGGTKLTVL

SEQ ID NO: 843 - protein, 108 aa, synthetic construct
SSELTQDPAVSVALGQTVRITCQGDSLRSYYASWYQQKPGQAPVLVIYGKNNRLSGIPDRFSGSSSGNTASLTITGAQAEDEADYYCNSSPRLKHRVVFGGGTKLTVL

SEQ ID NO: 844 - protein, 108 aa, synthetic construct
SSELTQDPAVSVALGQTVRITCQGDSLRSYYASWYQQKPGQAPVLVIYGKNDRPSGIPDRFSGSSSGNTASLTITGAQAEDEADYYCNSSPRLKHRVVFGGGTKLTVL

SEQ ID NO: 845 - protein, 108 aa, synthetic construct
SSELTQDPAVSVALGQTVRITCQGDSLRSYYASWYQQKPGQAPVLVIYGKTNRPSGIPDRFSGSSSGNTASLTITGAQAEDEADYYCNSSPRLKHRVVFGGGTKLTVL

SEQ ID NO: 846 - protein, 113 aa, synthetic construct
DVVMTQTPLTLSVSIGQPASISCKSSQSLLDSDGRTYLNWLLQRPGQSPKRLIYLVSKLDSGAPDRFTGSGSGTDFTLKISRVEAEDLGVYYCWQGTHFPQTFGGGTKLEIKR

SEQ ID NO: 847 - protein, 113 aa, synthetic construct
DVVMTQTPLTLSVSIGQPASISCKSSQSLLDSDGKTYLNWLLQRPGQSPKRLIYLVSKLDSGAPDRFTGSGSGTDFTLKISRVEAEDLGVYYCWQGTHFPQTFGGGTKLEIKR

SEQ ID NO: 848 - protein, 122 aa, synthetic construct
EVQLLESGGGLVQPGGSLRLSCAASGFTFSSYAMSWVRQAPGKGLEWVSAISGSGGSTYYADSVKGRFTISRDNSKNTLYLQMNSLRAEDTAVYYCAKEQWEGDYFSAFDIWGQGTMVTVSS

SEQ ID NO: 849 - protein, 122 aa, synthetic construct; identical to SEQ ID NO: 848

SEQ ID NO: 850 - protein, 122 aa, synthetic construct; identical to SEQ ID NO: 848

SEQ ID NO: 851 - protein, 122 aa, synthetic construct; identical to SEQ ID NO: 848

SEQ ID NO: 852 - protein, 124 aa, synthetic construct
EVQLLESGGGLVQPGGSLRLSCAASGFTFSSYAMSWVRQAPGKGLEWVSAISGSGGSTYYADSVKGRFTISRDNSKNTLYLQMNSLRAEDTAVYYCAKGGENTFESHPVAFDIWGQGTMVTVSS

SEQ ID NO: 853 - protein, 124 aa, synthetic construct; identical to SEQ ID NO: 852

SEQ ID NO: 854 - protein, 124 aa, synthetic construct; identical to SEQ ID NO: 852

SEQ ID NO: 855 - protein, 124 aa, synthetic construct; identical to SEQ ID NO: 852

SEQ ID NO: 856 - protein, 119 aa, synthetic construct
QVQLVESGPGVVQPGRSLRISCAVSGFSVTNYGVHWVRQPPGKGLEWLGVIWAGGITNYNSAFMSRLTISKDNSKNTVYLQMNSLRAEDTAMYYCASRGGHYGYALDYWGQGTLVTVSS

SEQ ID NO: 857 - protein, 119 aa, synthetic construct; identical to SEQ ID NO: 856

SEQ ID NO: 858 - protein, 118 aa, synthetic construct
QVQLQESGPGLVKPSQTLSITCTVSGFSLASYNIHWVRQPPGKGLEWLGVIWAGGSTNYNSALMSRLTISKDNSKNQVFLKMSSLTAADTAVYYCAKRSDDYSWFAYWGQGTLVTVSS

SEQ ID NO: 859 - protein, 119 aa, synthetic construct
QVQLKESGPVLVAPSQTLSITCTVSGFSLASYNIHWVRQPPGKGLEWLGVIWAGGSTNYNSALMSRLSISKDNSKSQVFLQMNSLQTDDTAMYYCAKRSDDYSWFAYWGQGTLVTVSAS

SEQ ID NO: 860 - protein, 118 aa, synthetic construct
QVQLVQSGAEVKKPGASVKVSCKASGYTFTSFWLNWVRQAPGQGLEWMGNIYPSTSYTVYNQKFKDRVTMTRDTSTSTVYMELSSLRSEDTAVYYCARTWRGNSFDYWGQGTTVTVSS

SEQ ID NO: 861 - protein, 118 aa, synthetic construct
QVQLVQSGAEVKKPGASVKVSCKASGYTFTSFWLNWVRQAPGQGLEWMGNIYPSDSYTVYNQKFKDRVTMTRDTSTSTVYMELSSLRSEDTAVYYCARTWRGNSFDYWGQGTTVTVSS

SEQ ID NO: 862 - protein, 121 aa, synthetic construct
QVQLQQPGAELVKPGASVKMSCKASGYTFSSYWINWMKQKPGQGLEWIGQIYPGDGDTNYNGKFKGRATLTADTSSSTAYMQLSSLTSEDSAVYFCARSITTVVGCAMDYWGQGTSVTVSS

SEQ ID NO: 863 - protein, 121 aa, synthetic construct
QVQLQQPGAELVKPGASVKMSCKASGYAFSSSWINWMKQKPGQGLEWIGQIYPGDGDTNYNGKFKGRATLTADTSSSTAYMQLSSLTSEDSAVYFCARSITTVVGCAMDYWGQGTSVTVSS

SEQ ID NO: 864 - protein, 121 aa, synthetic construct
EVQLVESGGGLVQPGGSLRLSCAASGYTFSSYWVNWVRQAPGKGLEWVAQIYPGDGDTNYNGKFKGRFTISRDNSKNTLYLQMNSLRAEDTAVYYCARSITTVVGCAMDYWGQGTLVTVSS

SEQ ID NO: 865 - protein, 121 aa, synthetic construct
EVQLVESGGGLVQPGGSLRLSCAASGYAFSNYWVNWVRQAPGKGLEWVAQIYPGDGDTNYNGKFKGRFTISRDNSKNTLYLQMNSLRAEDTAVYYCARSITTVVGCAMDYWGQGTLVTVSS

SEQ ID NO: 866 - protein, 116 aa, synthetic construct
QVQLQQSGPELVKPGASVRISCKASGYTFTSYYIHWVKQRPGQGLEWIGWIYPGNLNTKYNEKFKGKATLTADKSSSTAYMQLSSLTSEDSAVYFCARYDWYFDVWGAGTTVTVSS

SEQ ID NO: 867 - protein, 116 aa, synthetic construct
QVQLVESGGGVVQPGRSLRLSCAASGFSFSNYGMAWVRQAPGKGLEWVASISTGGGNTYYADSVKDRFTISRDNSKNTLYLQMNSLRAEDTAVYYCTRHDRGGLYWGQGTMVTVSS

SEQ ID NO: 868 - protein, 117 aa, synthetic construct
ELQLLESGGGLVQPGGSLRLSCAASGFTFSKYAMAWVRQAPGKGLEWVASISTGGVNTYYADSVKDRFTISRDNAKNTLYLQMNSLRAEDTAVYYCATHTGDYFDYWGQGTMVTVSS

SEQ ID NO: 869 - protein, 117 aa, synthetic construct; identical to SEQ ID NO: 868

SEQ ID NO: 870 - protein, 116 aa, synthetic construct; identical to SEQ ID NO: 867

SEQ ID NO: 871 - protein, 125 aa, synthetic construct
QLQLQESGPGLVKPSETLSLTCTVSGGSISSSSYWWGWTRQPPGRGLEWIGTMYYSGNIYYNPSLQSRATISVDTSKNQFSLKLSSVTAADTAVYYCARHVGYSYGRRFWYFDLWGRGTLVTVSS

SEQ ID NO: 872 - protein, 120 aa, synthetic construct
EVQLVESGPGLVKPSETLSLTCTVSGFSLTRFGVHWVRQPPGKGLEWLGVIWRGGSTDYNAAFMSRLTISKDNSKNQVSLKLSSVTAADTAVYYCSNHYYGSSDYALDNWGQGTLVTVSS

SEQ ID NO: 873 - protein, 118 aa, synthetic construct
QVQLVQSGAEVVKPGASVKISCKASGYTFTGYFMHWVKQSPGQSLEWIGRIHPYDGDTFYNQKFQGKATLTVDKSSNTAHMELLSLTSEDFAVYYCTRYDGSRAMDYWGQGTTVTVSS

SEQ ID NO: 874 - protein, 121 aa, synthetic construct
EVQLVESGGGLVQPGGSLRLSCAASGFNVYASGMHWVRQAPGKGLEWVAKIYPDSDYTYYADSVKGRFTISADTSKNTAYLQMNSLRAEDTAVYYCSRDSSFYYVYAMDYWGQGTLVTVSS

SEQ ID NO: 875 - protein, 121 aa, synthetic construct; identical to SEQ ID NO: 874

SEQ ID NO: 876 - protein, 117 aa, synthetic construct
EVQLVESGGGLVQPGGSLRLSCAASGFNIDYYGMHWVRQAPGKGLEWVASLYGGSDSTDYADSVKGRFTISADTSKNTAYLQMNSLRAEDTAVYYCSRQYSAYFDYWGQGTLVTVSS

SEQ ID NO: 877 - protein, 116 aa, synthetic construct
EVQLVESGGGLVQPGGSLRLSCAASGYSITNDYAWNWVRQAPGKGLEWVGYISYSGYTTYNPSIKSRFTISRDTSKNTLYLQMNSLRAEDTAVYYCARWTSGLDYWGQGTLVTVSS

SEQ ID NO: 878 - protein, 120 aa, synthetic construct
QVQLVQSGAEVKKPGSSVKVSCKASGGTFSTYAIHWVRQAPGQGLEWMGRIIPIEGRAYYAQKFQGRVTITADESTSTAYMELSSLRSEDTAVYYCARGRYSYRYWFDYWGQGTLVTVSS

SEQ ID NO: 879 - protein, 120 aa, synthetic construct
QVQLVQSGAEVKKPGSSVKVSCKASGGTFSSYAIHWVRQAPGQGLEWMGRIIPIEGRAYYAQKFQGRVTITADESTSTAYMELSSLRSEDTAVYYCARGRYSYRYWFDYWGQGTLVTVSS

SEQ ID NO: 880 - protein, 118 aa, synthetic construct
EVQLVQSGAEVKKPGASVRVSCKASGYTFTNYGMNWVRQAPGQGLEWMGWINTYTGEPTYADDFKGRVTMTTDTSTSTAYMELRSLRSDDTAVYYCARIGDSSPSDYWGQGTLVTVSS

SEQ ID NO: 881 - protein, 122 aa, synthetic construct
EVQLVESGGGLVQPGGSLRLSCAASGFTFSSYAMSWVRQAPGKGLEWVSAISGSGGSTYYADSVKGRFTISRDNSKNTLYLQMNSLRAEDTAVYYCARLGYPTTTLLPFDYWGQGTLVTVSS

SEQ ID NO: 882 - protein, 121 aa, synthetic construct
EVQLVESGGGLVQPGGSLRLSCAASGIDFNSNYYMCWVRQAPGKGLEWIGCIYVGSHVNTYYANWAKGRFTISRDNSKNTVYLQMNSLRAEDTAVYYCATSGSSVLYFKFWGQGTLVTVSS

SEQ ID NO: 883 - protein, 118 aa, synthetic construct
QVQLVQSGPEVKKPGASVKVSCKASGYTFTSYHIQWVRQAPGQGLEWIGWIYPGDGSTQYNEKFKGRVTITADKSTSTAYMELSSLTSEDTAVYYCAREGTYYAMDYWGQGTSVTVSS

SEQ ID NO: 884 - protein, 127 aa, synthetic construct
QVQLQQSGAGLLKPSETLSLTCAVSGGSFSGYYWTWIRQRPGKGLEWIGEINHRGSTDYNPSLKSRVTMSIDTSKSQFSLNLKSVTAADTAVYYCARAAWGSCYDGTCYPAEYFQYWGQGTLVTVSS

SEQ ID NO: 885 - protein, 123 aa, synthetic construct
QVQLVQSGAEVKKPGASVKVSCKASGYSFTSYGINWVRQAPGQGLEWMGWISAYNGNTNYAQKLQGRVTMTRDTSTRTAYMELRSLRSDDTAVYYCAREYDILTGYSDAFDIWGQGTLVTVSS

SEQ ID NO: 886 - protein, 119 aa, synthetic construct
QVQLVESGGGLVKPGGSLRLSCAASGFTFSSYSMHWVRQAPGKGLEWVSDISTNSRTRNYADSVKGRFTISRDNAKNSVYLQMHSLRDEDTAVYYCARDYGGIYYFDYWGQGTLVTVSS

SEQ ID NO: 887 - protein, 127 aa, synthetic construct; identical to SEQ ID NO: 884

SEQ ID NO: 888 - protein, 123 aa, synthetic construct
QVQLVQSGAEVKKPGASVKVSCKASGYSFTSYGINWVRQAPGQGLEWMGWISAYNGYTNYAQKLQGRVTMTRDTSTRTAYMELRSLRSDDTAVYYCAREYDILTGYSDAFDIWGQGTLVTVSS

SEQ ID NO: 889 - protein, 116 aa, synthetic construct
EVQLLESGGGLVQPGGSLRLSCAASGFTFSSYAMSWVRQAPGKGLEWVSSISTSGSYTAYADSVKGRFTISRDNSKNTLYLQMNSLRAEDTAVYYCAKGGYTFDYWGQGTLVTVSS

SEQ ID NO: 890 - protein, 126 aa, synthetic construct
EVTLKESGPALVKPTQTLTLTCTFSGFSLTTYGMGVGWIRQPPGKALEWLANIWWDDDKYYNPSLKNRLTISKDTSKNQVVLTMTNMDPVDTATYYCARIGPIKYPTAPYRYFDFWGQGTMVTVSS

SEQ ID NO: 891 - protein, 126 aa, synthetic construct
EVTLKESGPALVKPTQTLTLTCTFSGFSLSTYGMGVGWIRQPPGKALEWLANIWWDDDKYYNPSLKNRLTISKDTSKNQVVLTMTNMDPVDTATYYCARIGPIKYPTAPYRYFDFWGQGTMVTVSS

SEQ ID NO: 892 - protein, 119 aa, synthetic construct
QVQLVQSGAEVKKPGASVKVSCKASGYTFTDHAIHWVRQAPGQRLEWMGYFSPGNDDFKYSQKFQGRVTITADTSASTAYMELSSLRSEDTAVYFCTRSLNMAYWGQGTLVTVSSGSTS

SEQ ID NO: 893 - protein, 115 aa, synthetic construct
QVQLVQSGAEVVKPGASVKISCKASGYTFTDHAIHWVKQNPGQRLEWIGYFSPGNDDFKYNERFKGKATLTADTSASTAYVELSSLRSEDTAVYFCTRSLNMAYWGQGTLVTVSS

SEQ ID NO: 894 - protein, 117 aa, synthetic construct
EVQLQQSGPELVKPGASVKISCKASGYSFTGYTMNWVKQSHGKNLEWIGLINPYNGGTSYNQKFKAKATLTVDKSSSTAYMQLKSLTSEDSAVYYCARDYGYVLDYWGQGTSVTVSS

SEQ ID NO: 895 - protein, 117 aa, synthetic construct
EVQLQQSGPELVKPGASMKISCKASGFSFTGYTMNWVKQSHGKNLEWIGLISPYNGGTSYNQKFKGKATLTVDKSSSTAYMELLSLTSEDSAVYYCARDYGYVLDYWGQGTTLTVSS

SEQ ID NO: 896 - protein, 117 aa, synthetic construct
EVQLQQSGPELVKPGASVKISCKASGFSFTGYTMNWVKQSHVKNLEWIGLISPYNGGTSYNQKFKGKATLTVDKSSSTAYMELLSLTSEDSAVYYCARDYGFVLDYWGQGTSVTVSS

SEQ ID NO: 897 - protein, 126 aa, synthetic construct
QVQLVQSGAEVKKPGASVKVSCKASGYTFTNYLIEWVRQAPGQGLEWMGLINPGSGGTNYNEKFKGRVTMTTDTSTSTAYMELRSLRSDDTAVYYCARRSPLGSWIYYAYDGVAYWGQGTLVTVSS

SEQ ID NO: 898 - protein, 126 aa, synthetic construct
QVQLVQSGAEVKKPGASVKVSCKASGYAFTNYLIEWVRQAPGQGLEWMGVINPGSGSTNYNEKFKGRVTMTTDTSTSTAYMELRSLRSDDTAVYYCARRSPLGSWIYYAYDGVAYWGQGTLVTVSS

SEQ ID NO: 899 - protein, 117 aa, synthetic construct [sequence omitted]

SEQ ID NO: 900 - protein, 117 aa, synthetic construct
EVQLVESGGGLVQPGGSLRLSCAASGYTFTSYWIEWVRQAPGKGLEWIGEILPGGGDTNYNEIFKGRATFSADTSKNTAYLQMNSLRAEDTAVYYCTRRVPIRLDYWGQGTLVTVSS

SEQ ID NO: 901 - protein, 117 aa, synthetic construct; identical to SEQ ID NO: 900

SEQ ID NO: 902 - protein, 117 aa, synthetic construct
QVQLQQPGAELVKPGASVKMSCKASGYTFTSYWINWMKQKPGQGLEWIGQILPGGGDTNYNGKFKGRATLTADTSSSTAYMQLSSLTSEDSAVYFCTRRVPIRLDYWGQGTSVTVSS

SEQ ID NO: 903 - protein, 117 aa, synthetic construct; identical to SEQ ID NO: 900

SEQ ID NO: 904 - protein, 117 aa, synthetic construct; identical to SEQ ID NO: 900

SEQ ID NO: 905 - protein, 117 aa, synthetic construct
QVQLVQSGAEVKKPGASVKVSCKASGYTFTSYWINWVRQAPGQGLEWMGQILPGGGDTNYNGKFKGRVTITADTSTSTAYMELSSLRSEDTAVYYCTRRVPIRLDYWGQGTLVTVSS

SEQ ID NO: 906 - protein, 117 aa, synthetic construct; identical to SEQ ID NO: 900

SEQ ID NO: 907 - protein, 117 aa, synthetic construct [sequence omitted]

SEQ ID NO: 908 - protein, 113 aa, synthetic construct
EVQLVESGGGLVQPGGSLRLSCAASGYTFTSYWMNWVRQAPGKGLEWVGMIDPSDSETHYNHIFKDRFTISADTSKNTAYLQMNSLRAEDTAVYYCARNLYLFGQGTLVTVSS

SEQ ID NO: 909 - protein, 113 aa, synthetic construct
EVQLVESGGGLVQPGGSLRLSCAASGYTFSSYWMNWVRQAPGKGLEWVGMIDPSDSETHYNHIFKDRFTISADTSKNTAYLQMNSLRAEDTAVYYCARNLYLWGQGTLVTVSS

SEQ ID NO: 910 - protein, 113 aa, synthetic construct; identical to SEQ ID NO: 908

SEQ ID NO: 911 - protein, 113 aa, synthetic construct; identical to SEQ ID NO: 909

SEQ ID NO: 912 - protein, 113 aa, synthetic construct; identical to SEQ ID NO: 908

SEQ ID NO: 913 - protein, 113 aa, synthetic construct
EVQLVESGGGLVQPGGSLRLSCAASGYTFTNYWMNWVRQAPGKGLEWVGMIDPSDSETHYNHIFKDRFTISADTSKNTAYLQMNSLRAEDTAVYYCARNLYLWGQGTLVTVSS

SEQ ID NO: 914 - protein, 113 aa, synthetic construct; identical to SEQ ID NO: 913

SEQ ID NO: 915 - protein, 117 aa, synthetic construct
EVQLQQSGAELMKPGASVKISCKATGYTFSSYWIEWVKQRPGHGLEWIGEILPGGGDTNYNEIFKGKATFTADTSSNTAYMQLSSLTSEDSAVYYCTRRVPVYFDYWGQGTSVTVSS

SEQ ID NO: 916 - protein, 113 aa, synthetic construct
QVQLQQPGAELVRPGASVKLSCKASGYTFTSYWMNWVKQRPGQGLEWIGMIDPSDSETHYNHIFKDKATLTVDKSSSTAYLQLSSLTSEDSAVYYCARNLYLWGQGTSVTVSS

SEQ ID NO: 917 - protein, 117 aa, synthetic construct [sequence omitted]

SEQ ID NO: 918 - protein, 117 aa, synthetic construct; identical to SEQ ID NO: 900

SEQ ID NO: 919 - protein, 117 aa, synthetic construct [sequence omitted]

SEQ ID NO: 920 - protein, 117 aa, synthetic construct
EVQLVQSGAEVKKPGSSVKVSCKASGGSFSSYGINWVKQAPGQGLEWIGEIFPRSGNTYYNEKFEGRATLTADKSTSTAYMELRSLRSEDTAVYYCAKGDLGDFDYWGQGTTVTVSS

SEQ ID NO: 921 - protein, 119 aa, synthetic construct
EVQLVQSGAEVKKPGASVKVSCKASGYTFTSYGINWVKQAPGQGLEWIGEIYPRSGNIYYNEKFKGKATLTADKSTSTAYMELRSLRSDDTAVYYCARGSDYDGDFAYWGQGTLVTVSS

SEQ ID NO: 922 - protein, 112 aa, synthetic construct
EVQLQESGPGLVKPSQSLSLTCTVTGYSITSDYAWNWIRQFPGNKLEWMGNIWYSGSTTYNPSLKSRISITRDTSKNQFFLQLNSVTSEDTATYYCSRMDFWGQGTTLTVSS

SEQ ID NO: 923 - protein, 116 aa, synthetic construct
EVQLLETGGGLVQPGGSRGLSCEGSGFTFSGFWMSWVRQTPGKTLEWIGDINSDGSSINYAPSIKDRFTIFRDNDKSILYLQMTNVRSEDTGTYFCVTTYGDYWGQGTTLTVSSAS

SEQ ID NO: 924 - protein, 116 aa, synthetic construct; identical to SEQ ID NO: 923

SEQ ID NO: 925 - protein, 116 aa, synthetic construct
EVQLLETGGGLVQPGGSRGLSCEGSGFTFSGFWMSWVRQTPGKTLEWIGDINSDGSAINYAPSIKDRFTIFRDNDKNILYLQMTNVRSEDTGTYFCVTTYGDYWGQGTTLTVSSAS

SEQ ID NO: 926 - protein, 116 aa, synthetic construct
EVQLLETGGGLVQPGGSRGLSCEGSGFTFSGFWMSWVRQTPGKTLEWIGDINSDGSAVNYAPSIKDRFTIFRDNDKNILYLQMTNVRSEDTGTYFCVTTYGDYWGQGTTLTVSSAS

SEQ ID NO: 927 - protein, 121 aa, synthetic construct
QLQLQESGPGLVKPSETLSLTCTVSGGSISSNSYFWGWIRQPPGKGLEWIGSIYYSGSTYYNPTLKSRVTISVDTSKNQFSLKLSSVTAADTAVYYCARHDGAVAGLFDYWGQGTLVTVSS

SEQ ID NO: 928 - protein, 121 aa, synthetic construct
QLQLQESGPGLVKPSETLSLTCTVSGGSISSNSYYWGWIRQPPGKGLEWIGSIYYSGSTYYNPTLKSRVTISVDTSKNQFSLKLSSVTAADTAVYYCARHDGAVAGLFDYWGQGTLVTVSS

SEQ ID NO: 929 - protein, 133 aa, synthetic construct
QVQLQQSGPGLVKPSQTLSLTCAISGDSVSSNRAAWNWIRQSPSRGLQWLGRTYYRSKWYNDYAVSLRSRITINPVTSKNQVALHMNSVTPEDTAVYYCARAGIVVVPGPETFYYYDHGLDVWGQGTTVTVSS

SEQ ID NO: 930 - protein, 133 aa, synthetic construct
QVQLQQSGPGLVKPSQTLSLTCAISGDSVSSNSAAWNWIRQSPSRGLEWLGRTYYRSKWYNDYAVSLRSRITINPVTSKNQVALHMNSVTPEDTAVYYCARAGIVVVPGPETFYYYDHGLDVWGQGTTVTVSS

SEQ ID NO: 931 - protein, 133 aa, synthetic construct
QVQLQQSGPGLVKPSQTLSLTCAISGDSVSSNSAAWNWIRQSPSRGLEWLGRTYYKSKWYNDYAVSLRSRITINPVTSKNQVALHMNSVTPEDTAVYYCARAGIVVVPGPETFYYYDHGLDVWGQGTTVTVSS

SEQ ID NO: 932 - protein, 133 aa, synthetic construct
QVQLQQSGPGLVKPSQTLSLTCAISGDSVSSNSAAWNWIRQSPSRGLEWLGRTYYKSKWYNDYAVSLRSRITINPVTSKNQVALHMNSVTPEDTAVYYCARAGIVVVPGPETFYYYYHGLDVWGQGTTVTVSS

SEQ ID NO: 933 - protein, 133 aa, synthetic construct
QVQLQQSGPGLVKPSQTLSLTCAISGDSVSSNSAAWNWIRQSPSRGLEWLGRTYYKSKWYNDYAVSLRSRITINPVTSKNQVALHMNSVTPEDTAVYYCARAGIVVVPGPDTFYYYDHGLDVWGQGTTVTVSS

SEQ ID NO: 934 - protein, 133 aa, synthetic construct
QVQLQQSGPGLVKPSQTLSLTCAISGDSVSSNSAAWNWIRQSPSRGLEWLGRTYYKSKWYNDYAVSLRSRITINPVTSKNQVALHMNSVTPEDTAVYYCARAGIVVVPGPDTYYYYDHGLDVWGQGTTVTVSS

SEQ ID NO: 935 - protein, 133 aa, synthetic construct
QVQLQQSGPGLVKPSQTLSLTCAISGDSVSSNSAAWNWIRQSPSRGLEWLGRTYYKSKWYNDYAVSLRSRITINPVTSKNQVALHMNSVTPEDTAVYYCARAGIVVVPGPDTYYYYYHGMDVWGQGTTVTVSS

SEQ ID NO: 936 - protein, 133 aa, synthetic construct
QVQLQQSGPGLVKPSQTLSLTCAISGDSVSSNSAAWNWIRQSPSRGLEWLGRTYYKSKWYNDYAVSVKSRITINPVTSKNQVALHMNSVTPEDTAVYYCARAGIVVVPGPETFYYYYHGLDVWGQGTTVTVSS

SEQ ID NO: 937 - protein, 117 aa, synthetic construct [sequence omitted]

SEQ ID NO: 938 - protein, 117 aa, synthetic construct
EVQLVESGGGLVQPGGSLRLSCAASGFTFSSYWIEWVRQAPGKGLEWIGEILPGGGDTNYNEIFKGRATFSADTSKNTAYLQMNSLRAEDTAVYYCTRRVPIRLDYWGQGTLVTVSS

SEQ ID NO: 939 - protein, 117 aa, synthetic construct; identical to SEQ ID NO: 900

SEQ ID NO: 940 - protein, 117 aa, synthetic construct
EVQLVESGGGLVQPGGSLRLSCAASGYTFSSYWIEWVRQAPGKGLEWIGEILPGGGDTNYNEIFKGRATFSADTSKNTAYLQMNSLRAEDTAVYYCTRRVPVYFDYWGQGTLVTVSS

SEQ ID NO: 941 - protein, 117 aa, synthetic construct
EVQLVESGGGLVQPGGSLRLSCAASGFTFTSYWIEWVRQAPGKGLEWIGEILPGGGDTNYNEIFKGRATFSADTSKNTAYLQMNSLRAEDTAVYYCTRRVPIRLDYWGQGTLVTVSS

SEQ ID NO: 942 - protein, 117 aa, synthetic construct
EVQLQQSGPELVKPGASVKISCKASGYSFTGYTMNWVKQSHGKNLEWIGLINPYNGGINYNQKFKAKATLTVDKSSSTAYMQLKSLTSEDSAVYYCARDYGYVLDYWGQGTSVTVSS

SEQ ID NO: 943 - protein, 117 aa, synthetic construct
EVQLQQSGPELVKPGASVKISCKASGYSFTGYTMNWVKQSHGKNLEWIGLINPYNGGSSYNQKFKAKATLTVDKSSSTAYMQLKSLTSEDSAVYYCARDYGYVLDYWGQGTSVTVSS

SEQ ID NO: 944 - protein, 117 aa, synthetic construct
EVQLQQSGPELVKPGASVKISCKASGYSFTGYTMNWVKQSHGKNLEWIGLINPYNGGTSYNQKFKAKATLTVDKSSSTAYMQLKSLTSEDSAVYYCARDYGFVLDYWGQGTSVTVSS

SEQ ID NO: 945 - protein, 117 aa, synthetic construct; identical to SEQ ID NO: 944

SEQ ID NO: 946 - protein, 117 aa, synthetic construct
EVQLQQSGPELVKPGASVKISCKASGYSFTGYTMNWVKQSHGKNLEWIGLINPYNGGISYNQKFKAKATLTVDKSSSTAYMQLKSLTSEDSAVYYCARDYGFVLDYWGQGTSVTVSS

SEQ ID NO: 947 - protein, 117 aa, synthetic construct
EVQLQQSGPELVKPGASVKISCKASGYSFTGYTMNWVKQSHGKNLEWIGLINPYNGGTSYNQKFKAKATLTVDKSSSTAYMQLKSLTSEDSAVYYCARDFGYVLDYWGQGTSVTVSS

SEQ ID NO: 948 - protein, 117 aa, synthetic construct
EVQLQQSGPELVKPGASVKISCKASGYSFTGYTMNWVKQSHGKNLEWIGLINPYNGGSSYNQKFKAKATLTVDKSSSTAYMQLKSLTSEDSAVYYCARDYGFVFDYWGQGTSVTVSS

SEQ ID NO: 949 - protein, 117 aa, synthetic construct
EVQLQQSGPELVKPGASVKISCKASGYSFTGYTMNWVKQSHGKNLEWIGLINPYNGGSSYNQKFKAKATLTVDKSSSTAYMQLKSLTSEDSAVYYCARDYGFVLDYWGQGTSVTVSS

SEQ ID NO: 950 - protein, 117 aa, synthetic construct
EVQLQQSGPELVKPGASVKISCKASGYSFTGYTMNWVKQSHGKNLEWIGLINPYNGGISYNQKFKAKATLTVDKSSSTAYMQLKSLTSEDSAVYYCARDYGYVFDYWGQGTSVTVSS

SEQ ID NO: 951 - protein, 125 aa, synthetic construct
QVQLQQSGPGLVKPSQTLSLTCAISGDSVSRNSAVWNWIRQSPSRGLEWLGRTYYRSEWYNDYAVSVKSRITINPDTSKNQFSLQVNSVTPEDTAVYYCARGLLQNNFYYYMDVWGKGTTVTVSS

SEQ ID NO: 952 - protein, 125 aa, synthetic construct
QVQLQQSGPGLVKPSQTLSLTCAISGDSVSRNSAVWNWIRQSPSRGLEWLGRTYYRSKWYNDYAVSVKSRITINPDTSKNQFSLQVNSVTPEDTAVYYCARGLLQNNFYYYMDVWGKGTTVTVSS

SEQ ID NO: 953 - protein, 112 aa, synthetic construct
QSVEESGGRLVTPGTPLTLTCTVSGIDLSSYAMTWVRQAPGEGLEWIGTINTISTAYYANWAKGRFTISKTSTTVDLKIASPTTEDTATYFCARDHGYYDVWGQGTLVTVSS

SEQ ID NO: 954 - protein, 112 aa, synthetic construct
QSVEESGGRLVTPGTPLTLTCTVSGIDLSAYAMTWVRQAPGEGLEWIGTINTISTAYYANWAKGRFTISKTSTTVDLKIASPTTEDTATYFCARDHGYYDVWGQGTLVTVSS

SEQ ID NO: 955 - protein, 112 aa, synthetic construct
QSVEESGGRLVTPGTPLTLTCTVSGIDLSSYAMTWVRQAPGEGLEWIGTINTISTAYYANWAKGRFTISKTSTTVDLKIASPTTEDTATYFCARDHGYYDLWGQGTLVTVSS

SEQ ID NO: 956 - protein, 112 aa, synthetic construct
QSVEESGGRLVTPGTPLTLTCTVSGIDLSAYAMTWVRQAPGEGLEWIGTINTISTAYYANWAKGRFTISKTSTTVDLKIASPTTEDTATYFCARDHGYYDLWGQGTLVTVSS

SEQ ID NO: 957 - protein, 112 aa, synthetic construct
QSVEESGGRLVTPGTPLTLTCTVSGIDLSSYAMTWVRQAPGEGLEWIGTINTISTAYYANWAKGRFTISKTSTTVDLKIASPTTEDTATYFCAREHGYYDVWGQGTLVTVSS

SEQ ID NO: 958 - protein, 119 aa, synthetic construct
EVQLQQSVAELVRPGASVKLSCTASGFNIKNIFVHWVKQRPEQGLEWIGKIDPANDNTKFAPNFQGKAAISADTSSNTAYLQLSSLTSEDTAIYYCASDSSGYDAVDYWGQGTSVTVSS

SEQ ID NO: 959 - protein, 119 aa, synthetic construct
EVQLQQSVAELVRPGASVKLSCTASGFNIKNIFVHWVKQRPEQGLEWIGKIDPANGNTKFAPNFQGKAAISADTSSNTAYLQLSSLTSEDTAIYYCASDSSGYDAVDYWGQGTSVTVSS

SEQ ID NO: 960 - protein, 119 aa, synthetic construct
EVQLQQSVAELVRPGASVKLSCTASGFNIKNIFVHWVKQRPEQGLEWIGKIDPANGNIKFAPNFQGKAAISADTSSNTAYLQLSSLTSEDTAIYYCASDSSGYDAVDYWGQGTSVTVSS

SEQ ID NO: 961 - protein, 119 aa, synthetic construct
EVQLQQSVAELVRPGASVKLSCTASGFNIKNIFVHWVKQRPEQGLEWIGKIDPANDNIKFAPNFQGKAAISADTSSNTAYLQLSSLTSEDTAIYYCASDSSGYDAVDYWGQGTSVTVSS

SEQ ID NO: 962 - protein, 117 aa, synthetic construct
EVQLLESGGGLVQPGGSLRLSCAASGFTFSSYAMSWVRQAPGKGLEWVSAISGSGGSTYYADSVKGRFTISRDNSKNTLYLQMNSLRAEDTAVYYCAKWRNNAFDYWGQGTLVTVSS

SEQ ID NO: 963 - protein, 117 aa, synthetic construct
EVQLLESGGGLVQPGGSLRLSCAASGFTFSSYAMSWVRQAPGKGLEWVSAIKGSGGSTYYADSVKGRFTISRDNSKNTLYLQMNSLRAEDTAVYYCAKWRNNAFDYWGQGTLVTVSS

SEQ ID NO: 964 - protein, 117 aa, synthetic construct
EVQLLESGGGLVQPGGSLRLSCAASGFTFSSYAMSWVRQAPGKGLEWVSAISGDGGSTYYADSVKGRFTISRDNSKNTLYLQMNSLRAEDTAVYYCAKWRNNAFDYWGQGTLVTVSS

SEQ ID NO: 965 - protein, 117 aa, synthetic construct
EVQLLESGGGLVQPGGSLRLSCAASGFTFSSYAMSWVRQAPGKGLEWVSAISGSGGNTYYADSVKGRFTISRDNSKNTLYLQMNSLRAEDTAVYYCAKWRNNAFDYWGQGTLVTVSS

SEQ ID NO: 966 - protein, 116 aa, synthetic construct
EVQLVESGGGLVQPGGSLKLSCAASGFTFSNYGMSWVRQTPDRRLELVATINNNGGGTYYPDSVKGRFTISRDNAKNTLYLQMSSLKSEDTAMYYCTSPGLLWDAWGAGTTVTVSS

SEQ ID NO: 967 - protein, 116 aa, synthetic construct
EVQLVESGGGLVQPGGSLKLSCAASGFTFSSYGMSWVRQTPDRRLELVATINNNGGGTYYPDSVKGRFTISRDNAKNTLYLQMSSLKSEDTAMYYCTSPGLLWDAWGAGTTVTVSS

SEQ ID NO: 968 - protein, 116 aa, synthetic construct
EVQLVESGGGLVQPGGSLKLSCAASGFTFSRYGMSWVRQTPDRRLELVATINNNGGGTYYPDSVKGRFTISRDNAKNTLYLQMSSLKSEDTAMYYCTSPGLLWDAWGAGTTVTVSS

SEQ ID NO: 969 - protein, 116 aa, synthetic construct
EVQLVESGGGLVQPGGSLKLSCAASGFTFSSYGMSWVRQTPDRRLELVATINSNGGGTYYPDSVKGRFTISRDNAKNTLYLQMSSLKSEDTAMYYCTSPGLLWDAWGAGTTVTVSS

SEQ ID NO: 970 - protein, 116 aa, synthetic construct
EVQLVESGGGLVQPGGSLKLSCAASGFTFSNYGMSWVRQTPDRRLELVATINSNGGGTYYPDSVKGRFTISRDNAKNTLYLQMSSLKSEDTAMYYCTSPGLLWDAWGAGTTVTVSS

SEQ ID NO: 971 - protein, 246 aa, synthetic construct
QSVLTQPPSVSVSPGQTASITCSGDKLGDKFACWYQQKPGQSPVLVIYQDSKRPSGIPERFSGSNSGNTATLTISGTQAMDEADYYCQAWDSDGKATVVFGTGTKVEIKGGGGSGGGGSGGGGSEVQLLESGGGLVQPGGSLRLSCAASGFTFSSYAMSWVRQAPGKGLEWVSAISGSGGSTYYADSVKGRFTISRDNSKNTLYLQMNSLRAEDTAVYYCAKEQWEGDYFSAFDIWGQGTMVTVSS

SEQ ID NO: 972 - protein, 246 aa, synthetic construct
QSVLTQPPSVSVSPGQTASITCSGDKLGDKYACWYQQKPGQSPVLVIYQDSKRPSGIPERFSGSNSGNTATLTISGTQAMDEADYYCQAWDSDGKATVVFGTGTKVEIKGGGGSGGGGSGGGGSEVQLLESGGGLVQPGGSLRLSCAASGFTFSSYAMSWVRQAPGKGLEWVSAISGSGGSTYYADSVKGRFTISRDNSKNTLYLQMNSLRAEDTAVYYCAKEQWEGDYFSAFDIWGQGTMVTVSS

SEQ ID NO: 973 - protein, 246 aa, synthetic construct
QSVLTQPPSVSVSPGQTASITCSGDKLGDKYACWYQQKPGQSPVLVIYQDTKRPSGIPERFSGSNSGNTATLTISGTQAMDEADYYCQAWDSDGKATVVFGTGTKVEIKGGGGSGGGGSGGGGSEVQLLESGGGLVQPGGSLRLSCAASGFTFSSYAMSWVRQAPGKGLEWVSAISGSGGSTYYADSVKGRFTISRDNSKNTLYLQMNSLRAEDTAVYYCAKEQWEGDYFSAFDIWGQGTMVTVSS

SEQ ID NO: 974 - protein, 248 aa, synthetic construct
QSVLTQPPSVSVSPGQTASITCSGDKLGNKYACWYQQKPGQSPVLVIYQDSKRPSGIPERFSGSNSGNTATLTISGTQAMDEADYYCQAWDSDGKATVVFGTGTKVEIKGGGGSGGGGSGGGGSEVQLLESGGGLVQPGGSLRLSCAASGFTFSSYAMSWVRQAPGKGLEWVSAISGSGGSTYYADSVKGRFTISRDNSKNTLYLQMNSLRAEDTAVYYCAKEQWEGDYFSAFDIWGQGTMVTVSSTR

SEQ ID NO: 975 - protein, 253 aa, synthetic construct
NFMLTQPHSVSESPGKTVTISCTRSSGSIASNYVQWYQQRPGSAPTTVIYEDNQRPSGVPDRFSGSIDSSSNSASLTISGLKTEDEADYYCQSYDLAADVRVVFGTGTKVTVSSGGGGSGGGGSGGGGSEVQLLESGGGLVQPGGSLRLSCAASGFTFSSYAMSWVRQAPGKGLEWVSAISGSGGSTYYADSVKGRFTISRDNSKNTLYLQMNSLRAEDTAVYYCAKGGENTFESHPVAFDIWGQGTMVTVSS

SEQ ID NO: 976 - protein, 253 aa, synthetic construct
NFMLTQPHSVSESPGKTVTISCTRRSGSIASNYVQWYQQRPGSAPTTVIYEDNQRPSGVPDRFSGSIDSSSNSASLTISGLKTEDEADYYCQSYDLAADVRVVFGTGTKVTVSSGGGGSGGGGSGGGGSEVQLLESGGGLVQPGGSLRLSCAASGFTFSSYAMSWVRQAPGKGLEWVSAISGSGGSTYYADSVKGRFTISRDNSKNTLYLQMNSLRAEDTAVYYCAKGGENTFESHPVAFDIWGQGTMVTVSS

SEQ ID NO: 977 - protein, 253 aa, synthetic construct
NFMLTQPHSVSESPGKTVTISCTRNSGSIASNYVQWYQQRPGSAPTTVIYEDNQRPSGVPDRFSGSIDSSSNSASLTISGLKTEDEADYYCQSYDLAADVRVVFGTGTKVTVSSGGGGSGGGGSGGGGSEVQLLESGGGLVQPGGSLRLSCAASGFTFSSYAMSWVRQAPGKGLEWVSAISGSGGSTYYADSVKGRFTISRDNSKNTLYLQMNSLRAEDTAVYYCAKGGENTFESHPVAFDIWGQGTMVTVSS

SEQ ID NO: 978 - protein, 253 aa, synthetic construct
NFMLTQPHSVSESPGKTVTISCTRSSGSIANNYVQWYQQRPGSAPTTVIYEDNQRPSGVPDRFSGSIDSSSNSASLTISGLKTEDEADYYCQSYDLAADVRVVFGTGTKVTVSSGGGGSGGGGSGGGGSEVQLLESGGGLVQPGGSLRLSCAASGFTFSSYAMSWVRQAPGKGLEWVSAISGSGGSTYYADSVKGRFTISRDNSKNTLYLQMNSLRAEDTAVYYCAKGGENTFESHPVAFDIWGQGTMVTVSS

SEQ ID NO: 979 - protein, 239 aa, synthetic construct
DIVMTQTPATLSVSAGERVTITCKASQSVSNDVTWYQQKPGQAPRLLIYSASNRYSGVPARFSGSGYGTEFTFTISSVQSEDFAVYFCQQDYSSFGQGTKLEIKRGGGGSGGGGSGGGGSQVQLVESGPGVVQPGRSLRISCAVSGFSVTNYGVHWVRQPPGKGLEWLGVIWAGGITNYNSAFMSRLTISKDNSKNTVYLQMNSLRAEDTAMYYCASRGGHYGYALDYWGQGTLVTVSS

SEQ ID NO: 980 - protein, 239 aa, synthetic construct
DIQMTQSPSSLSASVGDRVTITCKASQSVSNDVTWYQQKPGQAPKLLIYSASNRYSGVPARFSGSGYGTEFTFTISSVQSEDFAVYFCQQDYSSFGQGTKLEIKRGGGGSGGGGSGGGGSQVQLVESGPGVVQPGRSLRISCAVSGFSVTNYGVHWVRQPPGKGLEWLGVIWAGGITNYNSAFMSRLTISKDNSKNTVYLQMNSLRAEDTAMYYCASRGGHYGYALDYWGQGTLVTVSS

SEQ ID NO: 981 - protein, 242 aa, synthetic construct
DIQMTQSPSSLSASVGDRVTITCRASSSVSSSYLHWYQQKPGKAPKVWIYSTSNLASGVPSRFSGSGSGTDFTLTISSLQPEDFATYYCQQYSGYPITFGQGTKVEIKRGGGGSGGGGSGGGGSQVQLQESGPGLVKPSQTLSITCTVSGFSLASYNIHWVRQPPGKGLEWLGVIWAGGSTNYNSALMSRLTISKDNSKNQVFLKMSSLTAADTAVYYCAKRSDDYSWFAYWGQGTLVTVSS

SEQ ID NO: 982 - protein, 243 aa, synthetic construct
ENVLTQSPAIMSASPGEKVTMTCRASSSVSSSYLHWYQQKSGASPKVWIYSTSNLASGVPGRFSGSGSGTSYSLTISSVEAEDAATYYCQQYSGYPITFGAGTKVEVKRGGGGSGGGGSGGGGSQVQLKESGPVLVAPSQTLSITCTVSGFSLASYNIHWVRQPPGKGLEWLGVIWAGGSTNYNSALMSRLSISKDNSKSQVFLQMNSLQTDDTAMYYCAKRSDDYSWFAYWGQGTLVTVSAS

SEQ ID NO: 983 - protein, 246 aa, synthetic construct
DIVMTQSPDSLAVSLGERATINCKSSQSLLNSGNQKNYLAWYQQKPGQPPKLLIYWGSTRSTGVPDRFSGSGSGTDFTLTISSLQAEDVAVYYCQNDYTYPFTFGQGTKLEIKGGGGSGGGGSGGGGSQVQLVQSGAEVKKPGASVKVSCKASGYTFTSFWLNWVRQAPGQGLEWMGNIYPSTSYTVYNQKFKDRVTMTRDTSTSTVYMELSSLRSEDTAVYYCARTWRGNSFDYWGQGTTVTVSS

SEQ ID NO: 984 - protein, 246 aa, synthetic construct
DIVMTQSPDSLAVSLGERATINCKSSQSLLNSGNNKNYVTWYQQKPGQPPKLLIYWGSTRSTGVPDRFSGSGSGTDFTLTISSLQAEDVAVYYCQNDYTYPFTFGQGTKLEIKGGGGSGGGGSGGGGSQVQLVQSGAEVKKPGASVKVSCKASGYTFTSFWLNWVRQAPGQGLEWMGNIYPSDSYTVYNQKFKDRVTMTRDTSTSTVYMELSSLRSEDTAVYYCARTWRGNSFDYWGQGTTVTVSS

SEQ ID NO: 985 - protein, 244 aa, synthetic construct
DIQMTQSPSSLSASVGDRVTITCKASDHINNWLAWYQQKPGQAPKLLIYGATTLETGVPSRFSGSGSGTDYTLTISSLQPEDFATYYCQQSWNTPWTFGQGTKLEIKRGGGGSGGGGSGGGGSQVQLQQPGAELVKPGASVKMSCKASGYTFSSYWINWMKQKPGQGLEWIGQIYPGDGDTNYNGKFKGRATLTADTSSSTAYMQLSSLTSEDSAVYFCARSITTVVGCAMDYWGQGTSVTVSS

SEQ ID NO: 986 - protein, 244 aa, synthetic construct
DIQMTQSPSSLSASVGDRVTITCKASDHINNWLAWYQQKPGQAPKLLIYGATTLETGVPSRFSGSGSGTDYTLTISSLQPEDFATYYCQQSWNTPWTFGQGTKLEIKRGGGGSGGGGSGGGGSQVQLQQPGAELVKPGASVKMSCKASGYAFSSSWINWMKQKPGQGLEWIGQIYPGDGDTNYNGKFKGRATLTADTSSSTAYMQLSSLTSEDSAVYFCARSITTVVGCAMDYWGQGTSVTVSS

SEQ ID NO: 987 - protein, 244 aa, synthetic construct
DIQMTQSPSSLSASVGDRVTITCKASDHINNWLAWYQQKPGKAPKLLIYGATTLETGVPSRFSGSGSGTDFTLTISSLQPEDFATYYCQQSWNTPWTFGQGTKVEIKRGGGGSGGGGSGGGGSEVQLVESGGGLVQPGGSLRLSCAASGYTFSSYWVNWVRQAPGKGLEWVAQIYPGDGDTNYNGKFKGRFTISRDNSKNTLYLQMNSLRAEDTAVYYCARSITTVVGCAMDYWGQGTLVTVSS

SEQ ID NO: 988 - protein, 244 aa, synthetic construct; identical to SEQ ID NO: 987

SEQ ID NO: 989 - protein, 238 aa, synthetic construct
QIVLTQSPAIMSASPGEKVTMTCSASSSVSFMHWYQQKSGTSPKRWIYDTSTLASGVPARFGGSGSGTSYSLTISSMEAEDAATYYCQQWSSNPLTFGAGTKLELKRGGGGSGGGGSGGGGSQVQLQQSGPELVKPGASVRISCKASGYTFTSYYIHWVKQRPGQGLEWIGWIYPGNLNTKYNEKFKGKATLTADKSSSTAYMQLSSLTSEDSAVYFCARYDWYFDVWGAGTTVTVSS

SEQ ID NO: 990 - protein, 243 aa, synthetic construct
DIVMTQSPLSLPVTPGEPASISCRSSKSLLHSNGITYLYWYLQKPGQSPQLLIYRMSNRASGVPDRFSGSGSGTDFTLKISRVEAEDVGVYHCGQLLENPYTFGQGTKLEIKGGGGSGGGGSGGGGSQVQLVESGGGVVQPGRSLRLSCAASGFSFSNYGMAWVRQAPGKGLEWVASISTGGGNTYYADSVKDRFTISRDNSKNTLYLQMNSLRAEDTAVYYCTRHDRGGLYWGQGTMVTVSS

SEQ ID NO: 991 - protein, 243 aa, synthetic construct
EIVLTQSPGTLSLSPGERATLSCKASQSVSISGINLMNWYQQKPGQQPRLLIYHASILASGIPDRFSGSGSGTDFTLTISRLEPEDFAVYYCQQTRESPLTFGQGTRLEIKGGGGSGGGGSGGGGSELQLLESGGGLVQPGGSLRLSCAASGFTFSKYAMAWVRQAPGKGLEWVASISTGGVNTYYADSVKDRFTISRDNAKNTLYLQMNSLRAEDTAVYYCATHTGDYFDYWGQGTMVTVSS

SEQ ID NO: 992 - protein, 244 aa, synthetic construct
DIVMTQSPLSLPVTPGEPASISCRSSKSLLHSNGITYLYWYLQKPGQSPQLLIYRMSNRASGVPDRFSGSGSGTDFTLKISRVEAEDVGVYHCGQLLENPYTFGQGTKLEIKGGGGSGGGGSGGGGSELQLLESGGGLVQPGGSLRLSCAASGFTFSKYAMAWVRQAPGKGLEWVASISTGGVNTYYADSVKDRFTISRDNAKNTLYLQMNSLRAEDTAVYYCATHTGDYFDYWGQGTMVTVSS

SEQ ID NO: 993 - protein, 116 aa, synthetic construct; identical to SEQ ID NO: 867

SEQ ID NO: 994 - protein, 247 aa, synthetic construct
EIVLTQSPATLSLSPGERATLSCRASQSVSSYLAWYQQKPGQAPRLLIYDASNRATGIPARFSGSGSGTDFTLTISSLEPEDFAVYYCQQRSNWPPTFGQGTKVEIKGGGGSGGGGSGGGGSQLQLQESGPGLVKPSETLSLTCTVSGGSISSSSYWWGWTRQPPGRGLEWIGTMYYSGNIYYNPSLQSRATISVDTSKNQFSLKLSSVTAADTAVYYCARHVGYSYGRRFWYFDLWGRGTLVTVSS

SEQ ID NO: 995 - protein, 243 aa, synthetic construct
DIQMTQSPSSLSASVGDRVTITCRASQDVRNIVVWFQQKPGKAPKLLIYSGSYRYSGVPSRFSGSGSGTDFTLTISSLQPEDFATYYCQQHYSPPYTFGQGTKVEIKRGGGGSGGGGSGGGGSEVQLVESGPGLVKPSETLSLTCTVSGFSLTRFGVHWVRQPPGKGLEWLGVIWRGGSTDYNAAFMSRLTISKDNSKNQVSLKLSSVTAADTAVYYCSNHYYGSSDYALDNWGQGTLVTVSS

SEQ ID NO: 996 - protein, 245 aa, synthetic construct
DIVLTQSPLSLAVSLGQPAIISCRASQSVSFAGTSLMHWYHQKPGQQPRLLIYRASNLEAGVPDRFSGSGSKTDFTLTISPVEAEDAATYYCQQSREYPYTFGGGTKLEIKRGGGGSGGGGSGGGGSQVQLVQSGAEVVKPGASVKISCKASGYTFTGYFMHWVKQSPGQSLEWIGRIHPYDGDTFYNQKFQGKATLTVDKSSNTAHMELLSLTSEDFAVYYCTRYDGSRAMDYWGQGTTVTVSS

SEQ ID NO: 997 - protein, 245 aa, synthetic construct
DIQMTQSPSSLSASVGDRVTITCRASQDVNTAVAWYQQKPGKAPKLLIYSAYFLYSGVPSRFSGSRSGTDFTLTISSLQPEDFATYYCQQYSRYSPVTFGQGTKVEIKRSGGGGSGGGGSGGGGEVQLVESGGGLVQPGGSLRLSCAASGFNVYASGMHWVRQAPGKGLEWVAKIYPDSDYTYYADSVKGRFTISADTSKNTAYLQMNSLRAEDTAVYYCSRDSSFYYVYAMDYWGQGTLVTVSS

SEQ ID NO: 998 - protein, 245 aa, synthetic construct
DIQMTQSPSSLSASVGDRVTITCRASQDINTAVAWYQQKPGKAPKLLIYSAYFLYSGVPSRFSGSRSGTDFTLTISSLQPEDFATYYCQQYSRYSPVTFGQGTKVEIKRSGGGGSGGGGSGGGGEVQLVESGGGLVQPGGSLRLSCAASGFNVYASGMHWVRQAPGKGLEWVAKIYPDSDYTYYADSVKGRFTISADTSKNTAYLQMNSLRAEDTAVYYCSRDSSFYYVYAMDYWGQGTLVTVSS

SEQ ID NO: 999 - protein, 240 aa, synthetic construct
DIQMTQSPSSLSASVGDRVTITCRASQDVSTAVAWYQQKPGKAPKLLIYSASFLYSGVPSRFSGSRSGTDFTLTISSLQPEDFATYYCQQYLYQPWTFGQGTKVEIKRGGGGSGGGGSGGGGSEVQLVESGGGLVQPGGSLRLSCAASGFNIDYYGMHWVRQAPGKGLEWVASLYGGSDSTDYADSVKGRFTISADTSKNTAYLQMNSLRAEDTAVYYCSRQYSAYFDYWGQGTLVTVSS

SEQ ID NO: 1000 - protein, 239 aa, synthetic construct
DIQMTQSPSSLSASVGDRVTITCKASDLIHNWLAWYQQKPGKAPKLLIYGATSLETGVPSRFSGSGSGTDFTLTISSLQPEDFATYYCQQYWTTPFTFGQGTKVEIKRGGGGSGGGGSGGGGSEVQLVESGGGLVQPGGSLRLSCAASGYSITNDYAWNWVRQAPGKGLEWVGYISYSGYTTYNPSIKSRFTISRDTSKNTLYLQMNSLRAEDTAVYYCARWTSGLDYWGQGTLVTVSS

SEQ ID NO: 1001 - protein, 242 aa, synthetic construct
EIVLTQSPATLSLSPGERATLSCRASQSVSSYLAWYQQKPGQAPRLLIYDASNRATGIPARFSGSGSGTDFTLTISSLEPEDFAVYYCQQRSNWPLTFGQGTKVEIKGGGGSGGGGSGGGGSQVQLVQSGAEVKKPGSSVKVSCKASGGTFSTYAIHWVRQAPGQGLEWMGRIIPIEGRAYYAQKFQGRVTITADESTSTAYMELSSLRSEDTAVYYCARGRYSYRYWFDYWGQGTLVTVSS

SEQ ID NO: 1002 - protein, 242 aa, synthetic construct
EIVLTQSPATLSLSPGERATLSCRASQSVSSYLAWYQQKPGQAPRLLIYDASNRATGIPARFSGSGSGTDFTLTISSLEPEDFAVYYCQQRSDWPLTFGGGTKVEIKGGGGSGGGGSGGGGSQVQLVQSGAEVKKPGSSVKVSCKASGGTFSSYAIHWVRQAPGQGLEWMGRIIPIEGRAYYAQKFQGRVTITADESTSTAYMELSSLRSEDTAVYYCARGRYSYRYWFDYWGQGTLVTVSS

SEQ ID NO: 1003 - protein, 241 aa, synthetic construct
DIVMTQSPATLSVSPGERATLSCRASQSVSNDVVWYQQKPGQAPRLLIYYASNRYTGIPARFSGSGSGTEFTLTISSLQSEDFAVYYCQQDYTSPWTFGQGTKLEIKRGGGGSGGGGSGGGGSEVQLVQSGAEVKKPGASVRVSCKASGYTFTNYGMNWVRQAPGQGLEWMGWINTYTGEPTYADDFKGRVTMTTDTSTSTAYMELRSLRSDDTAVYYCARIGDSSPSDYWGQGTLVTVSS

SEQ ID NO: 1004 - protein, 244 aa, synthetic construct
DIQMTQSPSSLSASVGDRVTITCRASQSISSYLNWYQQKPGKAPKLLIYAASSLQSGVPSRFSGSGSGTDFTLTISSLQPEDFATYYCQQSYSTPLTFGQGTKVEIKGGGGSGGGGSGGGGSEVQLVESGGGLVQPGGSLRLSCAASGFTFSSYAMSWVRQAPGKGLEWVSAISGSGGSTYYADSVKGRFTISRDNSKNTLYLQMNSLRAEDTAVYYCARLGYPTTTLLPFDYWGQGTLVTVSS

SEQ ID NO: 1005 - protein, 249 aa, synthetic construct
DIQMTQSPSSLSASVGDRVTITCQASENIYSFLAWYQQKPGKAPKLLIYSASKLAAGVPSRFSGSGSGTDFTLTISSLQPEDFATYYCQQTNRYSNPDIYNVFGQGTKLTVLGGGGGSGGGGSGGGGSEVQLVESGGGLVQPGGSLRLSCAASGIDFNSNYYMCWVRQAPGKGLEWIGCIYVGSHVNTYYANWAKGRFTISRDNSKNTVYLQMNSLRAEDTAVYYCATSGSSVLYFKFWGQGTLVTVSS

SEQ ID NO: 1006 - protein, 247 aa, synthetic construct
QVQLVQSGPEVKKPGASVKVSCKASGYTFTSYHIQWVRQAPGQGLEWIGWIYPGDGSTQYNEKFKGRVTITADKSTSTAYMELSSLTSEDTAVYYCAREGTYYAMDYWGQGTSVTVSSGGGGGSGGGGSGGGGSDIVMTQSPATLSVSPGERATISCRSSQSIVHSNGNTYLEWYQQKPGQAPRLLIYKVSNRFSGIPDRFSGSGSGTDFTLTISRLEPEDFAVYYCFQGSHVPRTFGGGTKLEIKR

SEQ ID NO: 1007 - protein, 254 aa, synthetic construct
QSALTQPASVSGSPGQSITISCTGTSSDVGGYNYVSWYQQHPGKAPKLMIYDVSNRPSGVSNRFSGSKSGNTASLTISGLQAEDEADYFCSSYTSSSTPVVFGGGTKLTVLGGGGGSGGGGSGGGGSQVQLQQSGAGLLKPSETLSLTCAVSGGSFSGYYWTWIRQRPGKGLEWIGEINHRGSTDYNPSLKSRVTMSIDTSKSQFSLNLKSVTAADTAVYYCARAAWGSCYDGTCYPAEYFQYWGQGTLVTVSS

SEQ ID NO: 1008 - protein, 247 aa, synthetic construct
EIVMTQSPGTLSLSPGERATLSCRASQSVSSSYLAWYQQKPGQAPRLLIYGASSRATGIPDRFSGSGSGTDFTLTISRLEPEDFAVYYCQQYGSSPLTFGGGTKVEIKGGGGGSGGGGSGGGGSQVQLVQSGAEVKKPGASVKVSCKASGYSFTSYGINWVRQAPGQGLEWMGWISAYNGNTNYAQKLQGRVTMTRDTSTRTAYMELRSLRSDDTAVYYCAREYDILTGYSDAFDIWGQGTLVTVSS

SEQ ID NO: 1009 - protein, 243 aa, synthetic construct
EIVLTQSPATLSLSPGERATLSCRASQSVSSYLAWYQQKPGQAPRLLIYGASSRATGIPARFSGSGSGTDFTLTISSLEPEDFAVYYCQQRSNWPPYTFGQGTKLEIKGGGGGSGGGGSGGGGSQVQLVESGGGLVKPGGSLRLSCAASGFTFSSYSMHWVRQAPGKGLEWVSDISTNSRTRNYADSVKGRFTISRDNAKNSVYLQMHSLRDEDTAVYYCARDYGGIYYFDYWGQGTLVTVSS

SEQ ID NO: 1010 - protein, 250 aa, synthetic construct
EIVLTQSPATLSLSPGERATLSCRASQSVSSYLAWYQQKPGQAPRLLIYGASSRATGIPARFSGSGSGTDFTLTISSLEPEDFAVYYCQQRSNWPPYTFGQGTKLEIKGGGGSGGGGSGGGGSQVQLQQSGAGLLKPSETLSLTCAVSGGSFSGYYWTWIRQRPGKGLEWIGEINHRGSTDYNPSLKSRVTMSIDTSKSQFSLNLKSVTAADTAVYYCARAAWGSCYDGTCYPAEYFQYWGQGTLVTVSS

SEQ ID NO: 1011 - protein, 246 aa, synthetic construct
EIVMTQSPGTLSLSPGERATLSCRASQSVSSSYLAWYQQKPGQAPRLLIYGASSRATGIPDRFSGSGSGTDFTLTISRLEPEDFAVYYCQQYGSSPLTFGGGTKVEIKGGGGSGGGGSGGGGSQVQLVQSGAEVKKPGASVKVSCKASGYSFTSYGINWVRQAPGQGLEWMGWISAYNGYTNYAQKLQGRVTMTRDTSTRTAYMELRSLRSDDTAVYYCAREYDILTGYSDAFDIWGQGTLVTVSS

SEQ ID NO: 1012 - protein, 238 aa, synthetic construct
DIQMTQSPSSLSASVGDRVTITCRASQSISSYLNWYQQKPGKAPKLLIYDASTLQSGVPSRFSGSGSGTDFTLTISSLQPEDFATYYCQQSDGNPTTFGQGTKVEIKGGGGSGGGGSGGGGSEVQLLESGGGLVQPGGSLRLSCAASGFTFSSYAMSWVRQAPGKGLEWVSSISTSGSYTAYADSVKGRFTISRDNSKNTLYLQMNSLRAEDTAVYYCAKGGYTFDYWGQGTLVTVSS

SEQ ID NO: 1013 - protein, 239 aa, synthetic construct
DIQMTQSPSSLSASVGDRVTITCLASEDIYDNLAWYQQKPGKAPKLLIYYASSLQDGVPSRFSGSGSGTDYTLTISSLQPEDFATYYCLQDSEYPWTFGGGGSGGGGSGGGGSEVTLKESGPALVKPTQTLTLTCTFSGFSLTTYGMGVGWIRQPPGKALEWLANIWWDDDKYYNPSLKNRLTISKDTSKNQVVLTMTNMDPVDTATYYCARIGPIKYPTAPYRYFDFWGQGTMVTVSS

SEQ ID NO: 1014 - protein, 239 aa, synthetic construct
DIQMTQSPSSLSASVGDRVTITCLASEDIYNNLAWYQQKPGKAPKLLIYYASSLQDGVPSRFSGSGSGTDYTLTISSLQPEDFATYYCLQDSEYPWTFGGGGSGGGGSGGGGSEVTLKESGPALVKPTQTLTLTCTFSGFSLSTYGMGVGWIRQPPGKALEWLANIWWDDDKYYNPSLKNRLTISKDTSKNQVVLTMTNMDPVDTATYYCARIGPIKYPTAPYRYFDFWGQGTMVTVSS

SEQ ID NO: 1015 - protein, 243 aa, synthetic construct
DIVMTQSPDSLAVSLGERATINCKSSQSLLYSSNSKNYLAWYQQKPGQPPKLLIYWASTRESGVPDRFSGSGSGTDFTLTISSLQAEDVAVYYCQQPYSYPLSFGAGTKLELKGGGGSGGGGSGGGGSQVQLVQSGAEVKKPGASVKVSCKASGYTFTDHAIHWVRQAPGQRLEWMGYFSPGNDDFKYSQKFQGRVTITADTSASTAYMELSSLRSEDTAVYFCTRSLNMAYWGQGTLVTVSS

SEQ ID NO: 1016 - protein, 244 aa, synthetic construct
DIVMSQSPDSLAVSLGERVTLNCKSSQSLLYSGNQKNYLAWYQQKPGQSPKLLIYWASARESGVPDRFSGSGSGTDFTLTISSVQAEDVAVYYCQQYYSYPLTFGAGTKLELKRGGGGSGGGGSGGGGSQVQLVQSGAEVVKPGASVKISCKASGYTFTDHAIHWVKQNPGQRLEWIGYFSPGNDDFKYNERFKGKATLTADTSASTAYVELSSLRSEDTAVYFCTRSLNMAYWGQGTLVTVSS

SEQ ID NO: 1017 - protein, 244 aa, synthetic construct
DIQLTQSPSSLSASVGDRVTITCKASQSVDYDGDSFLNWYQQKPGKAPKLLIYAASNLESGVPSRFSGSGSGTDFTLTISSLQPEDFATYYCQQSNEDPLTFGQGTKVEIKRGGGGSGGGGSGGGGSEVQLVESGGGLVQPGGSLRLSCAASGYTFSSYWIEWVRQAPGKGLEWIGEILPGGGDTNYNEIFKGRATFSADTSKNTAYLQMNSLRAEDTAVYYCTRRVPIRLDYWGQGTLVTVSS

SEQ ID NO: 1018 - protein, 244 aa, synthetic construct
DIQLTQSPSSLSASVGDRVTITCKASQSVDYDGDSFLNWYQQKPGKAPKLLIYAASNLESGVPSRFSGSGSGTDFTLTISSLQPEDFATYYCQQSNEDPLTFGQGTKVEIKRGGGGSGGGGSGGGGSEVQLVESGGGLVQPGGSLRLSCAASGYTFTSYWIEWVRQAPGKGLEWIGEILPGGGDTNYNEIFKGRATFSADTSKNTAYLQMNSLRAEDTAVYYCTRRVPIRLDYWGQGTLVTVSS

SEQ ID NO: 1019 - protein, 244 aa, synthetic construct
DIQLTQSPSSLSASVGDRVTITCKASQSVDYEGDSFLNWYQQKPGKAPKLLIYAASNLESGVPSRFSGSGSGTDFTLTISSLQPEDFATYYCQQSNEDPLTFGQGTKVEIKRGGGGSGGGGSGGGGSEVQLVESGGGLVQPGGSLRLSCAASGYTFTSYWIEWVRQAPGKGLEWIGEILPGGGDTNYNEIFKGRATFSADTSKNTAYLQMNSLRAEDTAVYYCTRRVPIRLDYWGQGTLVTVSS

SEQ ID NO: 1020 - protein, 244 aa, synthetic construct
DIQLTQSPSSLSASVGDRVTITCKASQSVDYEGDSFLNWYQQKPGKAPKLLIYAASNLESGVPSRFSGSGSGTDFTLTISSLQPEDFATYYCQQSNEDPLTFGQGTKVEIKRGGGGSGGGGSGGGGSQVQLQQPGAELVKPGASVKMSCKASGYTFTSYWINWMKQKPGQGLEWIGQILPGGGDTNYNGKFKGRATLTADTSSSTAYMQLSSLTSEDSAVYFCTRRVPIRLDYWGQGTSVTVSS

SEQ ID NO: 1021 - protein, 243 aa, synthetic construct
DIVMTQSPDSLAVSLGERATINCKASQSVDYEGDSFLNWYQQKPGQPPKLLIYAASNLESGVPSRFSGSGSGTDFTLTISSLQPEDVAVYYCQQSNEDPLTFGQGTKVEIKGGGGSGGGGSGGGGSEVQLVESGGGLVQPGGSLRLSCAASGYTFTSYWIEWVRQAPGKGLEWIGEILPGGGDTNYNEIFKGRATFSADTSKNTAYLQMNSLRAEDTAVYYCTRRVPIRLDYWGQGTLVTVSS

SEQ ID NO: 1022 - protein, 243 aa, synthetic construct
DIVMTQSPDSLAVSLGERATINCKASQSVDYEGDSFLNWYQQKPGQPPKLLIYAARKLGRGVPSRFSGSGSGTDFTLTISSLQPEDVAVYYCQQSNEDPLTFGQGTKVEIKGGGGSGGGGSGGGGSEVQLVESGGGLVQPGGSLRLSCAASGYTFTSYWIEWVRQAPGKGLEWIGEILPGGGDTNYNEIFKGRATFSADTSKNTAYLQMNSLRAEDTAVYYCTRRVPIRLDYWGQGTLVTVSS

SEQ ID NO: 1023 - protein, 247 aa, synthetic construct
DIVMTQSPDSLAVSLGERATINCKASQSVDYDGDSFLNWYQQKPGQPPKLLIYAASNLESGVPSRFSGSGSGTDFTLTISSLQPEDVAVYYCQQSNDDPLTFGQGTKVEIKLEGGGGSGGGGSGGGGSFEQVQLVQSGAEVKKPGASVKVSCKASGYTFTSYWINWVRQAPGQGLEWMGQILPGGGDTNYNGKFKGRVTITADTSTSTAYMELSSLRSEDTAVYYCTRRVPIRLDYWGQGTLVTVSS

SEQ ID NO: 1024 - protein, 240 aa, synthetic construct
DIQMTQSPSSLSASVGDRVTITCKSSQSLLDSDGKTYLNWYQQKPGKAPKLLIYLVSKLDSGVPSRFSGSGSGTDFTLTISSLQPEDFATYYCFQGTHFPFTFGQGTKVEIKRGGGGSGGGSGGGGSEVQLVESGGGLVQPGGSLRLSCAASGYTFTSYWMNWVRQAPGKGLEWVGMIDPSDSETHYNHIFKDRFTISADTSKNTAYLQMNSLRAEDTAVYYCARNLYLFGQGTLVTVSS

SEQ ID NO: 1025 - protein, 248 aa, synthetic construct
DIQMTQSPSSLSASVGDRVTITCKSSQSLLDSDGKTYLNWYQQKPGKAPKLLIYLVSKLDSGVPSRFSGSGSGTDFTLTISSLQPEDFATYYCFQGTHFPFTFGQGTKVEIKRGGGGSGGGSGGGGSEVQLVESGGGLVQPGGSLRLSCAASGYTFSSYWMNWVRQAPGKGLEWVGMIDPSDSETHYNHIFKDRFTISADTSKNTAYLQMNSLRAEDTAVYYCARNLYLWGQGTLVTVSSTRPRLCLL

SEQ ID NO: 1026 - protein, 240 aa, synthetic construct
DIQMTQSPSSLSASVGDRVTITCKSSQSLLDSDGKTYLNWYQQKPGKAPKLLIYLVSKLDSGVPSRFSGSGSGTDFTLTISSLQPEDFATYYCWQGTHFPFTFGQGTKVEIKRGGGGSGGGSGGGGSEVQLVESGGGLVQPGGSLRLSCAASGYTFTSYWMNWVRQAPGKGLEWVGMIDPSDSETHYNHIFKDRFTISADTSKNTAYLQMNSLRAEDTAVYYCARNLYLFGQGTLVTVSS

SEQ ID NO: 1027 - protein, 240 aa, synthetic construct
DIQMTQSPSSLSASVGDRVTITCKSSQSLLDSDGKTYLNWYQQKPGKAPKLLIYLVSKLDSGVPSRFSGSGSGTDFTLTISSLQPEDFATYYCWQGTHFPFTFGQGTKVEIKRGGGGSGGGSGGGGSEVQLVESGGGLVQPGGSLRLSCAASGYTFSSYWMNWVRQAPGKGLEWVGMIDPSDSETHYNHIFKDRFTISADTSKNTAYLQMNSLRAEDTAVYYCARNLYLWGQGTLVTVSS

SEQ ID NO: 1028 - protein, 240 aa, synthetic construct
DIQMTQSPSSLSASVGDRVTITCKSSQSLLDSDGKTYLNWYQQKPGKAPKLLIYLVSKLDSGVPSRFSGSGSGTDFTLTISSLQPEDFATYYCFQGTHFPYTFGQGTKVEIKRGGGGSGGGSGGGGSEVQLVESGGGLVQPGGSLRLSCAASGYTFTSYWMNWVRQAPGKGLEWVGMIDPSDSETHYNHIFKDRFTISADTSKNTAYLQMNSLRAEDTAVYYCARNLYLFGQGTLVTVSS

SEQ ID NO: 1029 - protein, 248 aa, synthetic construct
DIQMTQSPSSLSASVGDRVTITCKSSQSLLDSDGKTYLNWYQQKPGKAPKLLIYLVSKLDSGVPSRFSGSGSGTDFTLTISSLQPEDFATYYCFQGTHFPYTFGQGTKVEIKRGGGGSGGGSGGGGSEVQLVESGGGLVQPGGSLRLSCAASGYTFTNYWMNWVRQAPGKGLEWVGMIDPSDSETHYNHIFKDRFTISADTSKNTAYLQMNSLRAEDTAVYYCARNLYLWGQGTLVTVSSTRPRLCLL

SEQ ID NO: 1030 - protein, 240 aa, synthetic construct
DIQMTQSPSSLSASVGDRVTITCKSSQSLLDSDGKTYLNWYQQKPGKAPKLLIYLVSKLDSGVPSRFSGSGSGTDFTLTISSLQPEDFATYYCFQGTHFPFTFGQGTKVEIKRGGGGSGGGSGGGGSEVQLVESGGGLVQPGGSLRLSCAASGYTFTNYWMNWVRQAPGKGLEWVGMIDPSDSETHYNHIFKDRFTISADTSKNTAYLQMNSLRAEDTAVYYCARNLYLWGQGTLVTVSS

SEQ ID NO: 1031 - protein, 250 aa, synthetic construct
DIVLTQSPASLAVSLGQRATISCKASQSVDYDGDSFLNWYQKPGQPPKLFIYAASNLESGIPARFSGSGSGTDFTLNIHPVEEEDAATYYCQQSNEDPLTFGAGTELELKRGGGGSGGGSGGGGSEVQLQQSGAELMKPGASVKISCKATGYTFSSYWIEWVKQRPGHGLEWIGEILPGGGDTNYNEIFKGKATFTADTSSNTAYMQLSSLTSEDSAVYYCTRRVPVYFDYWGQGTSVTVSSTRPRLCLL

SEQ ID NO: 1032 - protein, 240 aa, synthetic construct
DIVMTQTPLTLSVTIGQPASISCKSSQSLLDSDGKTYLNWLLQRPGQSPERLIYLVSKLDSGVPDRFTGSGSGTDFTLKISRVEAEDLGVYYCWQGTHFPYTFGGGTKVEIKGGGGSGGGGSGGGGSQVQLQQPGAELVRPGASVKLSCKASGYTFTSYWMNWVKQRPGQGLEWIGMIDPSDSETHYNHIFKDKATLTVDKSSSTAYLQLSSLTSEDSAVYYCARNLYLWGQGTSVTVSS

SEQ ID NO: 1033 - protein, 252 aa, synthetic construct
DIQLTQSPSSLSASVGDRVTITCKASQSVDYEGDSFLNWYQQKPGKAPKLLIYAASNLESGVPSRFSGSGSGTDFTLTISSLQPEDFATYYCQQSNEDPLTFGQGTKVEIKRGGGGSGGGGSGGGGSEVQLVESGGGLVQPGGSLRLSCAASGYTFSSYWIEWVRQAPGKGLEWIGEILPGGGDTNYNEIFKGRATFSADTSKNTAYLQMNSLRAEDTAVYYCTRRVPIRLDYWGQGTLVTVSSTRPRLCLL

SEQ ID NO: 1034 - protein, 243 aa, synthetic construct
DIVMTQSPDSLAVSLGERATINCKASQSVDYDGDSFLNWYQQKPGQPPKLLIYAASNLESGVPSRFSGSGSGTDFTLTISSLQPEDVAVYYCQQSNDDPLTFGQGTKVEIKGGGGSGGGGSGGGGSEVQLVESGGGLVQPGGSLRLSCAASGYTFTSYWIEWVRQAPGKGLEWIGEILPGGGDTNYNEIFKGRATFSADTSKNTAYLQMNSLRAEDTAVYYCTRRVPIRLDYWGQGTLVTVSS

SEQ ID NO: 1035 - protein, 243 aa, synthetic construct
DIVMTQSPDSLAVSLGERATINCKASQSVDYDGESFLNWYQQKPGQPPKLLIYAASNLESGVPSRFSGSGSGTDFTLTISSLQPEDVAVYYCQQSNDDPLTFGQGTKVEIKGGGGSGGGGSGGGGSEVQLVESGGGLVQPGGSLRLSCAASGYTFTSYWIEWVRQAPGKGLEWIGEILPGGGDTNYNEIFKGRATFSADTSKNTAYLQMNSLRAEDTAVYYCTRRVPIRLDYWGQGTLVTVSS

SEQ ID NO: 1036 - protein, 243 aa, synthetic construct
DIVMTQSPDSLAVSLGERATINCKASQSVDYEGDSFLNWYQQKPGQPPKLLIYAASNLESGVPSRFSGSGSGTDFTLTISSLQPEDVAVYYCQQSNEDPLTFGQGTKVEIKGGGGSGGGGSGGGGSEVQLVESGGGLVQPGGSLRLSCAASGYTFSSYWIEWVRQAPGKGLEWIGEILPGGGDTNYNEIFKGRATFSADTSKNTAYLQMNSLRAEDTAVYYCTRRVPIRLDYWGQGTLVTVSS

SEQ ID NO: 1037 - protein, 244 aa, synthetic construct
DFVMTQTPLSLPVTPGEPASISCRSSQSIVHHDGNTYLEWYLQKPGQSPKLLIYKVSNRFSGVPDRFSGSGSGTDFTLKISRVEAEDVGVYYCFQGSHVPWTFGGGTKVEIKRGGGGSGGGSGGGGSEVQLVQSGAEVKKPGSSVKVSCKASGGSFSSYGINWVKQAPGQGLEWIGEIFPRSGNTYYNEKFEGRATLTADKSTSTAYMELRSLRSEDTAVYYCAKGDLGDFDYWGQGTTVTVSS

SEQ ID NO: 1038 - protein, 247 aa, synthetic construct
DVVMTQTPLSLPVTPGEPASISCRSSQSIVHSDGNTYFEWYLQKPGQSPQLLIYKVSNRFSGVPDRFSGSGSGTDFTLKISRVEAEDVGVYYCFQGSHVPWTFGGGTKVEIKRGGGGSGGGGSGGGGSEVQLVQSGAEVKKPGASVKVSCKASGYTFTSYGINWVKQAPGQGLEWIGEIYPRSGNIYYNEKFKGKATLTADKSTSTAYMELRSLRSDDTAVYYCARGSDYDGDFAYWGQGTLVTVSS

SEQ ID NO: 1039 - protein, 238 aa, synthetic construct
EVQLQESGPGLVKPSQSLSLTCTVTGYSITSDYAWNWIRQFPGNKLEWMGNIWYSGSTTYNPSLKSRISITRDTSKNQFFLQLNSVTSEDTATYYCSRMDFWGQGTTLTVSSGGGGSGGGSGGGGSDIVLTQSPPSLAVSLGQRATISCRASESVDSYGKTFMHWHQQKPGQPPKLLIYRVSNLESGIPARFSGSGSRTDFTLTINPVEADDVATYYCQQSNEDPFTFGGGTKLEIKR

SEQ ID NO: 1040 - protein, 244 aa, synthetic construct
SYVLTQPPSVSVAPGQTARITCGGNNIGSQSVHWYQQKPGQAPVLVVYDDSDRPSGIPERFSGSNSGNTATLTISRVEAGDEADYYCQVWDSSSDHVVFGGGTKLTVLGGGGSGGGGSGGGGSQLQLQESGPGLVKPSETLSLTCTVSGGSISSNSYFWGWIRQPPGKGLEWIGSIYYSGSTYYNPTLKSRVTISVDTSKNQFSLKLSSVTAADTAVYYCARHDGAVAGLFDYWGQGTLVTVSS

SEQ ID NO: 1041 - protein, 244 aa, synthetic construct
SYVLTQPPSVSVAPGQTARITCGGNNIGSKGVHWYQQKPGQAPVLVVYDDSDRPSGIPERFSGSNSGNTATLTISRVEAGDEADYYCQVWDSSSDHVVFGGGTKLTVLGGGGSGGGGSGGGGSQLQLQESGPGLVKPSETLSLTCTVSGGSISSNSYYWGWIRQPPGKGLEWIGSIYYSGSTYYNPTLKSRVTISVDTSKNQFSLKLSSVTAADTAVYYCARHDGAVAGLFDYWGQGTLVTVSS

SEQ ID NO: 1042 - protein, 243 aa, synthetic construct
EVQLLETGGGLVQPGGSRGLSCEGSGFTFSGFWMSWVRQTPGKTLEWIGDINSDGSSINYAPSIKDRFTIFRDNDKSILYLQMTNVRSEDTGTYFCVTTYGDYWGQGTTLTVSSASGGGGSGGGGSGGGGSDIVMTQSQKFMSTSVGDRVSVTCKASQNVGSHVGWYQQKSGQSPKALIYSASNRYIGVPDRFTGSGSGTDFTLTISNVQSEDLAEYFCQQYHIYPYTFGGGTRLEIKRTVAA

SEQ ID NO: 1043 - protein, 5 aa, synthetic construct
GGGGG

SEQ ID NO: 1044 - protein, 5 aa, synthetic construct
GGGGG

SEQ ID NO: 1045 - protein, 5 aa, synthetic construct
GGGGG

SEQ ID NO: 1046 - protein, 5 aa, synthetic construct
GGGGG

SEQ ID NO: 1047 - protein, 5 aa, synthetic construct
GGGGG

SEQ ID NO: 1048 - protein, 5 aa, synthetic construct
GGGGG

SEQ ID NO: 1049 - protein, 5 aa, synthetic construct
GGGGG

SEQ ID NO: 1050 - protein, 5 aa, synthetic construct
GGGGG

SEQ ID NO: 1051 - protein, 5 aa, synthetic construct
GGGGG

SEQ ID NO: 1052 - protein, 5 aa, synthetic construct
GGGGG

SEQ ID NO: 1053 - protein, 5 aa, synthetic construct
GGGGG

SEQ ID NO: 1054 - protein, 5 aa, synthetic construct
GGGGG

SEQ ID NO: 1055 - protein, 5 aa, synthetic construct
GGGGG

SEQ ID NO: 1056 - protein, 5 aa, synthetic construct
GGGGG

SEQ ID NO: 1057 - protein, 5 aa, synthetic construct
GGGGG

SEQ ID NO: 1058 - protein, 5 aa, synthetic construct
GGGGG

SEQ ID NO: 1059 - protein, 5 aa, synthetic construct
GGGGG

SEQ ID NO: 1060 - protein, 5 aa, synthetic construct
GGGGG

SEQ ID NO: 1061 - protein, 5 aa, synthetic construct
GGGGG

SEQ ID NO: 1062 - protein, 5 aa, synthetic construct
GGGGG

SEQ ID NO: 1063 - protein, 5 aa, synthetic construct
GGGGG

SEQ ID NO: 1064 - protein, 5 aa, synthetic construct
GGGGG

SEQ ID NO: 1065 - protein, 5 aa, synthetic construct
GGGGG

SEQ ID NO: 1066 - protein, 5 aa, synthetic construct
GGGGG

SEQ ID NO: 1067 - protein, 5 aa, synthetic construct
GGGGG

SEQ ID NO: 1068 - protein, 5 aa, synthetic construct
GGGGG

SEQ ID NO: 1069 - protein, 5 aa, synthetic construct
GGGGG

SEQ ID NO: 1070 - protein, 5 aa, synthetic construct
GGGGG

SEQ ID NO: 1071 - protein, 5 aa, synthetic construct
GGGGG

SEQ ID NO: 1072 - protein, 5 aa, synthetic construct
GGGGG

SEQ ID NO: 1073 - protein, 5 aa, synthetic construct
GGGGG

SEQ ID NO: 1074 - protein, 5 aa, synthetic construct
GGGGG

SEQ ID NO: 1075 - protein, 5 aa, synthetic construct
GGGGG

SEQ ID NO: 1076 - protein, 5 aa, synthetic construct
GGGGG

SEQ ID NO: 1077 - protein, 5 aa, synthetic construct
GGGGG

SEQ ID NO: 1078 - protein, 5 aa, synthetic construct
GGGGG

SEQ ID NO: 1079 - protein, 244 aa, synthetic construct
GDIQMTQSPSSLSASVGDRVTITCSASSSVSYMNWYQQTPGKAPKRWIYDTSKLASGVPSRFSGSGSGTDYTFTISSLQPEDIATYYCQQWSSNPFTFGQGTKLQITRTSGGGGSGGGGSGGGGSQVQLVQSGGGVVQPGRSLRLSCKASGYTFTRYTMHWVRQAPGKGLEWIGYINPSRGYTNYNQKVKDRFTISRDNSKNTAFLQMDSLRPEDTGVYFCARYYDDHYCLDYWGQGTPVTVSS

SEQ ID NO: 1080 - protein, 4 aa, synthetic construct
GGGG

SEQ ID NO: 1081 - protein, 118 aa, synthetic construct
EVQLLESGGGLVQAGGSLRLSCAASGRTFTMGWFRQAPGKEREFVAAISLSPTLAYYADSVKGRFTISRDNAKNTVVLQMNSLKPEDTALYYCAADRKSVMSIRPDYWGQGTLVTVSS

SEQ ID NO: 1082 - protein, 118 aa, synthetic construct
QVQLVESGGGLVQAGGSLRLSCAASGRTFTMGWFRQAPGKEREFVAAISLSPTLAYYADSVKGRFTISRDNAKNTVVLQMNSLKPEDTALYYCAADRKSVMSIRPDYWGQGTLVTVSS

SEQ ID NO: 1083 - protein, 118 aa, synthetic construct
EVQLLESGGGLVQAGGSLRLSCAASGRTFTMGWFRQAPGKEREFVAAISLSPTLAYYADSVKGRFTISRDNAKNTVVLQMNSLKPEDTALYYCAADRKSVMSIRPDYWGQGTQVTVSS

SEQ ID NO: 1084 - protein, 118 aa, synthetic construct
QVQLVESGGGLVQAGGSLRLSCAASGRTFTMGWFRQAPGKEREFVAAISLSPTLAYYADSVKGRFTISRDNAKNTVVLQMNSLKPEDTALYYCAADRKSVMSIRPDYWGQGTQVTVSS

SEQ ID NO: 1085 - protein, 118 aa, synthetic construct
EVQLLESGGGLVQAGGSLRLSCAASGRTFTMGWFRQAPGKEREFVAAISLSPTLAYYASSVRGRFTISRDNAKNTVVLQMNSLKPEDTALYYCAADRKSVMSIRPDYWGQGTQVTVSS

SEQ ID NO: 1086 - protein, 118 aa, synthetic construct
QVQLVESGGGLVQAGGSLRLSCAASGRTFTMGWFRQAPGKEREFVAAISLSPTLAYYADSVRGRFTISRDNAKNTVYLQMNSLKPEDTAVYYCAADRKSVMSIRPDYWGQGTQVTVSS

SEQ ID NO: 1087 - protein, 118 aa, synthetic construct
QVQLVESGGGLVQAGGSLRLSCAASGRTFSMGWFRQAPGKEREFVAAISLSPTLAYYADSVRGRFTISRDNAKNTVYLQMNSLKPEDTAVYYCAADRKSVMSIRPDYWGQGTQVTVSS

SEQ ID NO: 1088 - protein, 118 aa, synthetic construct
QVQLVESGGGLVQAGGSLRLSCAASGRTFSMGWFRQAPGKEREFVAAITLSPTLAYYADSVRGRFTISRDNAKNTVYLQMNSLKPEDTAVYYCAADRKSVMSIRPDYWGQGTQVTVSS

SEQ ID NO: 1089 - protein, 118 aa, synthetic construct
QVQLQESGGGLAQAGGSLRLSCAASGRTFSMGWFRQAPGKEREFVAAITLSPTLAYYADSVRGRFTISRDNAKNTVYLQMNSLKPEDTAVYYCAADRKSVMSIRPDYWGQGTQVTVSS

SEQ ID NO: 1090 - protein, 118 aa, synthetic construct
QVQLVESGGGLAQPGGSLRLSCAASGRTFSMGWFRQAPGKEREFVAAITLSPTLAYYADSVRGRFTISRDNAKNTVYLQMNSLKPEDTAVYYCAADRKSVMSIRPDYWGQGTQVTVSS

SEQ ID NO: 1091 - protein, 118 aa, synthetic construct
EVQLLESGGGLVQAGGSLRLSCAASGRTFSMGWFRQAPGKEREFVAAITYSGGSPYYADSVKGRFTISRDNAKNTVYLQMNSLKPEDTAVYYCAANPTYGSDWNAENWGQGTQVTVSS

SEQ ID NO: 1092 - protein, 118 aa, synthetic construct
EVQLLESGGGLVQAGGSLRLSCAASGRTFSMGWFRQAPGKEREFVAAITYSGGSPYYADSVKGRFTISRDNAKNTVYLQMNSLKPEDTAVYYCAANPTYGSDWNAENWGQGTLVTVSS

SEQ ID NO: 1093 - protein, 118 aa, synthetic construct
EVQLVESGGGLVQAGGSLRLSCAASGRTFTMGWFRQAPGKEREFVAAITYSGGSPYYADSVKGRFTISRDNAKNTVVLQMNSLKPEDTALYYCAANPTYGSDWNAENWGQGTQVTVSS

SEQ ID NO: 1094 - protein, 118 aa, synthetic construct
EVQLVESGGGLVQAGGSLRLSCAASGRTFTMGWFRQAPGKEREFVAAISYSGGSPYYADSVKGRFTISRDNAKNTVVLQMNSLKPEDTALYYCAANPTYGSDWNAENWGQGTQVTVSS

SEQ ID NO: 1095 - protein, 122 aa, synthetic construct
QVQLQESGPGLVKPSQTLSLTCTVSGGSITTGEFYWNWFRQPPGKGLEWMGAVAASGSTTYSPSFESRTSISRDTSKNQFSLKLSSVTAADTALYYCGRSFGVAAITTGQNRGQGTLVTVSS

SEQ ID NO: 1096 - protein, 125 aa, synthetic construct
QVQLVESGGGLVQPGGSLRLSCAASGNINSRSCMGWFRQAPGKGREGVAAIGQVTGRTYYVDSVKGRFTISLDNSKNTLYLQMNSLRAEDTAVYYCAAAPGCLLSALRSADYRNWGQGTLVTVSS

SEQ ID NO: 1097 - protein, 125 aa, synthetic construct
QVQLVESGGGLVQPGGSLRLSCAASGSINSRSCMGWFRQAPGKGREGVAAIGQVTGRTYYVDSVKGRFTISLDNSKNTLYLQMNSLRAEDTAVYYCAAAPGCLLSALRSADYRNWGQGTLVTVSS

SEQ ID NO: 1098 - protein, 125 aa, synthetic construct
EVQLLESGGGLVQAGGSLRLSCAASGNINSRSCMGWFRQAPGKGREGVAAIGQVTGRTYYVDSVKGRFTISLDNSKNTLYLQMNSLRAEDTAVYYCAAAPGCLLSALRSADYRNWGQGTLVTVSS

SEQ ID NO: 1099 - protein, 125 aa, synthetic construct
QVQLVESGGGLVQPGGSLRLSCAASGNISSRNCMGWFRQAPGKGREGVAAIGQVTGRTYYVDSVKGRFTISLDNSKNTLYLQMNSLRAEDTAVYYCAAAPGCLLSALRSADYRNWGQGTLVTVSS

SEQ ID NO: 1100 - protein, 125 aa, synthetic construct
QVQLVESGGGSVQAGGSLRLSCGASGNISSRNCMGWFRQAPGKEREGVAAIGQVTGRTYYVDSVKGRFTISLDNAKNTLYLQMNTLKPEDTAMYYCAAAPGCLLSALRSADYRNWGQGTQVTVSS

SEQ ID NO: 1101 - protein, 125 aa, synthetic construct
QVQLVESGGGLVQPGGSLRLSCAASGSINSRNCMGWFRQAPGKGREGVAAIGQVTGRTYYVDSVKGRFTISLDNSKNTLYLQMNSLRAEDTAVYYCAAAPGCLLSALRSADYRNWGQGTLVTVSS

SEQ ID NO: 1102 - protein, 125 aa, synthetic construct
QVQLVESGGGLVQPGGSLRLSCAASGNINSRTCMGWFRQAPGKGREGVAAIGQVTGRSYYVDSVKGRFTISLDNSKNTLYLQMNSLRAEDTAVYYCAAAPGCLLSALRSADYRNWGQGTLVTVSS

SEQ ID NO: 1103 - protein, 125 aa, synthetic construct
QVQLVESGGGSVQAGGSLRLSCGASGNINSRNCMGWFRQAPGKEREGVAAIGQVTGRSYYVDSVKGRFTISLDNAKNTLYLQMNTLKPEDTAMYYCAAAPGCLLSALRSADYRNWGQGTQVTVSS

SEQ ID NO: 1104 - protein, 127 aa, synthetic construct
EVQLVESGGGSVQAGGSLRLSCAASGYTYGINCMGWFRQAPGKEREGVAAISTGGGRTDYRDSVKGRFTISQDNAKNTVYLQMNSLKPEDTAMYYCAGKTTYPGYGCGLGRSAYNYWGQGTQVTVSS

SEQ ID NO: 1105 - protein, 127 aa, synthetic construct
QVQLVESGGGLVQPGRSLRLSCAASGYTYGINCMGWFRQAPGKGREGVAAISTGGGRTDYRDSVKGRFTISQDNSKNTVYLQMNSLRAEDTAMYYCAGKTTYPGYGCGLGRSAYNYWGQGTQVTVSS

SEQ ID NO: 1106 - protein, 127 aa, synthetic construct
QVQLVESGGGLVQPGRSLRLSCAASGYTYGINCMGWFRQAPGKGREGVAAISTGGGRTDYRDSVRGRFTISQDNSKNTVYLQMNSLRAEDTAMYYCAGKTTYPGYGCGLGRSAYNYWGQGTQVTVSS

SEQ ID NO: 1107 - protein, 127 aa, synthetic construct
EVQLVESGGGSVQAGGSLRLSCAASGYTYGINCMGWFRQAPGKEREGVAAISTGGGRTDYRDSVRGRFTISQDNAKNTVYLQMNSLKPEDTAMYYCAGKTTYPGYGCGLGRSAYNYWGQGTQVTVSS

SEQ ID NO: 1108 - protein, 128 aa, synthetic construct
QVQLVESGGGVVQPGRSLRLSCVASGYTYSINCMGWFRQAPGKGREGIAVISTGGGTTGVADSVKGRFTISQDNAKNTVYLQMNSLRAEDTAMYYCAARSTYSGYACVYSEVNGYNYRGQGTQVTVSS

SEQ ID NO: 1109 - protein, 125 aa, synthetic construct
QVQLVESGGGVVQPGGSLRLSCAASGLSFSTYTVAWFRQAPGKGLEGVAAIPYTSQHMVYTDSVRGRFTISRDNSKNTLYLQMNSLRAEDTAVYYCATDRRPGTSMLAINGYNRWGQGTTVTVSS

SEQ ID NO: 1110 - protein, 125 aa, synthetic construct
QVQLVESGGGVVQPGGSLRLSCAASGLSFSTYTVAWFRQAPGKGLEGVAAIPYTSQHMVYTDSVRGRFTISRDNSKNTLYLQMNSLRAEDTAVYYCATDRRPGTSMLAVNGYNHWGQGTTVTVSS

SEQ ID NO: 1111 - protein, 125 aa, synthetic construct
QVQLVESGGGVVQPGGSLRLSCAASGLSFSTYTVAWFRQAPGKGLEGVAAIPYTSQHMVYADSVKGRFTISRDNSKNTLYLQMNSLRAEDTAVYYCATDRRPGTTMLAINGYNHWGQGTTVTVSS

SEQ ID NO: 1112 - protein, 125 aa, synthetic construct
QVQLVESGGGVVQPGGSLRLSCAASGLSFSTYTVAWFRQAPGKGLEGVAAIPYTSQHMVYADSVKGRFTISRDNSKNTLYLQMNSLRAEDTAVYYCATDRRPGTSMLAVNGYNHWGQGTTVTVSS

SEQ ID NO: 1113 - protein, 125 aa, synthetic construct
QVQLVESGGGVVQPGGSLRLSCAASGLSFSTYTVAWFRQAPGKGLEGVAAIPYTSQHMVYADSVKGRFTISRDNSKNTLYLQMNSLRAEDTAVYYCATDRRPGTTMLAVNGYNHWGQGTTVTVSS

SEQ ID NO: 1114 - protein, 125 aa, synthetic construct
QVQLVESGGGVVQPGRSLRLSCAASGLSFSTYTVAWFRQAPGKGLEGVAAIPYTSQHMVYADSVKGRFTISRDNSKNTLYLQMNSLRAEDTAVYYCATDRRPGTTMLAVNGYNHWGQGTLVTVSS

SEQ ID NO: 1115 - protein, 125 aa, synthetic construct
QVQLVESGGGVVQPGGSLRLSCAASFSGYGVSTMAWFRQAPGKGLEGVAVITVGSGNTYYADSVRGRFTISRDNSKNTVYLQMNSLRAEDTAMYYCAVGWLSGGSWHVPGRYNYWGQGTLVTVSS

SEQ ID NO: 1116 - protein, 125 aa, synthetic construct
QVQLVESGGGVVQPGGSLRLSCAASFSGYGVSTMAWFRQAPGKGLEGVAVITVGSGNTYYTDSVRGRFTISRDNSKNTVYLQMNSLRAEDTAMYYCAVGWLSGGSWHVPGRYNYWGQGTLVTVSS

SEQ ID NO: 1117 - protein, 125 aa, synthetic construct
QVQLVESGGGVVQPGRSLRLSCAASFSGYGVSTMAWFRQAPGKGLEGVAVITVGSGNTYYTDSVRGRFTISRDNSKNTVYLQMNSLRAEDTAMYYCAVGWLSGGSWHVPGRYNYWGQGTLVTVSS

SEQ ID NO: 1118 - protein, 125 aa, synthetic construct
QVQLVESGGGVVQPGRSLRLSCAASFSGYGVSTMGWFRQAPGKGLEGVAAITVGSGNTYYADSVRGRFTISRDNSKNTVYLQMNSLRAEDTAMYYCAVGYLSGGSWDVPGRYNYWGQGTLVTVSS

SEQ ID NO: 1119 - protein, 125 aa, synthetic construct
QVQLVESGGGVVQPGRSLRLSCAASFSGYGVSTMGWFRQAPGKGLEGVAVITVGSGNTYYADSVRGRFTISRDNSKNTVYLQMNSLRAEDTAMYYCAVGYLSGGSWDVPGRYNYWGQGTLVTVSS

SEQ ID NO: 1120 - protein, 125 aa, synthetic construct
QVQLVESGGGVVQPGRSLRLSCAASFSGYGVSTMGWFRQAPGKGLEGVAVITVGSGNTYYTDSVRGRFTISRDNSKNTVYLQMNSLRAEDTAMYYCAVGYLSGGSWDVPGRYNYWGQGTLVTVSS

SEQ ID NO: 1121 - protein, 125 aa, synthetic construct
QVQLVESGGGVVQPGGSLRLSCAASFSGYGVSTMAWFRQAPGKGLEGVAAITVGSGNTYYADSVKGRFTISRDNSKNTVYLQMNSLRAEDTAMYYCAVGYLSGGSWDVPGRYNYWGQGTLVTVSS

SEQ ID NO: 1122 - protein, 128 aa, synthetic construct
EVQLVESGGGLVQPGGSLRLSCAASGFASDYYIIGWFRQAPGKEREGVSCISSRYANTNYADSVKGRFTISRDNAKNTVYLQMNSLKPEDTAVYYCAADTRRYTCPDIATMHRNFDSWGQGTLVTVSS

SEQ ID NO: 1123 - protein, 128 aa, synthetic construct
QVQLVESGGGLVQPGGSLRLSCAASGFASDYYIIGWFRQAPGKGREGVSCISSRYANTNYADSVKGRFTISLDNSKNTVYLQMNSLKPEDTAVYYCAADTRRYTCPEIATMHRNFDSWGQGTLVTVSS

SEQ ID NO: 1124 - protein, 128 aa, synthetic construct
EVQLVESGGGLVQPGGSLRLSCEASGFASDDYIIGWFRQAPGKEREGVSCISSKYANTVYTDSVKGRFRLSRGTAKNTVYLQMSALKPEDTAVYYCAMDSRRVTCPEISTMHRNFDSWGQGTLVTVSS

SEQ ID NO: 1125 - protein, 128 aa, synthetic construct
QVQLVESGGGLVQPGGSLRLSCEASGFASDDYIIGWFRQAPGKGREGVSCISSKYANTVYTDSVRGRFRLSRGTAKNTLYLQMNSLRAEDTAVYYCAADTRRVTCPEISTMHRNFDSWGQGTLVTVSS

SEQ ID NO: 1126 - protein, 120 aa, synthetic construct
QVQLQESGGGLVQAGDSLRLSCAASGRAVSSLFMGWFRRAPGKERELVAAISRYSLYTYYADSVKGRFTISADNAKNAVYLQMNSLKPEDTAVYYCASKLEYTSNDYDSWGQGTQVTVSS

SEQ ID NO: 1127 - protein, 120 aa, synthetic construct
EVQLQESGGGLVQPGGSLRLSCAASGRTFSSLFMGWFRQAPGKERELVAAISRYSLYTYYADSVKGRFTISADNAKNAVYLQMNSLKPEDTAVYYCASKLEYTSNDYDSWGQGTQVTVSS

SEQ ID NO: 1128 - protein, 120 aa, synthetic construct
QVQLQESGGGLVQPGGSLRLSCAASGRAVSSLFMGWFRQAPGKGRELVAAISKYSLYTYYADSVKGRFTISLDNSKNALYLQMNSLRAEDTAVYYCASKLEYTSYDYDSWGQGTQVTVSS

SEQ ID NO: 1129 - protein, 120 aa, synthetic construct
EVQLQESGGGLVQPGGSLRLSCAASGRTFSSLFMGWVRQAPGKGLELVSAISRYSLYTYYADSVKGRFTISRDNAKNTLYLQMNSLRPEDTAVYYCASKLEYTSNDYDSWGQGTLVTVSS

SEQ ID NO: 1130 - protein, 120 aa, synthetic construct
QVQLQESGGGLVQAGDSLRLSCAASGRAFSSLFMGWFRRAPGKERELVAAISKYSLYTYYADSVKGRFTISADNAKNAVYLQMNSLKPEDTAVYYCASKLEYTSNDYDYWGQGTQVTVSS

SEQ ID NO: 1131 - protein, 118 aa, synthetic construct
EVQLLESGGGLVQAGGSLRLSCAASGRTFSMGWFRQAPGKEREFVAAISLSPTLAYYADSVKGRFTISRDNAKNTVVLQMNSLKPEDTALYYCAADRKSVMSIRPDYWGQGTQVTVSS

SEQ ID NO: 1132 - protein, 118 aa, synthetic construct
EVQLVESGGGLVQAGGSLRLSCAASGRTFTMGWFRQAPGKEREFVAAINLSPTLAYYAESVKGRFTISRDNAKNTVVLQMNSLKPEDTALYYCAADRKSVMSIRPDYWGQGTQVTVSS

SEQ ID NO: 1133 - protein, 118 aa, synthetic construct
EVQLVESGGGLVQAGGSLRLSCAASGRTFTMGWFRQAPGKEREFVAAISLSPTLAYYAESVKGRFTISRDNAKNTVVLQMNSLKPEDTALYYCAADRKSVMAIRPDYWGQGTQVTVSS

SEQ ID NO: 1134 - protein, 118 aa, synthetic construct
EVQLVESGGGLVQAGGSLRLSCAASGRTFTMGWFRQAPGKEREFVAAISLSPTLAYYAESVKGRFTISRDNAKNTVVLQMNSLKPEDTALYYCAAERKSVMSIRPDYWGQGTQVTVSS

SEQ ID NO: 1135 - protein, 118 aa, synthetic construct
EVQLVESGGGLVQAGGSLRLSCAASGRTFTMGWFRQAPGKEREFVAAINLSPTLAYYAESVKGRFTISRDNAKNTVVLQMNSLKPEDTALYYCAAERKSVMAIRPDYWGQGTQVTVSS

SEQ ID NO: 1136 - protein, 118 aa, synthetic construct
EVQLVESGGGLVQAGGSLRLSCAASGRTFTMGWFRQAPGKEREFVAAINLSPTLAYYADSVKGRFTISRDNAKNTVVLQMNSLKPEDTALYYCAAERKSVMAIRPDYWGQGTQVTVSS

SEQ ID NO: 1137 - protein, 118 aa, synthetic construct
EVQLVESGGGLVQAGGSLRLSCAASGRTFTMGWFRQAPGKEREFVAAINLSPTLAYYAESVKGRFTISRDNAKNTVVLQMNSLKPEDTALYYCAADRKSVMAIRPDYWGQGTQVTVSS

SEQ ID NO: 1138 - protein, 118 aa, synthetic construct
EVQLVESGGGLVQAGGSLRLSCAASGRTFSMGWFRQAPGKEREFVAAINLSPTLAYYAESVKGRFTISRDNAKNTVVLQMNSLKPEDTALYYCAAERKSVMAIRPDYWGQGTQVTVSS

SEQ ID NO: 1139 - protein, 118 aa, synthetic construct
EVQLVESGGGLVQAGGSLRLSCAASGRTFTMGWFRQAPGKEREFVAAINLSPTLAYYAESVRGRFTISRDNAKNTVVLQMNSLKPEDTALYYCAAERKSVMAIRPDYWGQGTQVTVSS

SEQ ID NO: 1140 - protein, 119 aa, synthetic construct
QVKLEESGGGLVQAGRSLRLSCAASEHTFSSHVMGWFRQAPGKERESVAVIGWRDISTSYADSVKGRFTISRDNAKKTLYLQMNSLKPEDTAVYYCAARRIDAADYDSWGQGTQVTVSS

SEQ ID NO: 1141 - protein, 119 aa, synthetic construct
QVKLEESGGGLVQAGRSLRLSCAASEHTFSSHVMGWFRQAPGKERESVAVIGWRDINTSYADSVKGRFTISRDNAKKTLYLQMNSLKPEDTAVYYCAARRIDASDFDSWGQGTQVTVSS

SEQ ID NO: 1142 - protein, 122 aa, synthetic construct
QVQLQESGPGLVKPSQTLSLTCTVSGASITTGEFYWNWFRQPPGKGLEWMGAIAASGSTTYSPSFESRTSISRDTSKNQFSLKLSSVTAADTAVYYCGRSFGVAAVTTGQNRGQGTLVTVSS

SEQ ID NO: 1143 - protein, 122 aa, synthetic construct
QVQLQESGPGLVKPSQTLSLTCTVSGASITTGEFYWNWFRQPPGKGLEWMGAIAASGSTTYSPSFESRTSISRDTSKNQFSLKLSSVTAADTAVYYCGRSYGVAAVTTGQNRGQGTLVTVSS

SEQ ID NO: 1144 - protein, 122 aa, synthetic construct
QVQLQESGPGLVKPSQTLSLTCTVSGASITTGEFYWNWFRQPPGKGLEWMGAIAASGSTTYSPSFESRTSISRDTSKNQFSLKLSSVTAADTAVYYCGRSFGIAAVTTGQNRGQGTLVTVSS

SEQ ID NO: 1145 - protein, 122 aa, synthetic construct
QVQLQESGPGLVKPSQTLSLTCTVSGASITTGEFYWNWFRQPPGKGLEWMGAIAASGATTYSPSFESRTSISRDTSKNQFSLKLSSVTAADTAVYYCGRSFGVAAVTTGQNRGQGTLVTVSS

SEQ ID NO: 1146 - protein, 122 aa, synthetic construct
QVQLQESGPGLVKPSQTLSLTCTVSGASITTGEYYWNWFRQPPGKGLEWMGAIAASGATTYSPSFESRTSISRDTSKNQFSLKLSSVTAADTAVYYCGRSFGVAAVTTGQNRGQGTLVTVSS

SEQ ID NO: 1147 - protein, 122 aa, synthetic construct
QVQLQESGPGLVKPSQTLSLTCTVSGASITTGEFYWNWFRQPPGKGLEWMGAIAASGSTTYSPSFESRTSISRDTSKNQFSLKLSSVTAADTAVYYCGRSFGVAAITTGQNRGQGTLVTVSS

SEQ ID NO: 1148 - protein, 122 aa, synthetic construct
QVQLQESGPGLVKPSQTLSLTCTVSGASITTGEYYWNWFRQPPGKGLEWMGAIAASGSTTYSPSFESRTSISRDTSKNQFSLKLSSVTAADTAVYYCGRSFGVAAITTGQNRGQGTLVTVSS

SEQ ID NO: 1149 - protein, 125 aa, synthetic construct
QVQLVESGGGLVQPGGSLRLSCAASGNINSRNCMGWFRQAPGKGREGVAAIGQVTGRSYYVDSVKGRFTISLDNSKNTLYLQMNSLRAEDTAVYYCAAAPGCLLSALRSADYRNWGQGTLVTVSS

SEQ ID NO: 1150 - protein, 125 aa, synthetic construct; identical to SEQ ID NO: 1102

SEQ ID NO: 1151 - protein, 125 aa, synthetic construct
QVQLVESGGGLVQPGGSLRLSCAASGNINSRNCMGWFRQAPGKGREGVAAIGQVTGRSYYVDSVKGRFTISLDNSKNTLYLQMNSLRAEDTAVYYCAAAPGCLLSSLRSADYRNWGQGTLVTVSS

SEQ ID NO: 1152 - protein, 125 aa, synthetic construct
QVQLVESGGGLVQPGGSLRLSCAASGNINSRNCMGWFRQAPGKGREGVAAIGQVTGRSYYVDSVKGRFTISLDNSKNTLYLQMNSLRAEDTAVYYCAASPGCLLSALRSADYRNWGQGTLVTVSS

SEQ ID NO: 1153 - protein, 125 aa, synthetic construct
QVQLVESGGGLVQPGGSLRLSCAASGNINSRSCMGWFRQAPGKGREGVAAIGQVTGRTYYVDSVKGRFTISLDNSKNTLYLQMNSLRAEDTAVYYCAASPGCLLSALRSADYRNWGQGTLVTVSS

SEQ ID NO: 1154 - protein, 125 aa, synthetic construct; identical to SEQ ID NO: 1121

SEQ ID NO: 1155 - protein, 125 aa, synthetic construct
QVQLVESGGGVVQPGGSLRLSCAASFSGYGVSTMAWFRQAPGKGLEGVAAITVGSGSTYYADSVKGRFTISRDNSKNTVYLQMNSLRAEDTAMYYCAVGYLSGGSWDVPGRYNYWGQGTLVTVSS

SEQ ID NO: 1156 - protein, 125 aa, synthetic construct
QVQLVESGGGVVQPGGSLRLSCAASFSGYGVSTMAWFRQAPGKGLEGVAAITVGGGSTYYADSVKGRFTISRDNSKNTVYLQMNSLRAEDTAMYYCAVGYLSGGSWDVPGRYNYWGQGTLVTVSS

SEQ ID NO: 1157 - protein, 125 aa, synthetic construct
QVQLVESGGGVVQPGGSLRLSCAASFSGYGVSTMAWFRQAPGKGLEGVAAITVGSGNTYYADSVKGRFTISRDNSKNTVYLQMNSLRAEDTAMYYCAVGYLSGGSWEVPGRYNYWGQGTLVTVSS

SEQ ID NO: 1158 - protein, 118 aa, synthetic construct
QVQLQESGGGLAQAGGSLRLSCAASGRTFSMGWFRQAPGKEREFVAAITYSGGSPYYASSVRGRFTISRDNAKNTVYLQMNSLKPEDTAVYYCAANPTYSSDWNAENWGQGTQVTVSS

SEQ ID NO: 1159 - protein, 118 aa, synthetic construct
QVQLQESGGGLAQAGGSLRLSCAASGRTFSMGWFRQAPGKEREFVAAITYSGASPYYASSVRGRFTISRDNAKNTVYLQMNSLKPEDTAVYYCAANPTYGSDWNAENWGQGTQVTVSS

SEQ ID NO: 1160 - protein, 118 aa, synthetic construct
QVQLQESGGGLAQAGGSLRLSCAASGRTFSMGWFRQAPGKEREFVAAITYSGASPYYASSVRGRFTISRDNAKNTVYLQMNSLKPEDTAVYYCAANPTYSSDWNAENWGQGTQVTVSS

SEQ ID NO: 1161 - protein, 118 aa, synthetic construct
QVQLQESGGGLAQAGGSLRLSCAASGRTFSMGWFRQAPGKEREFVAAITYSGASPYYASSVRGRFTISRDNAKNTVYLQMNSLKPEDTAVYYCAANPTYGSDWNAEYWGQGTQVTVSS

SEQ ID NO: 1162 - protein, 121 aa, synthetic construct
QVQLQESGGGLVQAGGSLRLSCAASGRSFSSVNMGWFRQAPGKEREFVAVIDWSGGSPYYTDSVRGRFTISRDNSKNTVYLQMNSLKPEDTAVYYCAAGVSYGSRWLGDYWGQGTQVTVSS

SEQ ID NO: 1163 - protein, 121 aa, synthetic construct
QVQLQESGGGLVQAGGSLRLSCAASGRSFSSVNMGWFRQAPGKEREFVAAIDWSGGSPYYTDSVKGRFTISRDNSKNTVYLQMNSLKPEDTAVYYCAAGVSFGSRWLGDYWGQGTQVTVSS

SEQ ID NO: 1164 - protein, 119 aa, synthetic construct
EVQLLESGGGLIQPGGSLRLSCAASGFTFSSYAMTWVRQAPGKGLEWVSAISGSGDYTHYADSVKGRFTISRDNSKNTVYLQMNSLRAEDSAVYYCAKDEDGGSLLGHRGQGTLVTVSS

SEQ ID NO: 1165 - protein, 121 aa, synthetic construct
EVQLLESGGGLVQPGGSLRLSCAASGFTFSSHAMSWVRQAPGKGLEWVSSISGSGDYIYYADSVKGRFTISRDISKNTLYLQMNSLRAEDTAVYYCAKEGTGANSSLADYRGQGTLVTVSS

SEQ ID NO: 1166 - protein, 118 aa, synthetic construct
QVQLVESGGGLVQPGGSLRLSCAASGFTFSSHAMSWVRQAPGKGLELVSSISGNGRTTYYADSVKGRFTISRDISKNTLDLQMNSLRAEDTAVYYCAKDGGETLVDSRGQGTLVTVSS

SEQ ID NO: 1167 - protein, 118 aa, synthetic construct
QLQLQESGPGLVKPSETLSLTCTVSGGSISSGSYYWGWIRQPPGKGLEWIGHIYYSGVTYYNPSLKSRVTISVDTSRNQFSLKLSSVTAADTAVYYCTREDSSNWRSRGQGTLVTVSS

SEQ ID NO: 1168 - protein, 118 aa, synthetic construct
QLQLQESGPGLVKPSETLSLTCTVSGDSISSGDYYWGWIRQPPGKGLEWIGHIYYSGITYYNPSLKSRVTISVDTSRNQFSLKLSSVTAADTAVYYCTREDSSNWRSRGQGTLVTVSS

SEQ ID NO: 1169 - protein, 118 aa, synthetic construct
QLQLQESGPGLVKPSETLSLTCTVSGDSISSGDYYWGWIRQPPGKGLEWIGHIYYSGISYYNPSLKSRVTISVDTSRNQFSLKLSSVTAADTAVYYCTREDSSNWRSRGQGTLVTVSS

SEQ ID NO: 1170 - protein, 118 aa, synthetic construct
QLQLQESGPGLVKPSETLSLTCTVSGDSISSGDYYWGWIRQPPGKGLEWIGHIYHSGISYYNPSLKSRVTISVDTSRNQFSLKLSSVTAADTAVYYCTREDSSNWRSRGQGTLVTVSS

SEQ ID NO: 1171 - protein, 118 aa, synthetic construct
QLQLQESGPGLVKPSETLSLTCTVSGDSISSGDYYWGWIRQPPGKGLEWIGHIYYNGISYYNPSLKSRVTISVDTSRNQFSLKLSSVTAADTAVYYCTREDSSNWRSRGQGTLVTVSS

SEQ ID NO: 1172 - protein, 118 aa, synthetic construct
QLQLQESGPGLVKPSETLSLTCTVSGDSISSGDYYWGWIRQPPGKGLEWIGHIYYAGISYYNPSLKSRVTISVDTSRNQFSLKLSSVTAADTAVYYCTREDSSNWRSRGQGTLVTVSS

SEQ ID NO: 1173 - protein, 4 aa, synthetic construct
GGGG

SEQ ID NO: 1174 - protein, 4 aa, synthetic construct
GGGG

SEQ ID NO: 1175 - protein, 4 aa, synthetic construct
GGGG

SEQ ID NO: 1176 - protein, 4 aa, synthetic construct
GGGG

SEQ ID NO: 1177 - protein, 747 aa, synthetic construct
MVAGSDAGRALGVLSVVCLLHCFGFISCFSQQIYGVVYGNVTFHVPSNVPLKEVLWKKQKDKVAELENSEFRAFSSFKNRVYLDTVSGSLTIYNLTSSDEDEYEMESPNITDTMKFFLYVLESLPSPTLTCALTNGSIEVQCMIPEHYNSHRGLIMYSWDCPMEQCKRNSTSIYFKMENDLPQKIQCTLSNPLFNTTSSIILTTCIPSSGHSRHRLEGSEFGDIQMTQSPSSLSASVGDRVTITCSASSSVSYMNWYQQTPGKAPKRWIYDTSKLASGVPSRFSGSGSGTDYTFTISSLQPEDIATYYCQQWSSNPFTFGQGTKLQITRTSGGGGSGGGGSGGGGSQVQLVQSGGGVVQPGRSLRLSCKASGYTFTRYTMHWVRQAPGKGLEWIGYINPSRGYTNYNQKVKDRFTISRDNSKNTAFLQMDSLRPEDTGVYFCARYYDDHYCLDYWGQGTPVTVSSAGSSGGSGGGGSGGGGSGGGGSSGFEVIHVTKEVKEVATLSCGHNVSVEELAQTRIYWQKEKKMVLTMMSGDMNIWPEYKNRTIFDITNNLSIVILALRPSDEGTYECVVLKYEKDAFKREHLAEVTLSVKADFPTPSISDFEIPTSNIRRIICSTSGGFPEPHLSWLENGEELNAINTTVSQDPETELYAVSSKLDFNMTTNHSFMCLIKYGHLRVNQTFNWNTTKQEHFPDNLLPSWAITLISVNGIFVICCLTYCFAPRCRERRRNERLRRESVRPVSR

SEQ ID NO: 1178 - protein, 215 aa, synthetic construct
MVAGSDAGRALGVLSVVCLLHCFGFISCFSQQIYGVVYGNVTFHVPSNVPLKEVLWKKQKDKVAELENSEFRAFSSFKNRVYLDTVSGSLTIYNLTSSDEDEYEMESPNITDTMKFFLYVLESLPSPTLTCALTNGSIEVQCMIPEHYNSHRGLIMYSWDCPMEQCKRNSTSIYFKMENDLPQKIQCTLSNPLFNTTSSIILTTCIPSSGHSRHR

SEQ ID NO: 1179 - protein, 254 aa, synthetic construct
VIHVTKEVKEVATLSCGHNVSVEELAQTRIYWQKEKKMVLTMMSGDMNIWPEYKNRTIFDITNNLSIVILALRPSDEGTYECVVLKYEKDAFKREHLAEVTLSVKADFPTPSISDFEIPTSNIRRIICSTSGGFPEPHLSWLENGEELNAINTTVSQDPETELYAVSSKLDFNMTTNHSFMCLIKYGHLRVNQTFNWNTTKQEHFPDNLLPSWAITLISVNGIFVICCLTYCFAPRCRERRRNERLRRESVRPV

SEQ ID NO: 1180 - protein, 152 aa, synthetic construct
MALPVTALLLPLALLLHAARPDARSEDRYRNPKGSACSRIWQSPRFIARKRGFTVKMHCYMNSASGNVSWLWKQEMDENPQQLKLEKGRMEESQNESLATLTIQGIRFEDNGIYFCQQKCNNTSEVYQGCGTELRVMGFSTLAQLKQRNTLK

SEQ ID NO: 1181 - protein, 130 aa, synthetic construct
ARSEDRYRNPKGSACSRIWQSPRFIARKRGFTVKMHCYMNSASGNVSWLWKQEMDENPQQLKLEKGRMEESQNESLATLTIQGIRFEDNGIYFCQQKCNNTSEVYQGCGTELRVMGFSTLAQLKQRNTLK

SEQ ID NO: 1182 - protein, 969 aa, synthetic construct
MALPVTALLLPLALLLHAARPDIQLTQSPSSLSASVGDRVTITCKASQSVDYDGDSFLNWYQQKPGKAPKLLIYAASNLESGVPSRFSGSGSGTDFTLTISSLQPEDFATYYCQQSNEDPLTFGQGTKVEIKRLETVAAPSVFIFPPSDEQLKSGTASVVCLLNNFYPREAKVQWKVDNALQSGNSQESVTEQDSKDSTYSLSSTLTLSKADYEKHKVYACEVTHQGLSSPVTKSFNRGECRKRRGSGATNFSLLKQAGDVEENPGPTSMDWIWRILFLVGAATGAHSFEEVQLVESGGGLVQPGGSLRLSCAASGYTFTSYWIEWVRQAPGKGLEWIGEILPGGGDTNYNEIFKGRATFSADTSKNTAYLQMNSLRAEDTAVYYCTRRVPIRLDYWGQGTLVTVSSTRASTKGPSVFPLAPCSRSTSESTAALGCLVKDYFPEPVTVSWNSGALTSGVHTFPAVLQSSGLYSLSSVVTVPSSSLGTKTYTCNVDHKPSNTKVDKRVESKYGPPCPPCPAPEFLGGPSVFLFPPKPKDTLMISRTPEVTCVVVDVSQEDPEVQFNWYVDGVEVHNAKTKPREEQFNSTYRVVSVLTVLHQDWLNGKEYKCKVSNKGLPSSIEKTISKAKGQPREPQVYTLPPSQEEMTKNQVSLTCLVKGFYPSDIAVEWESNGQPENNYKTTPPVLDSDGSFFLYSRLTVDKSRWQEGNVFSCSVMHEALHNHYTQKSLSLSPGKRAKRSGSGVKQTLNFDLLKLAGDVESNPGPSRGHMTEYKPTVRLATRDDVPRAVRTLAAAFADYPATRHTVDPDRHIERVTELQELFLTRVGLDIGKVWVADDGAAVAVWTTPESVEAGAVFAEIGPRMAELSGSRLAAQQQMEGLLAPHRPKEPAWFLATVGVSPDHQGKGLGSAVVLPGVEAAERAGVPAFLETSAPRNLPFYERLGFTVTADVEVPEGPRTWCMTRKPGA

SEQ ID NO: 1183 - protein, 969 aa, synthetic construct
MALPVTALLLPLALLLHAARPDIQLTQSPSSLSASVGDRVTITCKASQSVDYEGDSFLNWYQQKPGKAPKLLIYAASNLESGVPSRFSGSGSGTDFTLTISSLQPEDFATYYCQQSNEDPLTFGQGTKVEIKRLETVAAPSVFIFPPSDEQLKSGTASVVCLLNNFYPREAKVQWKVDNALQSGNSQESVTEQDSKDSTYSLSSTLTLSKADYEKHKVYACEVTHQGLSSPVTKSFNRGECRKRRGSGATNFSLLKQAGDVEENPGPTSMDWIWRILFLVGAATGAHSFEEVQLVESGGGLVQPGGSLRLSCAASGYTFSSYWIEWVRQAPGKGLEWIGEILPGGGDTNYNEIFKGRATFSADTSKNTAYLQMNSLRAEDTAVYYCTRRVPIRLDYWGQGTLVTVSSTRASTKGPSVFPLAPCSRSTSESTAALGCLVKDYFPEPVTVSWNSGALTSGVHTFPAVLQSSGLYSLSSVVTVPSSSLGTKTYTCNVDHKPSNTKVDKRVESKYGPPCPPCPAPEFLGGPSVFLFPPKPKDTLMISRTPEVTCVVVDVSQEDPEVQFNWYVDGVEVHNAKTKPREEQFNSTYRVVSVLTVLHQDWLNGKEYKCKVSNKGLPSSIEKTISKAKGQPREPQVYTLPPSQEEMTKNQVSLTCLVKGFYPSDIAVEWESNGQPENNYKTTPPVLDSDGSFFLYSRLTVDKSRWQEGNVFSCSVMHEALHNHYTQKSLSLSPGKRAKRSGSGVKQTLNFDLLKLAGDVESNPGPSRGHMTEYKPTVRLATRDDVPRAVRTLAAAFADYPATRHTVDPDRHIERVTELQELFLTRVGLDIGKVWVADDGAAVAVWTTPESVEAGAVFAEIGPRMAELSGSRLAAQQQMEGLLAPHRPKEPAWFLATVGVSPDHQGKGLGSAVVLPGVEAAERAGVPAFLETSAPRNLPFYERLGFTVTADVEVPEGPRTWCMTRKPGA

SEQ ID NO: 1184 - protein, 969 aa, synthetic construct
MALPVTALLLPLALLLHAARPDDIVMTQSPDSLAVSLGERATINCKASQSVDYDGDSFLNWYQQKPGQPPKLLIYAASNLESGVPSRFSGSGSGTDFTLTISSLQPEDVAVYYCQQSNDDPLTFGQGTKVEIKLETVAAPSVFIFPPSDEQLKSGTASVVCLLNNFYPREAKVQWKVDNALQSGNSQESVTEQDSKDSTYSLSSTLTLSKADYEKHKVYACEVTHQGLSSPVTKSFNRGECRKRRGSGATNFSLLKQAGDVEENPGPTSMDWIWRILFLVGAATGAHSFEEVQLVESGGGLVQPGGSLRLSCAASGYTFTSYWIEWVRQAPGKGLEWIGEILPGGGDTNYNEIFKGRATFSADTSKNTAYLQMNSLRAEDTAVYYCTRRVPIRLDYWGQGTLVTVSSTRASTKGPSVFPLAPCSRSTSESTAALGCLVKDYFPEPVTVSWNSGALTSGVHTFPAVLQSSGLYSLSSVVTVPSSSLGTKTYTCNVDHKPSNTKVDKRVESKYGPPCPPCPAPEFLGGPSVFLFPPKPKDTLMISRTPEVTCVVVDVSQEDPEVQFNWYVDGVEVHNAKTKPREEQFNSTYRVVSVLTVLHQDWLNGKEYKCKVSNKGLPSSIEKTISKAKGQPREPQVYTLPPSQEEMTKNQVSLTCLVKGFYPSDIAVEWESNGQPENNYKTTPPVLDSDGSFFLYSRLTVDKSRWQEGNVFSCSVMHEALHNHYTQKSLSLSPGKRAKRSGSGVKQTLNFDLLKLAGDVESNPGPSRGHMTEYKPTVRLATRDDVPRAVRTLAAAFADYPATRHTVDPDRHIERVTELQELFLTRVGLDIGKVWVADDGAAVAVWTTPESVEAGAVFAEIGPRMAELSGSRLAAQQQMEGLLAPHRPKEPAWFLATVGVSPDHQGKGLGSAVVLPGVEAAERAGVPAFLETSAPRNLPFYERLGFTVTADVEVPEGPRTWCMTRKPGA

SEQ ID NO: 1185 - protein, 965 aa, synthetic construct
MALPVTALLLPLALLLHAARPDIQMTQSPSSLSASVGDRVTITCKSSQSLLDSDGKTYLNWYQQKPGKAPKLLIYLVSKLDSGVPSRFSGSGSGTDFTLTISSLQPEDFATYYCFQGTHFPFTFGQGTKVEIKRLETVAAPSVFIFPPSDEQLKSGTASVVCLLNNFYPREAKVQWKVDNALQSGNSQESVTEQDSKDSTYSLSSTLTLSKADYEKHKVYACEVTHQGLSSPVTKSFNRGECRKRRGSGATNFSLLKQAGDVEENPGPTSMDWIWRILFLVGAATGAHSFEVQLVESGGGLVQPGGSLRLSCAASGYTFSSYWMNWVRQAPGKGLEWVGMIDPSDSETHYNHIFKDRFTISADTSKNTAYLQMNSLRAEDTAVYYCARNLYLWGQGTLVTVSSTRASTKGPSVFPLAPCSRSTSESTAALGCLVKDYFPEPVTVSWNSGALTSGVHTFPAVLQSSGLYSLSSVVTVPSSSLGTKTYTCNVDHKPSNTKVDKRVESKYGPPCPPCPAPEFLGGPSVFLFPPKPKDTLMISRTPEVTCVVVDVSQEDPEVQFNWYVDGVEVHNAKTKPREEQFNSTYRVVSVLTVLHQDWLNGKEYKCKVSNKGLPSSIEKTISKAKGQPREPQVYTLPPSQEEMTKNQVSLTCLVKGFYPSDIAVEWESNGQPENNYKTTPPVLDSDGSFFLYSRLTVDKSRWQEGNVFSCSVMHEALHNHYTQKSLSLSPGKRAKRSGSGVKQTLNFDLLKLAGDVESNPGPSRGHMTEYKPTVRLATRDDVPRAVRTLAAAFADYPATRHTVDPDRHIERVTELQELFLTRVGLDIGKVWVADDGAAVAVWTTPESVEAGAVFAEIGPRMAELSGSRLAAQQQMEGLLAPHRPKEPAWFLATVGVSPDHQGKGLGSAVVLPGVEAAERAGVPAFLETSAPRNLPFYERLGFTVTADVEVPEGPRTWCMTRKPGA

SEQ ID NO: 1186 - protein, 965 aa, synthetic construct
MALPVTALLLPLALLLHAARPDIQMTQSPSSLSASVGDRVTITCKSSQSLLDSDGKTYLNWYQQKPGKAPKLLIYLVSKLDSGVPSRFSGSGSGTDFTLTISSLQPEDFATYYCFQGTHFPFTFGQGTKVEIKRLETVAAPSVFIFPPSDEQLKSGTASVVCLLNNFYPREAKVQWKVDNALQSGNSQESVTEQDSKDSTYSLSSTLTLSKADYEKHKVYACEVTHQGLSSPVTKSFNRGECRKRRGSGATNFSLLKQAGDVEENPGPTSMDWIWRILFLVGAATGAHSFEVQLVESGGGLVQPGGSLRLSCAASGYTFTSYWMNWVRQAPGKGLEWVGMIDPSDSETHYNHIFKDRFTISADTSKNTAYLQMNSLRAEDTAVYYCARNLYLFGQGTLVTVSSTRASTKGPSVFPLAPCSRSTSESTAALGCLVKDYFPEPVTVSWNSGALTSGVHTFPAVLQSSGLYSLSSVVTVPSSSLGTKTYTCNVDHKPSNTKVDKRVESKYGPPCPPCPAPEFLGGPSVFLFPPKPKDTLMISRTPEVTCVVVDVSQEDPEVQFNWYVDGVEVHNAKTKPREEQFNSTYRVVSVLTVLHQDWLNGKEYKCKVSNKGLPSSIEKTISKAKGQPREPQVYTLPPSQEEMTKNQVSLTCLVKGFYPSDIAVEWESNGQPENNYKTTPPVLDSDGSFFLYSRLTVDKSRWQEGNVFSCSVMHEALHNHYTQKSLSLSPGKRAKRSGSGVKQTLNFDLLKLAGDVESNPGPSRGHMTEYKPTVRLATRDDVPRAVRTLAAAFADYPATRHTVDPDRHIERVTELQELFLTRVGLDIGKVWVADDGAAVAVWTTPESVEAGAVFAEIGPRMAELSGSRLAAQQQMEGLLAPHRPKEPAWFLATVGVSPDHQGKGLGSAVVLPGVEAAERAGVPAFLETSAPRNLPFYERLGFTVTADVEVPEGPRTWCMTRKPGA

SEQ ID NO: 1187 - protein, 965 aa, synthetic construct
MALPVTALLLPLALLLHAARPDIQMTQSPSSLSASVGDRVTITCKSSQSLLDSDGKTYLNWYQQKPGKAPKLLIYLVSKLDSGVPSRFSGSGSGTDFTLTISSLQPEDFATYYCFQGTHFPFTFGQGTKVEIKRLETVAAPSVFIFPPSDEQLKSGTASVVCLLNNFYPREAKVQWKVDNALQSGNSQESVTEQDSKDSTYSLSSTLTLSKADYEKHKVYACEVTHQGLSSPVTKSFNRGECRKRRGSGATNFSLLKQAGDVEENPGPTSMDWIWRILFLVGAATGAHSFEVQLVESGGGLVQPGGSLRLSCAASGYTFTNYWMNWVRQAPGKGLEWVGMIDPSDSETHYNHIFKDRFTISADTSKNTAYLQMNSLRAEDTAVYYCARNLYLWGQGTLVTVSSTRASTKGPSVFPLAPCSRSTSESTAALGCLVKDYFPEPVTVSWNSGALTSGVHTFPAVLQSSGLYSLSSVVTVPSSSLGTKTYTCNVDHKPSNTKVDKRVESKYGPPCPPCPAPEFLGGPSVFLFPPKPKDTLMISRTPEVTCVVVDVSQEDPEVQFNWYVDGVEVHNAKTKPREEQFNSTYRVVSVLTVLHQDWLNGKEYKCKVSNKGLPSSIEKTISKAKGQPREPQVYTLPPSQEEMTKNQVSLTCLVKGFYPSDIAVEWESNGQPENNYKTTPPVLDSDGSFFLYSRLTVDKSRWQEGNVFSCSVMHEALHNHYTQKSLSLSPGKRAKRSGSGVKQTLNFDLLKLAGDVESNPGPSRGHMTEYKPTVRLATRDDVPRAVRTLAAAFADYPATRHTVDPDRHIERVTELQELFLTRVGLDIGKVWVADDGAAVAVWTTPESVEAGAVFAEIGPRMAELSGSRLAAQQQMEGLLAPHRPKEPAWFLATVGVSPDHQGKGLGSAVVLPGVEAAERAGVPAFLETSAPRNLPFYERLGFTVTADVEVPEGPRTWCMTRKPGA

SEQ ID NO: 1188 - protein, 964 aa, synthetic construct
MALPVTALLLPLALLLHAARPDIVMTQTPLTLSVTIGQPASISCKSSQSLLDSDGKTYLNWLLQRPGQSPERLIYLVSKLDSGVPDRFTGSGSGTDFTLKISRVEAEDLGVYYCWQGTHFPYTFGGGTKVEIKLETVAAPSVFIFPPSDEQLKSGTASVVCLLNNFYPREAKVQWKVDNALQSGNSQESVTEQDSKDSTYSLSSTLTLSKADYEKHKVYACEVTHQGLSSPVTKSFNRGECRKRRGSGATNFSLLKQAGDVEENPGPTSMDWIWRILFLVGAATGAHSFEVQLVESGGGLVQPGGSLRLSCAASGYTFSSYWMNWVRQAPGKGLEWVGMIDPSDSETHYNHIFKDRFTISADTSKNTAYLQMNSLRAEDTAVYYCARNLYLWGQGTLVTVSSTRASTKGPSVFPLAPCSRSTSESTAALGCLVKDYFPEPVTVSWNSGALTSGVHTFPAVLQSSGLYSLSSVVTVPSSSLGTKTYTCNVDHKPSNTKVDKRVESKYGPPCPPCPAPEFLGGPSVFLFPPKPKDTLMISRTPEVTCVVVDVSQEDPEVQFNWYVDGVEVHNAKTKPREEQFNSTYRVVSVLTVLHQDWLNGKEYKCKVSNKGLPSSIEKTISKAKGQPREPQVYTLPPSQEEMTKNQVSLTCLVKGFYPSDIAVEWESNGQPENNYKTTPPVLDSDGSFFLYSRLTVDKSRWQEGNVFSCSVMHEALHNHYTQKSLSLSPGKRAKRSGSGVKQTLNFDLLKLAGDVESNPGPSRGHMTEYKPTVRLATRDDVPRAVRTLAAAFADYPATRHTVDPDRHIERVTELQELFLTRVGLDIGKVWVADDGAAVAVWTTPESVEAGAVFAEIGPRMAELSGSRLAAQQQMEGLLAPHRPKEPAWFLATVGVSPDHQGKGLGSAVVLPGVEAAERAGVPAFLETSAPRNLPFYERLGFTVTADVEVPEGPRTWCMTRKPGA

SEQ ID NO: 1189 - protein, 964 aa, synthetic construct
MALPVTALLLPLALLLHAARPDIVMTQTPLTLSVTIGQPASISCKSSQSLLDSDGKTYLNWLLQRPGQSPERLIYLVSKLDSGVPDRFTGSGSGTDFTLKISRVEAEDLGVYYCWQGTHFPYTFGGGTKVEIKLETVAAPSVFIFPPSDEQLKSGTASVVCLLNNFYPREAKVQWKVDNALQSGNSQESVTEQDSKDSTYSLSSTLTLSKADYEKHKVYACEVTHQGLSSPVTKSFNRGECRKRRGSGATNFSLLKQAGDVEENPGPTSMDWIWRILFLVGAATGAHSFEVQLVESGGGLVQPGGSLRLSCAASGYTFTSYWMNWVRQAPGKGLEWVGMIDPSDSETHYNHIFKDRFTISADTSKNTAYLQMNSLRAEDTAVYYCARNLYLFGQGTLVTVSSTRASTKGPSVFPLAPCSRSTSESTAALGCLVKDYFPEPVTVSWNSGALTSGVHTFPAVLQSSGLYSLSSVVTVPSSSLGTKTYTCNVDHKPSNTKVDKRVESKYGPPCPPCPAPEFLGGPSVFLFPPKPKDTLMISRTPEVTCVVVDVSQEDPEVQFNWYVDGVEVHNAKTKPREEQFNSTYRVVSVLTVLHQDWLNGKEYKCKVSNKGLPSSIEKTISKAKGQPREPQVYTLPPSQEEMTKNQVSLTCLVKGFYPSDIAVEWESNGQPENNYKTTPPVLDSDGSFFLYSRLTVDKSRWQEGNVFSCSVMHEALHNHYTQKSLSLSPGKRAKRSGSGVKQTLNFDLLKLAGDVESNPGPSRGHMTEYKPTVRLATRDDVPRAVRTLAAAFADYPATRHTVDPDRHIERVTELQELFLTRVGLDIGKVWVADDGAAVAVWTTPESVEAGAVFAEIGPRMAELSGSRLAAQQQMEGLLAPHRPKEPAWFLATVGVSPDHQGKGLGSAVVLPGVEAAERAGVPAFLETSAPRNLPFYERLGFTVTADVEVPEGPRTWCMTRKPGA

SEQ ID NO: 1190 - protein, 964 aa, synthetic construct
MALPVTALLLPLALLLHAARPDIVMTQTPLTLSVTIGQPASISCKSSQSLLDSDGKTYLNWLLQRPGQSPERLIYLVSKLDSGVPDRFTGSGSGTDFTLKISRVEAEDLGVYYCWQGTHFPYTFGGGTKVEIKLETVAAPSVFIFPPSDEQLKSGTASVVCLLNNFYPREAKVQWKVDNALQSGNSQESVTEQDSKDSTYSLSSTLTLSKADYEKHKVYACEVTHQGLSSPVTKSFNRGECRKRRGSGATNFSLLKQAGDVEENPGPTSMDWIWRILFLVGAATGAHSFEVQLVESGGGLVQPGGSLRLSCAASGYTFTNYWMNWVRQAPGKGLEWVGMIDPSDSETHYNHIFKDRFTISADTSKNTAYLQMNSLRAEDTAVYYCARNLYLWGQGTLVTVSSTRASTKGPSVFPLAPCSRSTSESTAALGCLVKDYFPEPVTVSWNSGALTSGVHTFPAVLQSSGLYSLSSVVTVPSSSLGTKTYTCNVDHKPSNTKVDKRVESKYGPPCPPCPAPEFLGGPSVFLFPPKPKDTLMISRTPEVTCVVVDVSQEDPEVQFNWYVDGVEVHNAKTKPREEQFNSTYRVVSVLTVLHQDWLNGKEYKCKVSNKGLPSSIEKTISKAKGQPREPQVYTLPPSQEEMTKNQVSLTCLVKGFYPSDIAVEWESNGQPENNYKTTPPVLDSDGSFFLYSRLTVDKSRWQEGNVFSCSVMHEALHNHYTQKSLSLSPGKRAKRSGSGVKQTLNFDLLKLAGDVESNPGPSRGHMTEYKPTVRLATRDDVPRAVRTLAAAFADYPATRHTVDPDRHIERVTELQELFLTRVGLDIGKVWVADDGAAVAVWTTPESVEAGAVFAEIGPRMAELSGSRLAAQQQMEGLLAPHRPKEPAWFLATVGVSPDHQGKGLGSAVVLPGVEAAERAGVPAFLETSAPRNLPFYERLGFTVTADVEVPEGPRTWCMTRKPGA

SEQ ID NO: 1191 - protein, 971 aa, synthetic construct
MALPVTALLLPLALLLHAARPDDFVMTQTPLSLPVTPGEPASISCRSSQSIVHHDGNTYLEWYLQKPGQSPKLLIYKVSNRFSGVPDRFSGSGSGTDFTLKISRVEAEDVGVYYCFQGSHVPWTFGGGTKVEIKRLETVAAPSVFIFPPSDEQLKSGTASVVCLLNNFYPREAKVQWKVDNALQSGNSQESVTEQDSKDSTYSLSSTLTLSKADYEKHKVYACEVTHQGLSSPVTKSFNRGECRKRRGSGATNFSLLKQAGDVEENPGPTSMDWIWRILFLVGAATGAHSFEEVQLVQSGAEVKKPGSSVKVSCKASGGSFSSYGINWVKQAPGQGLEWIGEIFPRSGNTYYNEKFEGRATLTADKSTSTAYMELRSLRSEDTAVYYCAKGDLGDFDYWGQGTTVTVSSTRASTKGPSVFPLAPCSRSTSESTAALGCLVKDYFPEPVTVSWNSGALTSGVHTFPAVLQSSGLYSLSSVVTVPSSSLGTKTYTCNVDHKPSNTKVDKRVESKYGPPCPPCPAPEFLGGPSVFLFPPKPKDTLMISRTPEVTCVVVDVSQEDPEVQFNWYVDGVEVHNAKTKPREEQFNSTYRVVSVLTVLHQDWLNGKEYKCKVSNKGLPSSIEKTISKAKGQPREPQVYTLPPSQEEMTKNQVSLTCLVKGFYPSDIAVEWESNGQPENNYKTTPPVLDSDGSFFLYSRLTVDKSRWQEGNVFSCSVMHEALHNHYTQKSLSLSPGKRAKRSGSGVKQTLNFDLLKLAGDVESNPGPSRGHMTEYKPTVRLATRDDVPRAVRTLAAAFADYPATRHTVDPDRHIERVTELQELFLTRVGLDIGKVWVADDGAAVAVWTTPESVEAGAVFAEIGPRMAELSGSRLAAQQQMEGLLAPHRPKEPAWFLATVGVSPDHQGKGLGSAVVLPGVEAAERAGVPAFLETSAPRNLPFYERLGFTVTADVEVPEGPRTWCMTRKPGA

SEQ ID NO: 1192 - protein, 972 aa, synthetic construct
MALPVTALLLPLALLLHAARPDDVVMTQTPLSLPVTPGEPASISCRSSQSIVHSDGNTYFEWYLQKPGQSPQLLIYKVSNRFSGVPDRFSGSGSGTDFTLKISRVEAEDVGVYYCFQGSHVPWTFGGGTKVEIKRLETVAAPSVFIFPPSDEQLKSGTASVVCLLNNFYPREAKVQWKVDNALQSGNSQESVTEQDSKDSTYSLSSTLTLSKADYEKHKVYACEVTHQGLSSPVTKSFNRGECRKRRGSGATNFSLLKQAGDVEENPGPTSMDWIWRILFLVGAATGAHSFEVQLVQSGAEVKKPGASVKVSCKASGYTFTSYGINWVKQAPGQGLEWIGEIYPRSGNIYYNEKFKGKATLTADKSTSTAYMELRSLRSDDTAVYYCARGSDYDGDFAYWGQGTLVTVSSTRASTKGPSVFPLAPCSRSTSESTAALGCLVKDYFPEPVTVSWNSGALTSGVHTFPAVLQSSGLYSLSSVVTVPSSSLGTKTYTCNVDHKPSNTKVDKRVESKYGPPCPPCPAPEFLGGPSVFLFPPKPKDTLMISRTPEVTCVVVDVSQEDPEVQFNWYVDGVEVHNAKTKPREEQFNSTYRVVSVLTVLHQDWLNGKEYKCKVSNKGLPSSIEKTISKAKGQPREPQVYTLPPSQEEMTKNQVSLTCLVKGFYPSDIAVEWESNGQPENNYKTTPPVLDSDGSFFLYSRLTVDKSRWQEGNVFSCSVMHEALHNHYTQKSLSLSPGKRAKRSGSGVKQTLNFDLLKLAGDVESNPGPSRGHMTEYKPTVRLATRDDVPRAVRTLAAAFADYPATRHTVDPDRHIERVTELQELFLTRVGLDIGKVWVADDGAAVAVWTTPESVEAGAVFAEIGPRMAELSGSRLAAQQQMEGLLAPHRPKEPAWFLATVGVSPDHQGKGLGSAVVLPGVEAAERAGVPAFLETSAPRNLPFYERLGFTVTADVEVPEGPRTWCMTRKPGA

SEQ ID NO: 1193 - protein, 963 aa, synthetic construct
MALPVTALLLPLALLLHAARPDIVLTQSPPSLAVSLGQRATISCRASESVDSYGKTFMHWHQQKPGQPPKLLIYRVSNLESGIPARFSGSGSRTDFTLTINPVEADDVATYYCQQSNEDPFTFGGGTKLEIKRLETVAAPSVFIFPPSDEQLKSGTASVVCLLNNFYPREAKVQWKVDNALQSGNSQESVTEQDSKDSTYSLSSTLTLSKADYEKHKVYACEVTHQGLSSPVTKSFNRGECRKRRGSGATNFSLLKQAGDVEENPGPTSMDWIWRILFLVGAATGAHSFEVQLQESGPGLVKPSQSLSLTCTVTGYSITSDYAWNWIRQFPGNKLEWMGNIWYSGSTTYNPSLKSRISITRDTSKNQFFLQLNSVTSEDTATYYCSRMDFWGQGTTLTVSSTRASTKGPSVFPLAPCSRSTSESTAALGCLVKDYFPEPVTVSWNSGALTSGVHTFPAVLQSSGLYSLSSVVTVPSSSLGTKTYTCNVDHKPSNTKVDKRVESKYGPPCPPCPAPEFLGGPSVFLFPPKPKDTLMISRTPEVTCVVVDVSQEDPEVQFNWYVDGVEVHNAKTKPREEQFNSTYRVVSVLTVLHQDWLNGKEYKCKVSNKGLPSSIEKTISKAKGQPREPQVYTLPPSQEEMTKNQVSLTCLVKGFYPSDIAVEWESNGQPENNYKTTPPVLDSDGSFFLYSRLTVDKSRWQEGNVFSCSVMHEALHNHYTQKSLSLSPGKRAKRSGSGVKQTLNFDLLKLAGDVESNPGPSRGHMTEYKPTVRLATRDDVPRAVRTLAAAFADYPATRHTVDPDRHIERVTELQELFLTRVGLDIGKVWVADDGAAVAVWTTPESVEAGAVFAEIGPRMAELSGSRLAAQQQMEGLLAPHRPKEPAWFLATVGVSPDHQGKGLGSAVVLPGVEAAERAGVPAFLETSAPRNLPFYERLGFTVTADVEVPEGPRTWCMTRKPGA

SEQ ID NO: 1194 - protein, 447 aa, synthetic construct
EVQLVESGGGLVQPGGSLRLSCAASGYTFSSYWIEWVRQAPGKGLEWIGEILPGGGDTNYNEIFKGRATFSADTSKNTAYLQMNSLRAEDTAVYYCTRRVPIRLDYWGQGTLVTVSSASTKGPSVFPLAPSSKSTSGGTAALGCLVKDYFPEPVTVSWNSGALTSGVHTFPAVLQSSGLYSLSSVVTVPSSSLGTQTYICNVNHKPSNTKVDKKVEPKSCDKTHTCPPCPAPELLGGPSVFLFPPKPKDTLMISRTPEVTCVVVDVSHEDPEVKFNWYVDGVEVHNAKTKPREEQYNSTYRVVSVLTVLHQDWLNGKEYKCKVSNKALPAPIEKTISKAKGQPREPQVYTLPPSREEMTKNQVSLTCLVKGFYPSDIAVEWESNGQPENNYKTTPPVLDSDGSFFLYSKLTVDKSRWQQGNVFSCSVMHEALHNHYTQKSLSLSPGK

SEQ ID NO: 1195 - protein, 218 aa, synthetic construct
DIQLTQSPSSLSASVGDRVTITCKASQSVDYEGDSFLNWYQQKPGKAPKLLIYAASNLESGVPSRFSGSGSGTDFTLTISSLQPEDFATYYCQQSNEDPLTFGQGTKVEIKRTVAAPSVFIFPPSDEQLKSGTASVVCLLNNFYPREAKVQWKVDNALQSGNSQESVTEQDSKDSTYSLSSTLTLSKADYEKHKVYACEVTHQGLSSPVTKSFNRGEC

SEQ ID NO: 1196 - protein, 5 aa, synthetic construct
GGGGG

SEQ ID NO: 1197 - protein, 5 aa, synthetic construct
GGGGG

SEQ ID NO: 1198 - protein, 732 aa, synthetic construct
MALPVTALLLPLALLLHAARPDIQLTQSPSSLSASVGDRVTITCKASQSVDYEGDSFLNWYQQKPGKAPKLLIYAASNLESGVPSRFSGSGSGTDFTLTISSLQPEDFATYYCQQSNEDPLTFGQGTKVEIKRGGGGSGGGGSGGGGSEVQLVESGGGLVQPGGSLRLSCAASGYTFSSYWIEWVRQAPGKGLEWIGEILPGGGDTNYNEIFKGRATFSADTSKNTAYLQMNSLRAEDTAVYYCTRRVPIRLDYWGQGTLVTVSSTRGGSGVFTLEDFVGDWRQTAGYNLDQVLEQGGVSSLFQNLGVSVTPIQRIVLSGENGLKIDIHVIIPYEGLSGDQMGQIEKIFKVVYPVDDHHFKVILHYGTLVIDGVTPNMIDYFGRPYEGIAVFDGKKITVTGTLWNGNKIIDERLINPDGSLLFRVTINGVTGWRLCERILALEGGSWSHPQFEKDYKDDDDKGSDYKDDDDKGSDYKDDDDKGSDYKDDDDKAWSHPQFEKHHHHHHHHTSGSGEGRGSLLTCGDVEENPGPHMTEYKPTVRLATRDDVPRAVRTLAAAFADYPATRHTVDPDRHIERVTELQELFLTRVGLDIGKVWVADDGAAVAVWTTPESVEAGAVFAEIGPRMAELSGSRLAAQQQMEGLLAPHRPKEPAWFLATVGVSPDHQGKGLGSAVVLPGVEAAERAGVPAFLETSAPRNLPFYERLGFTVTADVEVPEGPRTWCMTRKPGA

SEQ ID NO: 1199 - protein, 732 aa, synthetic construct
MALPVTALLLPLALLLHAARPDIQLTQSPSSLSASVGDRVTITCKASQSVDYDGDSFLNWYQQKPGKAPKLLIYAASNLESGVPSRFSGSGSGTDFTLTISSLQPEDFATYYCQQSNEDPLTFGQGTKVEIKRGGGGSGGGGSGGGGSEVQLVESGGGLVQPGGSLRLSCAASGYTFTSYWIEWVRQAPGKGLEWIGEILPGGGDTNYNEIFKGRATFSADTSKNTAYLQMNSLRAEDTAVYYCTRRVPIRLDYWGQGTLVTVSSTRGGSGVFTLEDFVGDWRQTAGYNLDQVLEQGGVSSLFQNLGVSVTPIQRIVLSGENGLKIDIHVIIPYEGLSGDQMGQIEKIFKVVYPVDDHHFKVILHYGTLVIDGVTPNMIDYFGRPYEGIAVFDGKKITVTGTLWNGNKIIDERLINPDGSLLFRVTINGVTGWRLCERILALEGGSWSHPQFEKDYKDDDDKGSDYKDDDDKGSDYKDDDDKGSDYKDDDDKAWSHPQFEKHHHHHHHHTSGSGEGRGSLLTCGDVEENPGPHMTEYKPTVRLATRDDVPRAVRTLAAAFADYPATRHTVDPDRHIERVTELQELFLTRVGLDIGKVWVADDGAAVAVWTTPESVEAGAVFAEIGPRMAELSGSRLAAQQQMEGLLAPHRPKEPAWFLATVGVSPDHQGKGLGSAVVLPGVEAAERAGVPAFLETSAPRNLPFYERLGFTVTADVEVPEGPRTWCMTRKPGA

SEQ ID NO: 1200 - protein, 736 aa, synthetic construct
MALPVTALLLPLALLLHAARPDIQMTQSPSSLSASVGDRVTITCKSSQSLLDSDGKTYLNWYQQKPGKAPKLLIYLVSKLDSGVPSRFSGSGSGTDFTLTISSLQPEDFATYYCFQGTHFPFTFGQGTKVEIKRGGGGSGGGSGGGGSEVQLVESGGGLVQPGGSLRLSCAASGYTFSSYWMNWVRQAPGKGLEWVGMIDPSDSETHYNHIFKDRFTISADTSKNTAYLQMNSLRAEDTAVYYCARNLYLWGQGTLVTVSSTRPRLCLLTRGGSGVFTLEDFVGDWRQTAGYNLDQVLEQGGVSSLFQNLGVSVTPIQRIVLSGENGLKIDIHVIIPYEGLSGDQMGQIEKIFKVVYPVDDHHFKVILHYGTLVIDGVTPNMIDYFGRPYEGIAVFDGKKITVTGTLWNGNKIIDERLINPDGSLLFRVTINGVTGWRLCERILALEGGSWSHPQFEKDYKDDDDKGSDYKDDDDKGSDYKDDDDKGSDYKDDDDKAWSHPQFEKHHHHHHHHTSGSGEGRGSLLTCGDVEENPGPHMTEYKPTVRLATRDDVPRAVRTLAAAFADYPATRHTVDPDRHIERVTELQELFLTRVGLDIGKVWVADDGAAVAVWTTPESVEAGAVFAEIGPRMAELSGSRLAAQQQMEGLLAPHRPKEPAWFLATVGVSPDHQGKGLGSAVVLPGVEAAERAGVPAFLETSAPRNLPFYERLGFTVTADVEVPEGPRTWCMTRKPGA

SEQ ID NO: 1201 - protein, 619 aa, synthetic construct
MALPVTALLLPLALLLHAARPDARSEDRYRNPKGSACSRIWQSPRFIARKRGFTVKMHCYMNSASGNVSWLWKQEMDENPQQLKLEKGRMEESQNESLATLTIQGIRFEDNGIYFCQQKCNNTSEVYQGCGTELRVMGFSTLAQLKQRNTLKTRGGSGVFTLEDFVGDWRQTAGYNLDQVLEQGGVSSLFQNLGVSVTPIQRIVLSGENGLKIDIHVIIPYEGLSGDQMGQIEKIFKVVYPVDDHHFKVILHYGTLVIDGVTPNMIDYFGRPYEGIAVFDGKKITVTGTLWNGNKIIDERLINPDGSLLFRVTINGVTGWRLCERILALEGGSWSHPQFEKDYKDDDDKGSDYKDDDDKGSDYKDDDDKGSDYKDDDDKAWSHPQFEKHHHHHHHHTSGSGEGRGSLLTCGDVEENPGPHMTEYKPTVRLATRDDVPRAVRTLAAAFADYPATRHTVDPDRHIERVTELQELFLTRVGLDIGKVWVADDGAAVAVWTTPESVEAGAVFAEIGPRMAELSGSRLAAQQQMEGLLAPHRPKEPAWFLATVGVSPDHQGKGLGSAVVLPGVEAAERAGVPAFLETSAPRNLPFYERLGFTVTADVEVPEGPRTWCMTRKPGA

SEQ ID NO: 1202 - protein, 18 aa, synthetic construct
EEEEEEGGSGGGRSPLAL

SEQ ID NO: 1203 - protein, 4 aa, synthetic construct
EEEE

SEQ ID NO: 1204 - protein, 6 aa, synthetic construct
RSPLAL

SEQ ID NO: 1205 - protein, 6 aa, synthetic construct
HSSKLQ

SEQ ID NO: 1206 - protein, 7 aa, synthetic construct
ENLYFQG

SEQ ID NO: 1207 - protein, 10 aa, synthetic construct
GGGGSGGGGS

SEQ ID NO: 1208 - protein, 5 aa, synthetic construct
EAAAK

SEQ ID NO: 1209 - protein, 9 aa, synthetic construct
HMTEVVRRC

SEQ ID NO: 1210 - protein, 563 aa, synthetic construct
MGFTTKIIFLYNLVLVYAGFDDPRKAIELVQKRYGRPCDCSGGQVSEPPSDRVSQVTCSGKTAYLMPDQRWKCKSIPKDTSPSGPLQECPCNSYQSSVHSSCYTSYQQCRSGNKTYYTATLLKTQTGGTSDVQVLGSTNKLIQSPCNGIKGQSICWSTTAPIHVSDGGGPLDTTRIKSVQRKLEEIHKALYPELQYHPLAIPKVRDNLMVDAQTLNILNATYNLLLMSNTSLVDDCWLCLKLGPPTPLAIPNFLLSYVTRSSDNISCLIIPPLLVQPMQFSNSSCLFSPSYNSTEEIDLGHVAFSNCTSITNVTGPICAVNGSVFLCGNNMAYTYLPTNWTGLCVLATLLPDIDIIPGDEPVPIPAIDHFIYRPKRAIQFIPLLAGLGITAAFTTGATGLGVSVTQYTKLSNQLISDVQILSSTIQDLQDQVDSLAEVVLQNRRGLDLLTAEQGGICLALQEKCCFYVNKSGIVRDKIKTLQEELERRRKDLASNPLWTGLQGLLPYLLPFLGPLLTLLLLLTIGPCIFNRLTAFINDKLNIIHAMVLTQQYQVLRTDEEAQD

SEQ ID NO: 1211 - protein, 546 aa, synthetic construct
MGFTTKIIFLYNLVLVYAGFDDPRKAIELVQKRYGRPCDCSGGQVSEPPSDRVSQVTCSGKTAYLMPDQRWKCKSIPKDTSPSGPLQECPCNSYQSSVHSSCYTSYQQCRSGNKTYYTATLLKTQTGGTSDVQVLGSTNKLIQSPCNGIKGQSICWSTTAPIHVSDGGGPLDTTRIKSVQRKLEEIHKALYPELQYHPLAIPKVRDNLMVDAQTLNILNATYNLLLMSNTSLVDDCWLCLKLGPPTPLAIPNFLLSYVTRSSDNISCLIIPPLLVQPMQFSNSSCLFSPSYNSTEEIDLGHVAFSNCTSITNVTGPICAVNGSVFLCGNNMAYTYLPTNWTGLCVLATLLPDIDIIPGDEPVPIPAIDHFIYRPKRAIQFIPLLAGLGITAAFTTGATGLGVSVTQYTKLSNQLISDVQILSSTIQDLQDQVDSLAEVVLQNRRGLDLLTAEQGGICLALQEKCCFYVNKSGIVRDKIKTLQEELERRRKDLASNPLWTGLQGLLPYLLPFLGPLLTLLLLLTIGPCIFNRLTAFINDKLNIIHAM

SEQ ID NO: 1212 - protein, 562 aa, synthetic construct
MGFTTKIIFLYNLVLVYAGFDDPRKAIELVQKRYGRPCDCSGGQVSEPPSDRVSQVTCSGKTAYLMPDQRWKCKSIPKDTSPSGPLQECPCNSYQSSVHSSCYTSYQQCRSGNKTYYTATLLKTQTGGTSDVQVLGSTNKLIQSPCNGIKGQSICWSTTAPIHVSDGGGPLDTTRIKSVQRKLEEIHKALYPELQYHPLAIPKVRDNLMVDAQTLNILNATYNLLLMSNTSLVDDCWLCLKLGPPTPLAIPNFLLSYVTRSSDNISCLIIPPLLVQPMQFSNSSCLFSPSYNSTEEIDLGHVAFSNCTSITNVTGPICAVNGSVFLCGNNMAYTYLPTNWTGLCVLATLLPDIDIIPGDEPVPIPAIDHFIYRPKRAIQFIPLLAGLGITAAFTTGATGLGVSVTQYTKLSNQLISDVQILSSTIQDLQDQVDSLAEVVLQNRRGLDLLTAEQGGICLALQEKCCFYVNKSGIVRDKIKTLQEELERRRKDLASNPLWTGLQGLLPYLLPFLGPLLTLLLLLTIGPCIFNRLVQFVKDRISVVQALVLTQQYHQLKPLEYEP

SEQ ID NO: 1213 - protein, 563 aa, synthetic construct; identical to SEQ ID NO: 1210

SEQ ID NO: 1214 - protein, 563 aa, synthetic construct; identical to SEQ ID NO: 1210

SEQ ID NO: 1215 - protein, 538 aa, synthetic construct
MALPYHIFLFTVLLPSFTLTAPPPCRCMTSSSPYQEFLWRMQRPGNIDAPSYRSLSKGTPTFTAHTHMPRNCYHSATLCMHANTHYWTGKMINPSCPGGLGVTVCWTYFTQTGMSDGGGVQDQAREKHVKEVISQLTRVHGTSSPYKGLDLSKLHETLRTHTRLVSLFNTTLTGLHEVSAQNPTNCWICLPLNFRPYVSIPVPEQWNNFSTEINTTSVLVGPLVSNLEITHTSNLTCVKFSNTTYTTNSQCIRWVTPPTQIVCLPSGIFFVCGTSAYRCLNGSSESMCFLSFLVPPMTIYTEQDLYSYVISKPRNKRVPILPFVIGAGVLGALGTGIGGITTSTQFYYKLSQELNGDMERVADSLVTLQDQLNSLAAVVLQNRRALDLLTAERGGTCLFLGEECCYYVNQSGIVTEKVKEIRDRIQRRAEELRNTGPWGLLSQWMPWILPFLGPLAAIILLLLFGPCIFNLLVNFVSSRIEAVKLQMEPKMQSKTKIYRRPLDRPASPRSDVNDIKGTPPEEISAAQPLLRPNSAGSS

SEQ ID NO: 1216 - protein, 538 aa, synthetic construct
MGLLLLVLILTPSLAAYRHPDFPLLEKAQQLLQSTGSPYSTNCWLCTSSSTETPGTAYPASPREWTSIEAELHISYRWDPNLKGLMRPANSLLSTVKQDFPDIRQKPPIFGPIFTNINLMGIAPICVMAKRKNGTNVGTLPSTVCNVTFTVDSNQQTYQTYTHNQFRHQPRFPKPPNITFPQGTLLDKSSRFCQGRPSSCSTRNFWFRPADYNQCLQISNLSSTAEWVLLDQTRNSLFWENKTKGANQSQTPCVQVLAGMTIATSYLGISAVSEFFGTSLTPLFHFHISTCLKTQGAFYICGQSIHQCLPSNWTGTCTIGYVTPDIFIAPGNLSLPIPIYGNSPLPRVRRAIHFIPLLAGLGILAGTGTGIAGITKASLTYSQLSKEIANNIDTMAKALTTMQEQIDSLAAVVLQNRRGLDMLTAAQGGICLALDEKCCFWVNQSGKVQDNIRQLLNQASSLRERATQGWLNWEGTWKWFSWVLPLTGPLVSLLLLLLFGPCLLNLITQFVSSRLQAIKLQTNLSAGRHPRNIQESPF

SEQ ID NO: 1217 - protein, 539 aa, synthetic construct
METDTLLLWVLLLWVPGSTGDAPPPCRCMTSSSPYQEFLWRMQRPGNIDAPSYRSLSKGTPTFTAHTHMPRNCYHSATLCMHANTHYWTGKMINPSCPGGLGVTVCWTYFTQTGMSDGGGVQDQAREKHVKEVISQLTRVHGTSSPYKGLDLSKLHETLRTHTRLVSLFNTTLTGLHEVSAQNPTNCWICLPLNFRPYVSIPVPEQWNNFSTEINTTSVLVGPLVSNLEITHTSNLTCVKFSNTTYTTNSQCIRWVTPPTQIVCLPSGIFFVCGTSAYRCLNGSSESMCFLSFLVPPMTIYTEQDLYSYVISKPRNKRVPILPFVIGAGVLGALGTGIGGITTSTQFYYKLSQELNGDMERVADSLVTLQDQLNSLAAVVLQNRRALDLLTAERGGTCLFLGEECCYYVNQSGIVTEKVKEIRDRIQRRAEELRNTGPWGLLSQWMPWILPFLGPLAAIILLLLFGPCIFNLLVNFVSSRIEAVKLQMEPKMQSKTKIYRRPLDRPASPRSDVNDIKGTPPEEISAAQPLLRPNSAGSS

SEQ ID NO: 1218 - protein, 562 aa, synthetic construct; identical to SEQ ID NO: 1212

SEQ ID NO: 1219 - protein, 30 aa, synthetic construct
VQFVKDRISVVQALVLTQQYHQLKPLEYEP

SEQ ID NO: 1220 - protein, 18 aa, synthetic construct
MGFTTKIIFLYNLVLVYA

SEQ ID NO: 1221 - protein, 545 aa, synthetic construct
GFDDPRKAIELVQKRYGRPCDCSGGQVSEPPSDRVSQVTCSGKTAYLMPDQRWKCKSIPKDTSPSGPLQECPCNSYQSSVHSSCYTSYQQCRSGNKTYYTATLLKTQTGGTSDVQVLGSTNKLIQSPCNGIKGQSICWSTTAPIHVSDGGGPLDTTRIKSVQRKLEEIHKALYPELQYHPLAIPKVRDNLMVDAQTLNILNATYNLLLMSNTSLVDDCWLCLKLGPPTPLAIPNFLLSYVTRSSDNISCLIIPPLLVQPMQFSNSSCLFSPSYNSTEEIDLGHVAFSNCTSITNVTGPICAVNGSVFLCGNNMAYTYLPTNWTGLCVLATLLPDIDIIPGDEPVPIPAIDHFIYRPKRAIQFIPLLAGLGITAAFTTGATGLGVSVTQYTKLSNQLISDVQILSSTIQDLQDQVDSLAEVVLQNRRGLDLLTAEQGGICLALQEKCCFYVNKSGIVRDKIKTLQEELERRRKDLASNPLWTGLQGLLPYLLPFLGPLLTLLLLLTIGPCIFNRLTAFINDKLNIIHAMVLTQQYQVLRTDEEAQD

SEQ ID NO: 1222 - protein, 485 aa, synthetic construct
GFDDPRKAIELVQKRYGRPCDCSGGQVSEPPSDRVSQVTCSGKTAYLMPDQRWKCKSIPKDTSPSGPLQECPCNSYQSSVHSSCYTSYQQCRSGNKTYYTATLLKTQTGGTSDVQVLGSTNKLIQSPCNGIKGQSICWSTTAPIHVSDGGGPLDTTRIKSVQRKLEEIHKALYPELQYHPLAIPKVRDNLMVDAQTLNILNATYNLLLMSNTSLVDDCWLCLKLGPPTPLAIPNFLLSYVTRSSDNISCLIIPPLLVQPMQFSNSSCLFSPSYNSTEEIDLGHVAFSNCTSITNVTGPICAVNGSVFLCGNNMAYTYLPTNWTGLCVLATLLPDIDIIPGDEPVPIPAIDHFIYRPKRAIQFIPLLAGLGITAAFTTGATGLGVSVTQYTKLSNQLISDVQILSSTIQDLQDQVDSLAEVVLQNRRGLDLLTAEQGGICLALQEKCCFYVNKSGIVRDKIKTLQEELERRRKDLASNPLWTGLQG

SEQ ID NO: 1223 - protein, 21 aa, synthetic construct
LLPYLLPFLGPLLTLLLLLTI

SEQ ID NO: 1224 - protein, 39 aa, synthetic construct
GPCIFNRLTAFINDKLNIIHAMVLTQQYQVLRTDEEAQD

SEQ ID NO: 1225 - protein, 524 aa, synthetic construct
MGFTTKIIFLYNLVLVYAGFDDPRKAIELVQKRYGRPCDCSGGQVSEPPSDRVSQVTCSGKTAYLMPDQRWKCKSIPKDTSPSGPLQECPCNSYQSSVHSSCYTSYQQCRSGNKTYYTATLLKTQTGGTSDVQVLGSTNKLIQSPCNGIKGQSICWSTTAPIHVSDGGGPLDTTRIKSVQRKLEEIHKALYPELQYHPLAIPKVRDNLMVDAQTLNILNATYNLLLMSNTSLVDDCWLCLKLGPPTPLAIPNFLLSYVTRSSDNISCLIIPPLLVQPMQFSNSSCLFSPSYNSTEEIDLGHVAFSNCTSITNVTGPICAVNGSVFLCGNNMAYTYLPTNWTGLCVLATLLPDIDIIPGDEPVPIPAIDHFIYRPKRAIQFIPLLAGLGITAAFTTGATGLGVSVTQYTKLSNQLISDVQILSSTIQDLQDQVDSLAEVVLQNRRGLDLLTAEQGGICLALQEKCCFYVNKSGIVRDKIKTLQEELERRRKDLASNPLWTGLQGLLPYLLPFLGPLLTLLLLLTI

SEQ ID NO: 1226 - protein, 22 aa, synthetic construct
GPCIFNRLTAFINDKLNIIHAM

SEQ ID NO: 1227 - protein, 546 aa, synthetic construct; identical to SEQ ID NO: 1211

SEQ ID NO: 1228 - protein, 17 aa, synthetic construct
VLTQQYQVLRTDEEAQD

SEQ ID NO: 1229 - protein, 17 aa, synthetic construct
VLTQQYQVLRTDEEAQD

SEQ ID NO: 1230 - protein, 547 aa, synthetic construct
MGFTTKIIFLYNLVLVYAGFDDPRKAIELVQKRYGRPCDCSGGQVSEPPSDRVSQVTCSGKTAYLMPDQRWKCKSIPKDTSPSGPLQECPCNSYQSSVHSSCYTSYQQCRSGNKTYYTATLLKTQTGGTSDVQVLGSTNKLIQSPCNGIKGQSICWSTTAPIHVSDGGGPLDTTRIKSVQRKLEEIHKALYPELQYHPLAIPKVRDNLMVDAQTLNILNATYNLLLMSNTSLVDDCWLCLKLGPPTPLAIPNFLLSYVTRSSDNISCLIIPPLLVQPMQFSNSSCLFSPSYNSTEEIDLGHVAFSNCTSITNVTGPICAVNGSVFLCGNNMAYTYLPTNWTGLCVLATLLPDIDIIPGDEPVPIPAIDHFIYRPKRAIQFIPLLAGLGITAAFTTGATGLGVSVTQYTKLSNQLISDVQILSSTIQDLQDQVDSLAEVVLQNRRGLDLLTAEQGGICLALQEKCCFYVNKSGIVRDKIKTLQEELERRRKDLASNPLWTGLQGLLPYLLPFLGPLLTLLLLLTIGPCIFNRLTAFINDKLNIIHAMV

SEQ ID NO: 1231 - protein, 548 aa, synthetic construct
MGFTTKIIFLYNLVLVYAGFDDPRKAIELVQKRYGRPCDCSGGQVSEPPSDRVSQVTCSGKTAYLMPDQRWKCKSIPKDTSPSGPLQECPCNSYQSSVHSSCYTSYQQCRSGNKTYYTATLLKTQTGGTSDVQVLGSTNKLIQSPCNGIKGQSICWSTTAPIHVSDGGGPLDTTRIKSVQRKLEEIHKALYPELQYHPLAIPKVRDNLMVDAQTLNILNATYNLLLMSNTSLVDDCWLCLKLGPPTPLAIPNFLLSYVTRSSDNISCLIIPPLLVQPMQFSNSSCLFSPSYNSTEEIDLGHVAFSNCTSITNVTGPICAVNGSVFLCGNNMAYTYLPTNWTGLCVLATLLPDIDIIPGDEPVPIPAIDHFIYRPKRAIQFIPLLAGLGITAAFTTGATGLGVSVTQYTKLSNQLISDVQILSSTIQDLQDQVDSLAEVVLQNRRGLDLLTAEQGGICLALQEKCCFYVNKSGIVRDKIKTLQEELERRRKDLASNPLWTGLQGLLPYLLPFLGPLLTLLLLLTIGPCIFNRLTAFINDKLNIIHAMVL

SEQ ID NO: 1232 - protein, 549 aa, synthetic construct
MGFTTKIIFLYNLVLVYAGFDDPRKAIELVQKRYGRPCDCSGGQVSEPPSDRVSQVTCSGKTAYLMPDQRWKCKSIPKDTSPSGPLQECPCNSYQSSVHSSCYTSYQQCRSGNKTYYTATLLKTQTGGTSDVQVLGSTNKLIQSPCNGIKGQSICWSTTAPIHVSDGGGPLDTTRIKSVQRKLEEIHKALYPELQYHPLAIPKVRDNLMVDAQTLNILNATYNLLLMSNTSLVDDCWLCLKLGPPTPLAIPNFLLSYVTRSSDNISCLIIPPLLVQPMQFSNSSCLFSPSYNSTEEIDLGHVAFSNCTSITNVTGPICAVNGSVFLCGNNMAYTYLPTNWTGLCVLATLLPDIDIIPGDEPVPIPAIDHFIYRPKRAIQFIPLLAGLGITAAFTTGATGLGVSVTQYTKLSNQLISDVQILSSTIQDLQDQVDSLAEVVLQNRRGLDLLTAEQGGICLALQEKCCFYVNKSGIVRDKIKTLQEELERRRKDLASNPLWTGLQGLLPYLLPFLGPLLTLLLLLTIGPCIFNRLTAFINDKLNIIHAMVLT

SEQ ID NO: 1233 - protein, 550 aa, synthetic construct
MGFTTKIIFLYNLVLVYAGFDDPRKAIELVQKRYGRPCDCSGGQVSEPPSDRVSQVTCSGKTAYLMPDQRWKCKSIPKDTSPSGPLQECPCNSYQSSVHSSCYTSYQQCRSGNKTYYTATLLKTQTGGTSDVQVLGSTNKLIQSPCNGIKGQSICWSTTAPIHVSDGGGPLDTTRIKSVQRKLEEIHKALYPELQYHPLAIPKVRDNLMVDAQTLNILNATYNLLLMSNTSLVDDCWLCLKLGPPTPLAIPNFLLSYVTRSSDNISCLIIPPLLVQPMQFSNSSCLFSPSYNSTEEIDLGHVAFSNCTSITNVTGPICAVNGSVFLCGNNMAYTYLPTNWTGLCVLATLLPDIDIIPGDEPVPIPAIDHFIYRPKRAIQFIPLLAGLGITAAFTTGATGLGVSVTQYTKLSNQLISDVQILSSTIQDLQDQVDSLAEVVLQNRRGLDLLTAEQGGICLALQEKCCFYVNKSGIVRDKIKTLQEELERRRKDLASNPLWTGLQGLLPYLLPFLGPLLTLLLLLTIGPCIFNRLTAFINDKLNIIHAMVLTQ

SEQ ID NO: 1234 - protein, 551 aa, synthetic construct
MGFTTKIIFLYNLVLVYAGFDDPRKAIELVQKRYGRPCDCSGGQVSEPPSDRVSQVTCSGKTAYLMPDQRWKCKSIPKDTSPSGPLQECPCNSYQSSVHSSCYTSYQQCRSGNKTYYTATLLKTQTGGTSDVQVLGSTNKLIQSPCNGIKGQSICWSTTAPIHVSDGGGPLDTTRIKSVQRKLEEIHKALYPELQYHPLAIPKVRDNLMVDAQTLNILNATYNLLLMSNTSLVDDCWLCLKLGPPTPLAIPNFLLSYVTRSSDNISCLIIPPLLVQPMQFSNSSCLFSPSYNSTEEIDLGHVAFSNCTSITNVTGPICAVNGSVFLCGNNMAYTYLPTNWTGLCVLATLLPDIDIIPGDEPVPIPAIDHFIYRPKRAIQFIPLLAGLGITAAFTTGATGLGVSVTQYTKLSNQLISDVQILSSTIQDLQDQVDSLAEVVLQNRRGLDLLTAEQGGICLALQEKCCFYVNKSGIVRDKIKTLQEELERRRKDLASNPLWTGLQGLLPYLLPFLGPLLTLLLLLTIGPCIFNRLTAFINDKLNIIHAMVLTQQ

SEQ ID NO: 1235 - protein, 552 aa, synthetic construct
MGFTTKIIFLYNLVLVYAGFDDPRKAIELVQKRYGRPCDCSGGQVSEPPSDRVSQVTCSGKTAYLMPDQRWKCKSIPKDTSPSGPLQECPCNSYQSSVHSSCYTSYQQCRSGNKTYYTATLLKTQTGGTSDVQVLGSTNKLIQSPCNGIKGQSICWSTTAPIHVSDGGGPLDTTRIKSVQRKLEEIHKALYPELQYHPLAIPKVRDNLMVDAQTLNILNATYNLLLMSNTSLVDDCWLCLKLGPPTPLAIPNFLLSYVTRSSDNISCLIIPPLLVQPMQFSNSSCLFSPSYNSTEEIDLGHVAFSNCTSITNVTGPICAVNGSVFLCGNNMAYTYLPTNWTGLCVLATLLPDIDIIPGDEPVPIPAIDHFIYRPKRAIQFIPLLAGLGITAAFTTGATGLGVSVTQYTKLSNQLISDVQILSSTIQDLQDQVDSLAEVVLQNRRGLDLLTAEQGGICLALQEKCCFYVNKSGIVRDKIKTLQEELERRRKDLASNPLWTGLQGLLPYLLPFLGPLLTLLLLLTIGPCIFNRLTAFINDKLNIIHAMVLTQQY

SEQ ID NO: 1236 - protein, 553 aa, synthetic construct
MGFTTKIIFLYNLVLVYAGFDDPRKAIELVQKRYGRPCDCSGGQVSEPPSDRVSQVTCSGKTAYLMPDQRWKCKSIPKDTSPSGPLQECPCNSYQSSVHSSCYTSYQQCRSGNKTYYTATLLKTQTGGTSDVQVLGSTNKLIQSPCNGIKGQSICWSTTAPIHVSDGGGPLDTTRIKSVQRKLEEIHKALYPELQYHPLAIPKVRDNLMVDAQTLNILNATYNLLLMSNTSLVDDCWLCLKLGPPTPLAIPNFLLSYVTRSSDNISCLIIPPLLVQPMQFSNSSCLFSPSYNSTEEIDLGHVAFSNCTSITNVTGPICAVNGSVFLCGNNMAYTYLPTNWTGLCVLATLLPDIDIIPGDEPVPIPAIDHFIYRPKRAIQFIPLLAGLGITAAFTTGATGLGVSVTQYTKLSNQLISDVQILSSTIQDLQDQVDSLAEVVLQNRRGLDLLTAEQGGICLALQEKCCFYVNKSGIVRDKIKTLQEELERRRKDLASNPLWTGLQGLLPYLLPFLGPLLTLLLLLTIGPCIFNRLTAFINDKLNIIHAMVLTQQYQ

SEQ ID NO: 1237 - protein, 554 aa, synthetic construct
MGFTTKIIFLYNLVLVYAGFDDPRKAIELVQKRYGRPCDCSGGQVSEPPSDRVSQVTCSGKTAYLMPDQRWKCKSIPKDTSPSGPLQECPCNSYQSSVHSSCYTSYQQCRSGNKTYYTATLLKTQTGGTSDVQVLGSTNKLIQSPCNGIKGQSICWSTTAPIHVSDGGGPLDTTRIKSVQRKLEEIHKALYPELQYHPLAIPKVRDNLMVDAQTLNILNATYNLLLMSNTSLVDDCWLCLKLGPPTPLAIPNFLLSYVTRSSDNISCLIIPPLLVQPMQFSNSSCLFSPSYNSTEEIDLGHVAFSNCTSITNVTGPICAVNGSVFLCGNNMAYTYLPTNWTGLCVLATLLPDIDIIPGDEPVPIPAIDHFIYRPKRAIQFIPLLAGLGITAAFTTGATGLGVSVTQYTKLSNQLISDVQILSSTIQDLQDQVDSLAEVVLQNRRGLDLLTAEQGGICLALQEKCCFYVNKSGIVRDKIKTLQEELERRRKDLASNPLWTGLQGLLPYLLPFLGPLLTLLLLLTIGPCIFNRLTAFINDKLNIIHAMVLTQQYQV

SEQ ID NO: 1238 - protein, 555 aa, synthetic construct
MGFTTKIIFLYNLVLVYAGFDDPRKAIELVQKRYGRPCDCSGGQVSEPPSDRVSQVTCSGKTAYLMPDQRWKCKSIPKDTSPSGPLQECPCNSYQSSVHSSCYTSYQQCRSGNKTYYTATLLKTQTGGTSDVQVLGSTNKLIQSPCNGIKGQSICWSTTAPIHVSDGGGPLDTTRIKSVQRKLEEIHKALYPELQYHPLAIPKVRDNLMVDAQTLNILNATYNLLLMSNTSLVDDCWLCLKLGPPTPLAIPNFLLSYVTRSSDNISCLIIPPLLVQPMQFSNSSCLFSPSYNSTEEIDLGHVAFSNCTSITNVTGPICAVNGSVFLCGNNMAYTYLPTNWTGLCVLATLLPDIDIIPGDEPVPIPAIDHFIYRPKRAIQFIPLLAGLGITAAFTTGATGLGVSVTQYTKLSNQLISDVQILSSTIQDLQDQVDSLAEVVLQNRRGLDLLTAEQGGICLALQEKCCFYVNKSGIVRDKIKTLQEELERRRKDLASNPLWTGLQGLLPYLLPFLGPLLTLLLLLTIGPCIFNRLTAFINDKLNIIHAMVLTQQYQVL

SEQ ID NO: 1239 - protein, 556 aa, synthetic construct
MGFTTKIIFLYNLVLVYAGFDDPRKAIELVQKRYGRPCDCSGGQVSEPPSDRVSQVTCSGKTAYLMPDQRWKCKSIPKDTSPSGPLQECPCNSYQSSVHSSCYTSYQQCRSGNKTYYTATLLKTQTGGTSDVQVLGSTNKLIQSPCNGIKGQSICWSTTAPIHVSDGGGPLDTTRIKSVQRKLEEIHKALYPELQYHPLAIPKVRDNLMVDAQTLNILNATYNLLLMSNTSLVDDCWLCLKLGPPTPLAIPNFLLSYVTRSSDNISCLIIPPLLVQPMQFSNSSCLFSPSYNSTEEIDLGHVAFSNCTSITNVTGPICAVNGSVFLCGNNMAYTYLPTNWTGLCVLATLLPDIDIIPGDEPVPIPAIDHFIYRPKRAIQFIPLLAGLGITAAFTTGATGLGVSVTQYTKLSNQLISDVQILSSTIQDLQDQVDSLAEVVLQNRRGLDLLTAEQGGICLALQEKCCFYVNKSGIVRDKIKTLQEELERRRKDLASNPLWTGLQGLLPYLLPFLGPLLTLLLLLTIGPCIFNRLTAFINDKLNIIHAMVLTQQYQVLR

SEQ ID NO: 1240 - protein, 557 aa, synthetic construct
MGFTTKIIFLYNLVLVYAGFDDPRKAIELVQKRYGRPCDCSGGQVSEPPSDRVSQVTCSGKTAYLMPDQRWKCKSIPKDTSPSGPLQECPCNSYQSSVHSSCYTSYQQCRSGNKTYYTATLLKTQTGGTSDVQVLGSTNKLIQSPCNGIKGQSICWSTTAPIHVSDGGGPLDTTRIKSVQRKLEEIHKALYPELQYHPLAIPKVRDNLMVDAQTLNILNATYNLLLMSNTSLVDDCWLCLKLGPPTPLAIPNFLLSYVTRSSDNISCLIIPPLLVQPMQFSNSSCLFSPSYNSTEEIDLGHVAFSNCTSITNVTGPICAVNGSVFLCGNNMAYTYLPTNWTGLCVLATLLPDIDIIPGDEPVPIPAIDHFIYRPKRAIQFIPLLAGLGITAAFTTGATGLGVSVTQYTKLSNQLISDVQILSSTIQDLQDQVDSLAEVVLQNRRGLDLLTAEQGGICLALQEKCCFYVNKSGIVRDKIKTLQEELERRRKDLASNPLWTGLQGLLPYLLPFLGPLLTLLLLLTIGPCIFNRLTAFINDKLNIIHAMVLTQQYQVLRT

SEQ ID NO: 1241 - protein, 558 aa, synthetic construct
MGFTTKIIFLYNLVLVYAGFDDPRKAIELVQKRYGRPCDCSGGQVSEPPSDRVSQVTCSGKTAYLMPDQRWKCKSIPKDTSPSGPLQECPCNSYQSSVHSSCYTSYQQCRSGNKTYYTATLLKTQTGGTSDVQVLGSTNKLIQSPCNGIKGQSICWSTTAPIHVSDGGGPLDTTRIKSVQRKLEEIHKALYPELQYHPLAIPKVRDNLMVDAQTLNILNATYNLLLMSNTSLVDDCWLCLKLGPPTPLAIPNFLLSYVTRSSDNISCLIIPPLLVQPMQFSNSSCLFSPSYNSTEEIDLGHVAFSNCTSITNVTGPICAVNGSVFLCGNNMAYTYLPTNWTGLCVLATLLPDIDIIPGDEPVPIPAIDHFIYRPKRAIQFIPLLAGLGITAAFTTGATGLGVSVTQYTKLSNQLISDVQILSSTIQDLQDQVDSLAEVVLQNRRGLDLLTAEQGGICLALQEKCCFYVNKSGIVRDKIKTLQEELERRRKDLASNPLWTGLQGLLPYLLPFLGPLLTLLLLLTIGPCIFNRLTAFINDKLNIIHAMVLTQQYQVLRTD

SEQ ID NO: 1242 - protein, 559 aa, synthetic construct
MGFTTKIIFLYNLVLVYAGFDDPRKAIELVQKRYGRPCDCSGGQVSEPPSDRVSQVTCSGKTAYLMPDQRWKCKSIPKDTSPSGPLQECPCNSYQSSVHSSCYTSYQQCRSGNKTYYTATLLKTQTGGTSDVQVLGSTNKLIQSPCNGIKGQSICWSTTAPIHVSDGGGPLDTTRIKSVQRKLEEIHKALYPELQYHPLAIPKVRDNLMVDAQTLNILNATYNLLLMSNTSLVDDCWLCLKLGPPTPLAIPNFLLSYVTRSSDNISCLIIPPLLVQPMQFSNSSCLFSPSYNSTEEIDLGHVAFSNCTSITNVTGPICAVNGSVFLCGNNMAYTYLPTNWTGLCVLATLLPDIDIIPGDEPVPIPAIDHFIYRPKRAIQFIPLLAGLGITAAFTTGATGLGVSVTQYTKLSNQLISDVQILSSTIQDLQDQVDSLAEVVLQNRRGLDLLTAEQGGICLALQEKCCFYVNKSGIVRDKIKTLQEELERRRKDLASNPLWTGLQGLLPYLLPFLGPLLTLLLLLTIGPCIFNRLTAFINDKLNIIHAMVLTQQYQVLRTDE

SEQ ID NO: 1243 - protein, 560 aa, synthetic construct
MGFTTKIIFLYNLVLVYAGFDDPRKAIELVQKRYGRPCDCSGGQVSEPPSDRVSQVTCSGKTAYLMPDQRWKCKSIPKDTSPSGPLQECPCNSYQSSVHSSCYTSYQQCRSGNKTYYTATLLKTQTGGTSDVQVLGSTNKLIQSPCNGIKGQSICWSTTAPIHVSDGGGPLDTTRIKSVQRKLEEIHKALYPELQYHPLAIPKVRDNLMVDAQTLNILNATYNLLLMSNTSLVDDCWLCLKLGPPTPLAIPNFLLSYVTRSSDNISCLIIPPLLVQPMQFSNSSCLFSPSYNSTEEIDLGHVAFSNCTSITNVTGPICAVNGSVFLCGNNMAYTYLPTNWTGLCVLATLLPDIDIIPGDEPVPIPAIDHFIYRPKRAIQFIPLLAGLGITAAFTTGATGLGVSVTQYTKLSNQLISDVQILSSTIQDLQDQVDSLAEVVLQNRRGLDLLTAEQGGICLALQEKCCFYVNKSGIVRDKIKTLQEELERRRKDLASNPLWTGLQGLLPYLLPFLGPLLTLLLLLTIGPCIFNRLTAFINDKLNIIHAMVLTQQYQVLRTDEE

SEQ ID NO: 1244 - protein, 561 aa, synthetic construct
MGFTTKIIFLYNLVLVYAGFDDPRKAIELVQKRYGRPCDCSGGQVSEPPSDRVSQVTCSGKTAYLMPDQRWKCKSIPKDTSPSGPLQECPCNSYQSSVHSSCYTSYQQCRSGNKTYYTATLLKTQTGGTSDVQVLGSTNKLIQSPCNGIKGQSICWSTTAPIHVSDGGGPLDTTRIKSVQRKLEEIHKALYPELQYHPLAIPKVRDNLMVDAQTLNILNATYNLLLMSNTSLVDDCWLCLKLGPPTPLAIPNFLLSYVTRSSDNISCLIIPPLLVQPMQFSNSSCLFSPSYNSTEEIDLGHVAFSNCTSITNVTGPICAVNGSVFLCGNNMAYTYLPTNWTGLCVLATLLPDIDIIPGDEPVPIPAIDHFIYRPKRAIQFIPLLAGLGITAAFTTGATGLGVSVTQYTKLSNQLISDVQILSSTIQDLQDQVDSLAEVVLQNRRGLDLLTAEQGGICLALQEKCCFYVNKSGIVRDKIKTLQEELERRRKDLASNPLWTGLQGLLPYLLPFLGPLLTLLLLLTIGPCIFNRLTAFINDKLNIIHAMVLTQQYQVLRTDEEA

SEQ ID NO: 1245 - protein, 562 aa, synthetic construct
MGFTTKIIFLYNLVLVYAGFDDPRKAIELVQKRYGRPCDCSGGQVSEPPSDRVSQVTCSGKTAYLMPDQRWKCKSIPKDTSPSGPLQECPCNSYQSSVHSSCYTSYQQCRSGNKTYYTATLLKTQTGGTSDVQVLGSTNKLIQSPCNGIKGQSICWSTTAPIHVSDGGGPLDTTRIKSVQRKLEEIHKALYPELQYHPLAIPKVRDNLMVDAQTLNILNATYNLLLMSNTSLVDDCWLCLKLGPPTPLAIPNFLLSYVTRSSDNISCLIIPPLLVQPMQFSNSSCLFSPSYNSTEEIDLGHVAFSNCTSITNVTGPICAVNGSVFLCGNNMAYTYLPTNWTGLCVLATLLPDIDIIPGDEPVPIPAIDHFIYRPKRAIQFIPLLAGLGITAAFTTGATGLGVSVTQYTKLSNQLISDVQILSSTIQDLQDQVDSLAEVVLQNRRGLDLLTAEQGGICLALQEKCCFYVNKSGIVRDKIKTLQEELERRRKDLASNPLWTGLQGLLPYLLPFLGPLLTLLLLLTIGPCIFNRLTAFINDKLNIIHAMVLTQQYQVLRTDEEAQ

SEQ ID NO: 1246 - protein, 547 aa, synthetic construct
MGFTTKIIFLYNLVLVYAGFDDPRKAIELVQKRYGRPCDCSGGQVSEPPSDRVSQVTCSGKTAYLMPDQRWKCKSIPKDTSPSGPLQECPCNSYQSSVHSSCYTSYQQCRSGNKTYYTATLLKTQTGGTSDVQVLGSTNKLIQSPCNGIKGQSICWSTTAPIHVSDGGGPLDTTRIKSVQRKLEEIHKALYPELQYHPLAIPKVRDNLMVDAQTLNILNATYNLLLMSNTSLVDDCWLCLKLGPPTPLAIPNFLLSYVTRSSDNISCLIIPPLLVQPMQFSNSSCLFSPSYNSTEEIDLGHVAFSNCTSITNVTGPICAVNGSVFLCGNNMAYTYLPTNWTGLCVLATLLPDIDIIPGDEPVPIPAIDHFIYRPKRAIQFIPLLAGLGITAAFTTGATGLGVSVTQYTKLSNQLISDVQILSSTIQDLQDQVDSLAEVVLQNRRGLDLLTAEQGGICLALQEKCCFYVNKSGIVRDKIKTLQEELERRRKDLASNPLWTGLQGLLPYLLPFLGPLLTLLLLLTIGPCIFNRLTAFINDKLNIIHAMW

SEQ ID NO: 1247 - protein, 547 aa, synthetic construct
MGFTTKIIFLYNLVLVYAGFDDPRKAIELVQKRYGRPCDCSGGQVSEPPSDRVSQVTCSGKTAYLMPDQRWKCKSIPKDTSPSGPLQECPCNSYQSSVHSSCYTSYQQCRSGNKTYYTATLLKTQTGGTSDVQVLGSTNKLIQSPCNGIKGQSICWSTTAPIHVSDGGGPLDTTRIKSVQRKLEEIHKALYPELQYHPLAIPKVRDNLMVDAQTLNILNATYNLLLMSNTSLVDDCWLCLKLGPPTPLAIPNFLLSYVTRSSDNISCLIIPPLLVQPMQFSNSSCLFSPSYNSTEEIDLGHVAFSNCTSITNVTGPICAVNGSVFLCGNNMAYTYLPTNWTGLCVLATLLPDIDIIPGDEPVPIPAIDHFIYRPKRAIQFIPLLAGLGITAAFTTGATGLGVSVTQYTKLSNQLISDVQILSSTIQDLQDQVDSLAEVVLQNRRGLDLLTAEQGGICLALQEKCCFYVNKSGIVRDKIKTLQEELERRRKDLASNPLWTGLQGLLPYLLPFLGPLLTLLLLLTIGPCIFNRLTAFINDKLNIIHAMR

SEQ ID NO: 1248 - protein, 547 aa, synthetic construct
MGFTTKIIFLYNLVLVYAGFDDPRKAIELVQKRYGRPCDCSGGQVSEPPSDRVSQVTCSGKTAYLMPDQRWKCKSIPKDTSPSGPLQECPCNSYQSSVHSSCYTSYQQCRSGNKTYYTATLLKTQTGGTSDVQVLGSTNKLIQSPCNGIKGQSICWSTTAPIHVSDGGGPLDTTRIKSVQRKLEEIHKALYPELQYHPLAIPKVRDNLMVDAQTLNILNATYNLLLMSNTSLVDDCWLCLKLGPPTPLAIPNFLLSYVTRSSDNISCLIIPPLLVQPMQFSNSSCLFSPSYNSTEEIDLGHVAFSNCTSITNVTGPICAVNGSVFLCGNNMAYTYLPTNWTGLCVLATLLPDIDIIPGDEPVPIPAIDHFIYRPKRAIQFIPLLAGLGITAAFTTGATGLGVSVTQYTKLSNQLISDVQILSSTIQDLQDQVDSLAEVVLQNRRGLDLLTAEQGGICLALQEKCCFYVNKSGIVRDKIKTLQEELERRRKDLASNPLWTGLQGLLPYLLPFLGPLLTLLLLLTIGPCIFNRLTAFINDKLNIIHAMD

SEQ ID NO: 1249 - protein, 547 aa, synthetic construct
MGFTTKIIFLYNLVLVYAGFDDPRKAIELVQKRYGRPCDCSGGQVSEPPSDRVSQVTCSGKTAYLMPDQRWKCKSIPKDTSPSGPLQECPCNSYQSSVHSSCYTSYQQCRSGNKTYYTATLLKTQTGGTSDVQVLGSTNKLIQSPCNGIKGQSICWSTTAPIHVSDGGGPLDTTRIKSVQRKLEEIHKALYPELQYHPLAIPKVRDNLMVDAQTLNILNATYNLLLMSNTSLVDDCWLCLKLGPPTPLAIPNFLLSYVTRSSDNISCLIIPPLLVQPMQFSNSSCLFSPSYNSTEEIDLGHVAFSNCTSITNVTGPICAVNGSVFLCGNNMAYTYLPTNWTGLCVLATLLPDIDIIPGDEPVPIPAIDHFIYRPKRAIQFIPLLAGLGITAAFTTGATGLGVSVTQYTKLSNQLISDVQILSSTIQDLQDQVDSLAEVVLQNRRGLDLLTAEQGGICLALQEKCCFYVNKSGIVRDKIKTLQEELERRRKDLASNPLWTGLQGLLPYLLPFLGPLLTLLLLLTIGPCIFNRLTAFINDKLNIIHAMY

SEQ ID NO: 1250 - protein, 547 aa, synthetic construct
MGFTTKIIFLYNLVLVYAGFDDPRKAIELVQKRYGRPCDCSGGQVSEPPSDRVSQVTCSGKTAYLMPDQRWKCKSIPKDTSPSGPLQECPCNSYQSSVHSSCYTSYQQCRSGNKTYYTATLLKTQTGGTSDVQVLGSTNKLIQSPCNGIKGQSICWSTTAPIHVSDGGGPLDTTRIKSVQRKLEEIHKALYPELQYHPLAIPKVRDNLMVDAQTLNILNATYNLLLMSNTSLVDDCWLCLKLGPPTPLAIPNFLLSYVTRSSDNISCLIIPPLLVQPMQFSNSSCLFSPSYNSTEEIDLGHVAFSNCTSITNVTGPICAVNGSVFLCGNNMAYTYLPTNWTGLCVLATLLPDIDIIPGDEPVPIPAIDHFIYRPKRAIQFIPLLAGLGITAAFTTGATGLGVSVTQYTKLSNQLISDVQILSSTIQDLQDQVDSLAEVVLQNRRGLDLLTAEQGGICLALQEKCCFYVNKSGIVRDKIKTLQEELERRRKDLASNPLWTGLQGLLPYLLPFLGPLLTLLLLLTIGPCIFNRLTAFINDKLNIIHAMQ

SEQ ID NO: 1251 - protein, 547 aa, synthetic construct
MGFTTKIIFLYNLVLVYAGFDDPRKAIELVQKRYGRPCDCSGGQVSEPPSDRVSQVTCSGKTAYLMPDQRWKCKSIPKDTSPSGPLQECPCNSYQSSVHSSCYTSYQQCRSGNKTYYTATLLKTQTGGTSDVQVLGSTNKLIQSPCNGIKGQSICWSTTAPIHVSDGGGPLDTTRIKSVQRKLEEIHKALYPELQYHPLAIPKVRDNLMVDAQTLNILNATYNLLLMSNTSLVDDCWLCLKLGPPTPLAIPNFLLSYVTRSSDNISCLIIPPLLVQPMQFSNSSCLFSPSYNSTEEIDLGHVAFSNCTSITNVTGPICAVNGSVFLCGNNMAYTYLPTNWTGLCVLATLLPDIDIIPGDEPVPIPAIDHFIYRPKRAIQFIPLLAGLGITAAFTTGATGLGVSVTQYTKLSNQLISDVQILSSTIQDLQDQVDSLAEVVLQNRRGLDLLTAEQGGICLALQEKCCFYVNKSGIVRDKIKTLQEELERRRKDLASNPLWTGLQGLLPYLLPFLGPLLTLLLLLTIGPCIFNRLTAFINDKLNIIHAMH

SEQ ID NO: 1252 - protein, 548 aa, synthetic construct
MGFTTKIIFLYNLVLVYAGFDDPRKAIELVQKRYGRPCDCSGGQVSEPPSDRVSQVTCSGKTAYLMPDQRWKCKSIPKDTSPSGPLQECPCNSYQSSVHSSCYTSYQQCRSGNKTYYTATLLKTQTGGTSDVQVLGSTNKLIQSPCNGIKGQSICWSTTAPIHVSDGGGPLDTTRIKSVQRKLEEIHKALYPELQYHPLAIPKVRDNLMVDAQTLNILNATYNLLLMSNTSLVDDCWLCLKLGPPTPLAIPNFLLSYVTRSSDNISCLIIPPLLVQPMQFSNSSCLFSPSYNSTEEIDLGHVAFSNCTSITNVTGPICAVNGSVFLCGNNMAYTYLPTNWTGLCVLATLLPDIDIIPGDEPVPIPAIDHFIYRPKRAIQFIPLLAGLGITAAFTTGATGLGVSVTQYTKLSNQLISDVQILSSTIQDLQDQVDSLAEVVLQNRRGLDLLTAEQGGICLALQEKCCFYVNKSGIVRDKIKTLQEELERRRKDLASNPLWTGLQGLLPYLLPFLGPLLTLLLLLTIGPCIFNRLTAFINDKLNIIHAMGS

SEQ ID NO: 1253 - protein, 550 aa, synthetic construct
MGFTTKIIFLYNLVLVYAGFDDPRKAIELVQKRYGRPCDCSGGQVSEPPSDRVSQVTCSGKTAYLMPDQRWKCKSIPKDTSPSGPLQECPCNSYQSSVHSSCYTSYQQCRSGNKTYYTATLLKTQTGGTSDVQVLGSTNKLIQSPCNGIKGQSICWSTTAPIHVSDGGGPLDTTRIKSVQRKLEEIHKALYPELQYHPLAIPKVRDNLMVDAQTLNILNATYNLLLMSNTSLVDDCWLCLKLGPPTPLAIPNFLLSYVTRSSDNISCLIIPPLLVQPMQFSNSSCLFSPSYNSTEEIDLGHVAFSNCTSITNVTGPICAVNGSVFLCGNNMAYTYLPTNWTGLCVLATLLPDIDIIPGDEPVPIPAIDHFIYRPKRAIQFIPLLAGLGITAAFTTGATGLGVSVTQYTKLSNQLISDVQILSSTIQDLQDQVDSLAEVVLQNRRGLDLLTAEQGGICLALQEKCCFYVNKSGIVRDKIKTLQEELERRRKDLASNPLWTGLQGLLPYLLPFLGPLLTLLLLLTIGPCIFNRLTAFINDKLNIIHAMGSTS

SEQ ID NO: 1254 - protein, 556 aa, synthetic construct
MGFTTKIIFLYNLVLVYAGFDDPRKAIELVQKRYGRPCDCSGGQVSEPPSDRVSQVTCSGKTAYLMPDQRWKCKSIPKDTSPSGPLQECPCNSYQSSVHSSCYTSYQQCRSGNKTYYTATLLKTQTGGTSDVQVLGSTNKLIQSPCNGIKGQSICWSTTAPIHVSDGGGPLDTTRIKSVQRKLEEIHKALYPELQYHPLAIPKVRDNLMVDAQTLNILNATYNLLLMSNTSLVDDCWLCLKLGPPTPLAIPNFLLSYVTRSSDNISCLIIPPLLVQPMQFSNSSCLFSPSYNSTEEIDLGHVAFSNCTSITNVTGPICAVNGSVFLCGNNMAYTYLPTNWTGLCVLATLLPDIDIIPGDEPVPIPAIDHFIYRPKRAIQFIPLLAGLGITAAFTTGATGLGVSVTQYTKLSNQLISDVQILSSTIQDLQDQVDSLAEVVLQNRRGLDLLTAEQGGICLALQEKCCFYVNKSGIVRDKIKTLQEELERRRKDLASNPLWTGLQGLLPYLLPFLGPLLTLLLLLTIGPCIFNRLTAFINDKLNIIHAMGSTSPVWWNS

SEQ ID NO: 1255 - protein, 562 aa, synthetic construct
MGFTTKIIFLYNLVLVYAGFDDPRKAIELVQKRYGRPCDCSGGQVSEPPSDRVSQVTCSGKTAYLMPDQRWKCKSIPKDTSPSGPLQECPCNSYQSSVHSSCYTSYQQCRSGNKTYYTATLLKTQTGGTSDVQVLGSTNKLIQSPCNGIKGQSICWSTTAPIHVSDGGGPLDTTRIKSVQRKLEEIHKALYPELQYHPLAIPKVRDNLMVDAQTLNILNATYNLLLMSNTSLVDDCWLCLKLGPPTPLAIPNFLLSYVTRSSDNISCLIIPPLLVQPMQFSNSSCLFSPSYNSTEEIDLGHVAFSNCTSITNVTGPICAVNGSVFLCGNNMAYTYLPTNWTGLCVLATLLPDIDIIPGDEPVPIPAIDHFIYRPKRAIQFIPLLAGLGITAAFTTGATGLGVSVTQYTKLSNQLISDVQILSSTIQDLQDQVDSLAEVVLQNRRGLDLLTAEQGGICLALQEKCCFYVNKSGIVRDKIKTLQEELERRRKDLASNPLWTGLQGLLPYLLPFLGPLLTLLLLLTIGPCIFNRLTAFINDKLNIIHAMGSTSPVWWNSADIQHS

SEQ ID NO: 1256 - protein, 576 aa, synthetic construct
MGFTTKIIFLYNLVLVYAGFDDPRKAIELVQKRYGRPCDCSGGQVSEPPSDRVSQVTCSGKTAYLMPDQRWKCKSIPKDTSPSGPLQECPCNSYQSSVHSSCYTSYQQCRSGNKTYYTATLLKTQTGGTSDVQVLGSTNKLIQSPCNGIKGQSICWSTTAPIHVSDGGGPLDTTRIKSVQRKLEEIHKALYPELQYHPLAIPKVRDNLMVDAQTLNILNATYNLLLMSNTSLVDDCWLCLKLGPPTPLAIPNFLLSYVTRSSDNISCLIIPPLLVQPMQFSNSSCLFSPSYNSTEEIDLGHVAFSNCTSITNVTGPICAVNGSVFLCGNNMAYTYLPTNWTGLCVLATLLPDIDIIPGDEPVPIPAIDHFIYRPKRAIQFIPLLAGLGITAAFTTGATGLGVSVTQYTKLSNQLISDVQILSSTIQDLQDQVDSLAEVVLQNRRGLDLLTAEQGGICLALQEKCCFYVNKSGIVRDKIKTLQEELERRRKDLASNPLWTGLQGLLPYLLPFLGPLLTLLLLLTIGPCIFNRLTAFINDKLNIIHAMGSTSPVWWNSADIQHSGGRSSLEGPNKNSS

SEQ ID NO: 1257 - protein, 563 aa, synthetic construct; identical to SEQ ID NO: 1210

SEQ ID NO: 1258 - protein, 580 aa, synthetic construct
MGFTTKIIFLYNLVLVYAGFDDPRKAIELVQKRYGRPCDCSGGQVSEPPSDRVSQVTCSGKTAYLMPDQRWKCKSIPKDTSPSGPLQECPCNSYQSSVHSSCYTSYQQCRSGNKTYYTATLLKTQTGGTSDVQVLGSTNKLIQSPCNGIKGQSICWSTTAPIHVSDGGGPLDTTRIKSVQRKLEEIHKALYPELQYHPLAIPKVRDNLMVDAQTLNILNATYNLLLMSNTSLVDDCWLCLKLGPPTPLAIPNFLLSYVTRSSDNISCLIIPPLLVQPMQFSNSSCLFSPSYNSTEEIDLGHVAFSNCTSITNVTGPICAVNGSVFLCGNNMAYTYLPTNWTGLCVLATLLPDIDIIPGDEPVPIPAIDHFIYRPKRAIQFIPLLAGLGITAAFTTGATGLGVSVTQYTKLSNQLISDVQILSSTIQDLQDQVDSLAEVVLQNRRGLDLLTAEQGGICLALQEKCCFYVNKSGIVRDKIKTLQEELERRRKDLASNPLWTGLQGLLPYLLPFLGPLLTLLLLLTIGPCIFNRLTAFINDKLNIIHAMGSTSPVWWNSADIQHSGGRSSLEGPNKNSSQKRI

SEQ ID NO: 1259 - protein, 856 aa, synthetic construct
MGFTTKIIFLYNLVLVYAGFDDPRKAIELVQKRYGRPCDCSGGQVSEPPSDRVSQVTCSGKTAYLMPDQRWKCKSIPKDTSPSGPLQECPCNSYQSSVHSSCYTSYQQCRSGNKTYYTATLLKTQTGGTSDVQVLGSTNKLIQSPCNGIKGQSICWSTTAPIHVSDGGGPLDTTRIKSVQRKLEEIHKALYPELQYHPLAIPKVRDNLMVDAQTLNILNATYNLLLMSNTSLVDDCWLCLKLGPPTPLAIPNFLLSYVTRSSDNISCLIIPPLLVQPMQFSNSSCLFSPSYNSTEEIDLGHVAFSNCTSITNVTGPICAVNGSVFLCGNNMAYTYLPTNWTGLCVLATLLPDIDIIPGDEPVPIPAIDHFIYRPKRAIQFIPLLAGLGITAAFTTGATGLGVSVTQYTKLSNQLISDVQILSSTIQDLQDQVDSLAEVVLQNRRGLDLLTAEQGGICLALQEKCCFYVNKSGIVRDKIKTLQEELERRRKDLASNPLWTGLQGLLPYLLPFLGPLLTLLLLLTIGPCIFNRLTAFINDKLNIIHAMGSRAKRSGSGATNFSLLKQAGDVEENPGPTSMDWIWRILFLVGAATGAHSFEMKPTENNEDFNIVAVASNFATTDLDADRGKLPGKKLPLEVLKEMEANARKAGCTRGCLICLSHIKCTPKMKKFIPGRCHTYEGDKESAQGGIGEAIVDIPEIPGFKDLEPMEQFIAQVDLCVDCTTGCLKGLANVQCSDLLKKWLPQRCATFASKIQGQVDKIKGAGGDLEQKLISEEDLAKPTTTPAPRPPTPAPTIASQPLSLRPEACRPAAGGAVHTRGLDFACDIYIWAPLAGTCGVLLLSLVITLYCKRGRKK

SEQ ID NO: 1260 - protein, 546 aa, synthetic construct; identical to SEQ ID NO: 1211

SEQ ID NO: 1261 - protein, 546 aa, synthetic construct; identical to SEQ ID NO: 1211

SEQ ID NO: 1262 - protein, 546 aa, synthetic construct; identical to SEQ ID NO: 1211

SEQ ID NO: 1263 - protein, 546 aa, synthetic construct; identical to SEQ ID NO: 1211

SEQ ID NO: 1264 - protein, 546 aa, synthetic construct; identical to SEQ ID NO: 1211

SEQ ID NO: 1265 - protein, 563 aa, synthetic construct
MGFTTKIIFLYNLVLVYAGFDDPRKAIELVQKRYGRPCDCSGGQVSEPPSDRVSQVTCSGKTAYLMPDQRWKCKSIPKDTSPSGPLQECPCNSYQSSVHSSCYTSYQQCRSGNKTYYTATLLKTQTGGTSDVQVLGSTNKLIQSPCNGIKGQSICWSTTAPIHVSDGGGPLDTTRIKSVQRKLEEIHKALYPELQYHPLAIPKVRDNLMVDAQTLNILNATYNLLLMSNTSLVDDCWLCLKLGPPTPLAIPNFLLSYVTRSSDNISCLIIPPLLVQPMQFSNSSCLFSPSYNSTEEIDLGHVAFSNCTSITNVTGPICAVNGSVFLCGNNMAYTYLPTNWTGLCVLATLLPDIDIIPGDEPVPIPAIDHFIYRPKRAIQFIPLLAGLGITAAFTTGATGLGVSVTQYTKLSNQLISDVQILSSTIQDLQDQVDSLAEVVLQNRRGLDLLTAEQGGICLALQEKCCFYVNKSGIVRDKIKTLQEELERRRKDLASNPLWTGLQGLLPYLLPFLGPLLTLLLLLTIGPCIFNRLTAFINDKLNIIHAMVLTQQSQVARTDEEAQD

SEQ ID NO: 1266 - protein, 563 aa, synthetic construct; identical to SEQ ID NO: 1210

SEQ ID NO: 1267 - protein, 580 aa, synthetic construct; identical to SEQ ID NO: 1258

SEQ ID NO: 1268 - protein, 563 aa, synthetic construct; identical to SEQ ID NO: 1210

SEQ ID NO: 1269 - protein, 580 aa, synthetic construct; identical to SEQ ID NO: 1258

SEQ ID NO: 1270 - protein, 563 aa, synthetic construct
MGFTTKIIFLYNLVLVYAGFDDPRKAIELVQKRYGRPCDCSGGQVSEPPSDRVSQVTCSGKTAYLMPDQRWKCKSIPKDTSPSGPLQECPCNSYQSSVHSSCYTSYQQCRSGNKTYYTATLLKTQTGGTSDVQVLGSTNKLIQSPCNGIKGQSICWSTTAPIHVSDGGGPLDTTRIKSVQRKLEEIHKALYPELQYHPLAIPKVRDNLMVDAQTLNILNATYNLLLMSNTSLVDDCWLCLKLGPPTPLAIPNFLLSYVTRSSDNISCLIIPPLLVQPMQFSNSSCLFSPSYNSTEEIDLGHVAFSNCTSITNVTGPICAVNGSVFLCGNNMAYTYLPTNWTGLCVLATLLPDIDIIPGDEPVPIPAIDHFIYRPKRAIQFIPLLAGLGITAAFTTGATGLGVSVTQYTKLSNQLISDVQILSSTIQDLQDQVDSLAEVVLQNRRGLDLLTAEQGGICLALQEKCCFYVNKSGIVRDKLKTLQEELERRRKDLASNPLWTGLQGLLPYLLPFLGPLLTLLLLLTIGPCIFNRLTAFINDKLNIIHAMVLTQQYQVLRTDEEAQD

SEQ ID NO: 1271 - protein, 545 aa, synthetic construct
MGFTTKIIFLYNLVLVYAGFDDPRKAIELVQKRYGRPCDCSGGQVSEPPSDRVSQVTCSGKTAYLMPDQRWKCKSIPKDTSPSGPLQECPCNSYQSSVHSSCYTSYQQCRSGNKTYYTATLLKTQTGGTSDVQVLGSTNKLIQSPCNGIKGQSICWSTTAPIHVSDGGGPLDTTRIKSVQRKLEEIHKALYPELQYHPLAIPKVRDNLMVDAQTLNILNATYNLLLMSNTSLVDDCWLCLKLGPPTPLAIPNFLLSYVTRSSDNISCLIIPPLLVQPMQFSNSSCLFSPSYNSTEEIDLGHVAFSNCTSITNVTGPICAVNGSVFLCGNNMAYTYLPTNWTGLCVLATLLPDIDIIPGDEPVPIPAIDHFIYRPKRAIQFIPLLAGLGITAAFTTGATGLGVSVTQYTKLSQELNGDMERVADSLVTLQDQLNSLAAVVLQNRRALDLLTAERGGTCLFLGEECCYYVNQSGIVTEKVKEIRDRIQRRAEELRNTGPWGLLSQWMPWILPFLGPLAAIILLLLFGPCIFNLLVNFVSSRIEAVKL

SEQ ID NO: 1272 - protein, 552 aa, synthetic construct
MGFTTKIIFLYNLVLVYAGFDDPRKAIELVQKRYGRPCDCSGGQVSEPPSDRVSQVTCSGKTAYLMPDQRWKCKSIPKDTSPSGPLQECPCNSYQSSVHSSCYTSYQQCRSGNKTYYTATLLKTQTGGTSDVQVLGSTNKLIQSPCNGIKGQSICWSTTAPIHVSDGGGPLDTTRIKSVQRKLEEIHKALYPELQYHPLAIPKVRDNLMVDAQTLNILNATYNLLLMSNTSLVDDCWLCLKLGPPTPLAIPNFLLSYVTRSSDNISCLIIPPLLVQPMQFSNSSCLFSPSYNSTEEIDLGHVAFSNCTSITNVTGPICAVNGSVFLCGNNMAYTYLPTNWTGLCVLATLLPDIDIIPGDEPVPIPAIDHFIYRPKRAIQFIPLLAGLGITAAFTTGATGLGVSVTQYTKLSNQLISDVQILSSTIQDLQDQVDSLAEVVLQNRRGLDLLTAEQGGICLALQEKCCFYVNKSGIVRDKLKTLQEELERRRKDLASNPLWTGLQGLLPYLLPFLGPLLTLLLLLTIGPCIFNRLTAFINDKLNIIHAMVLTQQY

SEQ ID NO: 1273 - protein, 562 aa, synthetic construct; identical to SEQ ID NO: 1212

SEQ ID NO: 1274 - protein, 30 aa, synthetic construct; identical to SEQ ID NO: 1219

SEQ ID NO: 1275 - protein, 547 aa, synthetic construct
MGFTTKIIFLYNLVLVYAGFDDPRKAIELVQKRYGRPCDCSGGQVSEPPSDRVSQVTCSGKTAYLMPDQRWKCKSIPKDTSPSGPLQECPCNSYQSSVHSSCYTSYQQCRSGNKTYYTATLLKTQTGGTSDVQVLGSTNKLIQSPCNGIKGQSICWSTTAPIHVSDGGGPLDTTRIKSVQRKLEEIHKALYPELQYHPLAIPKVRDNLMVDAQTLNILNATYNLLLMSNTSLVDDCWLCLKLGPPTPLAIPNFLLSYVTRSSDNISCLIIPPLLVQPMQFSNSSCLFSPSYNSTEEIDLGHVAFSNCTSITNVTGPICAVNGSVFLCGNNMAYTYLPTNWTGLCVLATLLPDIDIIPGDEPVPIPAIDHFIYRPKRAIQFIPLLAGLGITAAFTTGATGLGVSVTQYTKLSNQLISDVQILSSTIQDLQDQVDSLAEVVLQNRRGLDLLTAEQGGICLALQEKCCFYVNKSGIVRDKIKTLQEELERRRKDLASNPLWTGLQGLLPYLLPFLGPLLTLLLLLTIGPCIFNRLTAFINDKLNIIHAMP

SEQ ID NO: 1276 - protein, 579 aa, synthetic construct
MGFTTKIIFLYNLVLVYAGFDDPRKAIELVQKRYGRPCDCSGGQVSEPPSDRVSQVTCSGKTAYLMPDQRWKCKSIPKDTSPSGPLQECPCNSYQSSVHSSCYTSYQQCRSGNKTYYTATLLKTQTGGTSDVQVLGSTNKLIQSPCNGIKGQSICWSTTAPIHVSDGGGPLDTTRIKSVQRKLEEIHKALYPELQYHPLAIPKVRDNLMVDAQTLNILNATYNLLLMSNTSLVDDCWLCLKLGPPTPLAIPNFLLSYVTRSSDNISCLIIPPLLVQPMQFSNSSCLFSPSYNSTEEIDLGHVAFSNCTSITNVTGPICAVNGSVFLCGNNMAYTYLPTNWTGLCVLATLLPDIDIIPGDEPVPIPAIDHFIYRPKRAIQFIPLLAGLGITAAFTTGATGLGVSVTQYTKLSNQLISDVQILSSTIQDLQDQVDSLAEVVLQNRRGLDLLTAEQGGICLALQEKCCFYVNKSGIVRDKIKTLQEELERRRKDLASNPLWTGLQGLLPYLLPFLGPLLTLLLLLTIGPCIFNRLTAFINDKLNIIHAGSTSPVWWNSADIQHSGGRSSLEGPNKNSSQKRI

SEQ ID NO: 1277 - protein, 578 aa, synthetic construct
MGFTTKIIFLYNLVLVYAGFDDPRKAIELVQKRYGRPCDCSGGQVSEPPSDRVSQVTCSGKTAYLMPDQRWKCKSIPKDTSPSGPLQECPCNSYQSSVHSSCYTSYQQCRSGNKTYYTATLLKTQTGGTSDVQVLGSTNKLIQSPCNGIKGQSICWSTTAPIHVSDGGGPLDTTRIKSVQRKLEEIHKALYPELQYHPLAIPKVRDNLMVDAQTLNILNATYNLLLMSNTSLVDDCWLCLKLGPPTPLAIPNFLLSYVTRSSDNISCLIIPPLLVQPMQFSNSSCLFSPSYNSTEEIDLGHVAFSNCTSITNVTGPICAVNGSVFLCGNNMAYTYLPTNWTGLCVLATLLPDIDIIPGDEPVPIPAIDHFIYRPKRAIQFIPLLAGLGITAAFTTGATGLGVSVTQYTKLSNQLISDVQILSSTIQDLQDQVDSLAEVVLQNRRGLDLLTAEQGGICLALQEKCCFYVNKSGIVRDKIKTLQEELERRRKDLASNPLWTGLQGLLPYLLPFLGPLLTLLLLLTIGPCIFNRLTAFINDKLNIIHGSTSPVWWNSADIQHSGGRSSLEGPNKNSSQKRI

SEQ ID NO: 1278 - protein, 577 aa, synthetic construct
MGFTTKIIFLYNLVLVYAGFDDPRKAIELVQKRYGRPCDCSGGQVSEPPSDRVSQVTCSGKTAYLMPDQRWKCKSIPKDTSPSGPLQECPCNSYQSSVHSSCYTSYQQCRSGNKTYYTATLLKTQTGGTSDVQVLGSTNKLIQSPCNGIKGQSICWSTTAPIHVSDGGGPLDTTRIKSVQRKLEEIHKALYPELQYHPLAIPKVRDNLMVDAQTLNILNATYNLLLMSNTSLVDDCWLCLKLGPPTPLAIPNFLLSYVTRSSDNISCLIIPPLLVQPMQFSNSSCLFSPSYNSTEEIDLGHVAFSNCTSITNVTGPICAVNGSVFLCGNNMAYTYLPTNWTGLCVLATLLPDIDIIPGDEPVPIPAIDHFIYRPKRAIQFIPLLAGLGITAAFTTGATGLGVSVTQYTKLSNQLISDVQILSSTIQDLQDQVDSLAEVVLQNRRGLDLLTAEQGGICLALQEKCCFYVNKSGIVRDKIKTLQEELERRRKDLASNPLWTGLQGLLPYLLPFLGPLLTLLLLLTIGPCIFNRLTAFINDKLNIIGSTSPVWWNSADIQHSGGRSSLEGPNKNSSQKRI

SEQ ID NO: 1279 - protein, 576 aa, synthetic construct
MGFTTKIIFLYNLVLVYAGFDDPRKAIELVQKRYGRPCDCSGGQVSEPPSDRVSQVTCSGKTAYLMPDQRWKCKSIPKDTSPSGPLQECPCNSYQSSVHSSCYTSYQQCRSGNKTYYTATLLKTQTGGTSDVQVLGSTNKLIQSPCNGIKGQSICWSTTAPIHVSDGGGPLDTTRIKSVQRKLEEIHKALYPELQYHPLAIPKVRDNLMVDAQTLNILNATYNLLLMSNTSLVDDCWLCLKLGPPTPLAIPNFLLSYVTRSSDNISCLIIPPLLVQPMQFSNSSCLFSPSYNSTEEIDLGHVAFSNCTSITNVTGPICAVNGSVFLCGNNMAYTYLPTNWTGLCVLATLLPDIDIIPGDEPVPIPAIDHFIYRPKRAIQFIPLLAGLGITAAFTTGATGLGVSVTQYTKLSNQLISDVQILSSTIQDLQDQVDSLAEVVLQNRRGLDLLTAEQGGICLALQEKCCFYVNKSGIVRDKIKTLQEELERRRKDLASNPLWTGLQGLLPYLLPFLGPLLTLLLLLTIGPCIFNRLTAFINDKLNIGSTSPVWWNSADIQHSGGRSSLEGPNKNSSQKRI

SEQ ID NO: 1280 - protein, 575 aa, synthetic construct
MGFTTKIIFLYNLVLVYAGFDDPRKAIELVQKRYGRPCDCSGGQVSEPPSDRVSQVTCSGKTAYLMPDQRWKCKSIPKDTSPSGPLQECPCNSYQSSVHSSCYTSYQQCRSGNKTYYTATLLKTQTGGTSDVQVLGSTNKLIQSPCNGIKGQSICWSTTAPIHVSDGGGPLDTTRIKSVQRKLEEIHKALYPELQYHPLAIPKVRDNLMVDAQTLNILNATYNLLLMSNTSLVDDCWLCLKLGPPTPLAIPNFLLSYVTRSSDNISCLIIPPLLVQPMQFSNSSCLFSPSYNSTEEIDLGHVAFSNCTSITNVTGPICAVNGSVFLCGNNMAYTYLPTNWTGLCVLATLLPDIDIIPGDEPVPIPAIDHFIYRPKRAIQFIPLLAGLGITAAFTTGATGLGVSVTQYTKLSNQLISDVQILSSTIQDLQDQVDSLAEVVLQNRRGLDLLTAEQGGICLALQEKCCFYVNKSGIVRDKIKTLQEELERRRKDLASNPLWTGLQGLLPYLLPFLGPLLTLLLLLTIGPCIFNRLTAFINDKLNGSTSPVWWNSADIQHSGGRSSLEGPNKNSSQKRI

SEQ ID NO: 1281 - protein, 574 aa, synthetic construct
MGFTTKIIFLYNLVLVYAGFDDPRKAIELVQKRYGRPCDCSGGQVSEPPSDRVSQVTCSGKTAYLMPDQRWKCKSIPKDTSPSGPLQECPCNSYQSSVHSSCYTSYQQCRSGNKTYYTATLLKTQTGGTSDVQVLGSTNKLIQSPCNGIKGQSICWSTTAPIHVSDGGGPLDTTRIKSVQRKLEEIHKALYPELQYHPLAIPKVRDNLMVDAQTLNILNATYNLLLMSNTSLVDDCWLCLKLGPPTPLAIPNFLLSYVTRSSDNISCLIIPPLLVQPMQFSNSSCLFSPSYNSTEEIDLGHVAFSNCTSITNVTGPICAVNGSVFLCGNNMAYTYLPTNWTGLCVLATLLPDIDIIPGDEPVPIPAIDHFIYRPKRAIQFIPLLAGLGITAAFTTGATGLGVSVTQYTKLSNQLISDVQILSSTIQDLQDQVDSLAEVVLQNRRGLDLLTAEQGGICLALQEKCCFYVNKSGIVRDKIKTLQEELERRRKDLASNPLWTGLQGLLPYLLPFLGPLLTLLLLLTIGPCIFNRLTAFINDKLGSTSPVWWNSADIQHSGGRSSLEGPNKNSSQKRI

SEQ ID NO: 1282 - protein, 573 aa, synthetic construct
MGFTTKIIFLYNLVLVYAGFDDPRKAIELVQKRYGRPCDCSGGQVSEPPSDRVSQVTCSGKTAYLMPDQRWKCKSIPKDTSPSGPLQECPCNSYQSSVHSSCYTSYQQCRSGNKTYYTATLLKTQTGGTSDVQVLGSTNKLIQSPCNGIKGQSICWSTTAPIHVSDGGGPLDTTRIKSVQRKLEEIHKALYPELQYHPLAIPKVRDNLMVDAQTLNILNATYNLLLMSNTSLVDDCWLCLKLGPPTPLAIPNFLLSYVTRSSDNISCLIIPPLLVQPMQFSNSSCLFSPSYNSTEEIDLGHVAFSNCTSITNVTGPICAVNGSVFLCGNNMAYTYLPTNWTGLCVLATLLPDIDIIPGDEPVPIPAIDHFIYRPKRAIQFIPLLAGLGITAAFTTGATGLGVSVTQYTKLSNQLISDVQILSSTIQDLQDQVDSLAEVVLQNRRGLDLLTAEQGGICLALQEKCCFYVNKSGIVRDKIKTLQEELERRRKDLASNPLWTGLQGLLPYLLPFLGPLLTLLLLLTIGPCIFNRLTAFINDKGSTSPVWWNSADIQHSGGRSSLEGPNKNSSQKRI

SEQ ID NO: 1283 - protein, 538 aa, synthetic construct; identical to SEQ ID NO: 1215

SEQ ID NO: 1284 - protein, 20 aa, synthetic construct
MALPYHIFLFTVLLPSFTLT

SEQ ID NO: 1285 - protein, 423 aa, synthetic construct
APPPCRCMTSSSPYQEFLWRMQRPGNIDAPSYRSLSKGTPTFTAHTHMPRNCYHSATLCMHANTHYWTGKMINPSCPGGLGVTVCWTYFTQTGMSDGGGVQDQAREKHVKEVISQLTRVHGTSSPYKGLDLSKLHETLRTHTRLVSLFNTTLTGLHEVSAQNPTNCWICLPLNFRPYVSIPVPEQWNNFSTEINTTSVLVGPLVSNLEITHTSNLTCVKFSNTTYTTNSQCIRWVTPPTQIVCLPSGIFFVCGTSAYRCLNGSSESMCFLSFLVPPMTIYTEQDLYSYVISKPRNKRVPILPFVIGAGVLGALGTGIGGITTSTQFYYKLSQELNGDMERVADSLVTLQDQLNSLAAVVLQNRRALDLLTAERGGTCLFLGEECCYYVNQSGIVTEKVKEIRDRIQRRAEELRNTGPWGLLSQ

SEQ ID NO: 1286 - protein, 21 aa, synthetic construct
WMPWILPFLGPLAAIILLLLF

SEQ ID NO: 1287 - protein, 74 aa, synthetic construct
GPCIFNLLVNFVSSRIEAVKLQMEPKMQSKTKIYRRPLDRPASPRSDVNDIKGTPPEEISAAQPLLRPNSAGSS

SEQ ID NO: 1288 - protein, 464 aa, synthetic construct
MALPYHIFLFTVLLPSFTLTAPPPCRCMTSSSPYQEFLWRMQRPGNIDAPSYRSLSKGTPTFTAHTHMPRNCYHSATLCMHANTHYWTGKMINPSCPGGLGVTVCWTYFTQTGMSDGGGVQDQAREKHVKEVISQLTRVHGTSSPYKGLDLSKLHETLRTHTRLVSLFNTTLTGLHEVSAQNPTNCWICLPLNFRPYVSIPVPEQWNNFSTEINTTSVLVGPLVSNLEITHTSNLTCVKFSNTTYTTNSQCIRWVTPPTQIVCLPSGIFFVCGTSAYRCLNGSSESMCFLSFLVPPMTIYTEQDLYSYVISKPRNKRVPILPFVIGAGVLGALGTGIGGITTSTQFYYKLSQELNGDMERVADSLVTLQDQLNSLAAVVLQNRRALDLLTAERGGTCLFLGEECCYYVNQSGIVTEKVKEIRDRIQRRAEELRNTGPWGLLSQWMPWILPFLGPLAAIILLLLF

SEQ ID NO: 1289 - protein, 539 aa, synthetic construct; identical to SEQ ID NO: 1217

SEQ ID NO: 1290 - protein, 21 aa, synthetic construct
METDTLLLWVLLLWVPGSTGD

SEQ ID NO: 1291 - protein, 423 aa, synthetic construct; identical to SEQ ID NO: 1285

SEQ ID NO: 1292 - protein, 21 aa, synthetic construct
WMPWILPFLGPLAAIILLLLF

SEQ ID NO: 1293 - protein, 74 aa, synthetic construct; identical to SEQ ID NO: 1287

SEQ ID NO: 1294 - protein, 519 aa, synthetic construct
MALPYHIFLFTVLLPSFTLTAPPPCRCMTSSSPYQEFLWRMQRPGNIDAPSYRSLSKGTPTFTAHTHMPRNCYHSATLCMHANTHYWTGKMINPSCPGGLGVTVCWTYFTQTGMSDGGGVQDQAREKHVKEVISQLTRVHGTSSPYKGLDLSKLHETLRTHTRLVSLFNTTLTGLHEVSAQNPTNCWICLPLNFRPYVSIPVPEQWNNFSTEINTTSVLVGPLVSNLEITHTSNLTCVKFSNTTYTTNSQCIRWVTPPTQIVCLPSGIFFVCGTSAYRCLNGSSESMCFLSFLVPPMTIYTEQDLYSYVISKPRNKRVPILPFVIGAGVLGALGTGIGGITTSTQFYYKLSQELNGDMERVADSLVTLQDQLNSLAAVVLQNRRALDLLTAERGGTCLFLGEECCYYVNQSGIVTEKVKEIRDRIQRRAEELRNTGPWGLLSQWMPWILPFLGPLAAIILLLLFGPCIFNLLVNFVSSRIEAVKLGSTSPVWWNSADIQHSGGRSSLEGPNKNSSQKRI

SEQ ID NO: 1295 - protein, 520 aa, synthetic construct
METDTLLLWVLLLWVPGSTGDAPPPCRCMTSSSPYQEFLWRMQRPGNIDAPSYRSLSKGTPTFTAHTHMPRNCYHSATLCMHANTHYWTGKMINPSCPGGLGVTVCWTYFTQTGMSDGGGVQDQAREKHVKEVISQLTRVHGTSSPYKGLDLSKLHETLRTHTRLVSLFNTTLTGLHEVSAQNPTNCWICLPLNFRPYVSIPVPEQWNNFSTEINTTSVLVGPLVSNLEITHTSNLTCVKFSNTTYTTNSQCIRWVTPPTQIVCLPSGIFFVCGTSAYRCLNGSSESMCFLSFLVPPMTIYTEQDLYSYVISKPRNKRVPILPFVIGAGVLGALGTGIGGITTSTQFYYKLSQELNGDMERVADSLVTLQDQLNSLAAVVLQNRRALDLLTAERGGTCLFLGEECCYYVNQSGIVTEKVKEIRDRIQRRAEELRNTGPWGLLSQWMPWILPFLGPLAAIILLLLFGPCIFNLLVNFVSSRIEAVKLGSTSPVWWNSADIQHSGGRSSLEGPNKNSSQKRI

SEQ ID NO: 1296 - protein, 481 aa, synthetic construct
METDTLLLWVLLLWVPGSTGDAPPPCRCMTSSSPYQEFLWRMQRPGNIDAPSYRSLSKGTPTFTAHTHMPRNCYHSATLCMHANTHYWTGKMINPSCPGGLGVTVCWTYFTQTGMSDGGGVQDQAREKHVKEVISQLTRVHGTSSPYKGLDLSKLHETLRTHTRLVSLFNTTLTGLHEVSAQNPTNCWICLPLNFRPYVSIPVPEQWNNFSTEINTTSVLVGPLVSNLEITHTSNLTCVKFSNTTYTTNSQCIRWVTPPTQIVCLPSGIFFVCGTSAYRCLNGSSESMCFLSFLVPPMTIYTEQDLYSYVISKPRNKRVPILPFVIGAGVLGALGTGIGGITTSTQFYYKLSQELNGDMERVADSLVTLQDQLNSLAAVVLQNRRALDLLTAERGGTCLFLGEECCYYVNQSGIVTEKVKEIRDRIQRRAEELRNTGPWGLLSQWMPWILPFLGPLAAIILLLLFGPCIFNLLVNFVSSRI

SEQ ID NO: 1297 - protein, 484 aa, synthetic construct
METDTLLLWVLLLWVPGSTGDAPPPCRCMTSSSPYQEFLWRMQRPGNIDAPSYRSLSKGTPTFTAHTHMPRNCYHSATLCMHANTHYWTGKMINPSCPGGLGVTVCWTYFTQTGMSDGGGVQDQAREKHVKEVISQLTRVHGTSSPYKGLDLSKLHETLRTHTRLVSLFNTTLTGLHEVSAQNPTNCWICLPLNFRPYVSIPVPEQWNNFSTEINTTSVLVGPLVSNLEITHTSNLTCVKFSNTTYTTNSQCIRWVTPPTQIVCLPSGIFFVCGTSAYRCLNGSSESMCFLSFLVPPMTIYTEQDLYSYVISKPRNKRVPILPFVIGAGVLGALGTGIGGITTSTQFYYKLSQELNGDMERVADSLVTLQDQLNSLAAVVLQNRRALDLLTAERGGTCLFLGEECCYYVNQSGIVTEKVKEIRDRIQRRAEELRNTGPWGLLSQWMPWILPFLGPLAAIILLLLFGPCIFNLLVNFVSSRIEAV

SEQ ID NO: 1298 - protein, 484 aa, synthetic construct; identical to SEQ ID NO: 1297

SEQ ID NO: 1299 - protein, 485 aa, synthetic construct
METDTLLLWVLLLWVPGSTGDAPPPCRCMTSSSPYQEFLWRMQRPGNIDAPSYRSLSKGTPTFTAHTHMPRNCYHSATLCMHANTHYWTGKMINPSCPGGLGVTVCWTYFTQTGMSDGGGVQDQAREKHVKEVISQLTRVHGTSSPYKGLDLSKLHETLRTHTRLVSLFNTTLTGLHEVSAQNPTNCWICLPLNFRPYVSIPVPEQWNNFSTEINTTSVLVGPLVSNLEITHTSNLTCVKFSNTTYTTNSQCIRWVTPPTQIVCLPSGIFFVCGTSAYRCLNGSSESMCFLSFLVPPMTIYTEQDLYSYVISKPRNKRVPILPFVIGAGVLGALGTGIGGITTSTQFYYKLSQELNGDMERVADSLVTLQDQLNSLAAVVLQNRRALDLLTAERGGTCLFLGEECCYYVNQSGIVTEKVKEIRDRIQRRAEELRNTGPWGLLSQWMPWILPFLGPLAAIILLLLFGPCIFNLLVNFVSSRIEAVK

SEQ ID NO: 1300 - protein, 486 aa, synthetic construct
METDTLLLWVLLLWVPGSTGDAPPPCRCMTSSSPYQEFLWRMQRPGNIDAPSYRSLSKGTPTFTAHTHMPRNCYHSATLCMHANTHYWTGKMINPSCPGGLGVTVCWTYFTQTGMSDGGGVQDQAREKHVKEVISQLTRVHGTSSPYKGLDLSKLHETLRTHTRLVSLFNTTLTGLHEVSAQNPTNCWICLPLNFRPYVSIPVPEQWNNFSTEINTTSVLVGPLVSNLEITHTSNLTCVKFSNTTYTTNSQCIRWVTPPTQIVCLPSGIFFVCGTSAYRCLNGSSESMCFLSFLVPPMTIYTEQDLYSYVISKPRNKRVPILPFVIGAGVLGALGTGIGGITTSTQFYYKLSQELNGDMERVADSLVTLQDQLNSLAAVVLQNRRALDLLTAERGGTCLFLGEECCYYVNQSGIVTEKVKEIRDRIQRRAEELRNTGPWGLLSQWMPWILPFLGPLAAIILLLLFGPCIFNLLVNFVSSRIEAVKL

SEQ ID NO: 1301 - protein, 487 aa, synthetic construct
METDTLLLWVLLLWVPGSTGDAPPPCRCMTSSSPYQEFLWRMQRPGNIDAPSYRSLSKGTPTFTAHTHMPRNCYHSATLCMHANTHYWTGKMINPSCPGGLGVTVCWTYFTQTGMSDGGGVQDQAREKHVKEVISQLTRVHGTSSPYKGLDLSKLHETLRTHTRLVSLFNTTLTGLHEVSAQNPTNCWICLPLNFRPYVSIPVPEQWNNFSTEINTTSVLVGPLVSNLEITHTSNLTCVKFSNTTYTTNSQCIRWVTPPTQIVCLPSGIFFVCGTSAYRCLNGSSESMCFLSFLVPPMTIYTEQDLYSYVISKPRNKRVPILPFVIGAGVLGALGTGIGGITTSTQFYYKLSQELNGDMERVADSLVTLQDQLNSLAAVVLQNRRALDLLTAERGGTCLFLGEECCYYVNQSGIVTEKVKEIRDRIQRRAEELRNTGPWGLLSQWMPWILPFLGPLAAIILLLLFGPCIFNLLVNFVSSRIEAVKLQ

SEQ ID NO: 1302 - protein, 488 aa, synthetic construct
METDTLLLWVLLLWVPGSTGDAPPPCRCMTSSSPYQEFLWRMQRPGNIDAPSYRSLSKGTPTFTAHTHMPRNCYHSATLCMHANTHYWTGKMINPSCPGGLGVTVCWTYFTQTGMSDGGGVQDQAREKHVKEVISQLTRVHGTSSPYKGLDLSKLHETLRTHTRLVSLFNTTLTGLHEVSAQNPTNCWICLPLNFRPYVSIPVPEQWNNFSTEINTTSVLVGPLVSNLEITHTSNLTCVKFSNTTYTTNSQCIRWVTPPTQIVCLPSGIFFVCGTSAYRCLNGSSESMCFLSFLVPPMTIYTEQDLYSYVISKPRNKRVPILPFVIGAGVLGALGTGIGGITTSTQFYYKLSQELNGDMERVADSLVTLQDQLNSLAAVVLQNRRALDLLTAERGGTCLFLGEECCYYVNQSGIVTEKVKEIRDRIQRRAEELRNTGPWGLLSQWMPWILPFLGPLAAIILLLLFGPCIFNLLVNFVSSRIEAVKLQM

SEQ ID NO: 1303 - protein, 505 aa, synthetic construct
METDTLLLWVLLLWVPGSTGDAPPPCRCMTSSSPYQEFLWRMQRPGNIDAPSYRSLSKGTPTFTAHTHMPRNCYHSATLCMHANTHYWTGKMINPSCPGGLGVTVCWTYFTQTGMSDGGGVQDQAREKHVKEVISQLTRVHGTSSPYKGLDLSKLHETLRTHTRLVSLFNTTLTGLHEVSAQNPTNCWICLPLNFRPYVSIPVPEQWNNFSTEINTTSVLVGPLVSNLEITHTSNLTCVKFSNTTYTTNSQCIRWVTPPTQIVCLPSGIFFVCGTSAYRCLNGSSESMCFLSFLVPPMTIYTEQDLYSYVISKPRNKRVPILPFVIGAGVLGALGTGIGGITTSTQFYYKLSQELNGDMERVADSLVTLQDQLNSLAAVVLQNRRALDLLTAERGGTCLFLGEECCYYVNQSGIVTEKVKEIRDRIQRRAEELRNTGPWGLLSQWMPWILPFLGPLAAIILLLLFGPCIFNLLVNFVSSRIEAVKLQMEPKMQSKTKIYRRPLDR

SEQ ID NO: 1304 - protein, 516 aa, synthetic construct
METDTLLLWVLLLWVPGSTGDAPPPCRCMTSSSPYQEFLWRMQRPGNIDAPSYRSLSKGTPTFTAHTHMPRNCYHSATLCMHANTHYWTGKMINPSCPGGLGVTVCWTYFTQTGMSDGGGVQDQAREKHVKEVISQLTRVHGTSSPYKGLDLSKLHETLRTHTRLVSLFNTTLTGLHEVSAQNPTNCWICLPLNFRPYVSIPVPEQWNNFSTEINTTSVLVGPLVSNLEITHTSNLTCVKFSNTTYTTNSQCIRWVTPPTQIVCLPSGIFFVCGTSAYRCLNGSSESMCFLSFLVPPMTIYTEQDLYSYVISKPRNKRVPILPFVIGAGVLGALGTGIGGITTSTQFYYKLSQELNGDMERVADSLVTLQDQLNSLAAVVLQNRRALDLLTAERGGTCLFLGEECCYYVNQSGIVTEKVKEIRDRIQRRAEELRNTGPWGLLSQWMPWILPFLGPLAAIILLLLFGPCIFNLLVNFVSSRIEAVKLQMEPKMQSKTKIYRRPLDRPASPRSDVNDI

SEQ ID NO: 1305 - protein, 498 aa, synthetic construct
METDTLLLWVLLLWVPGSTGDAPPPCRCMTSSSPYQEFLWRMQRPGNIDAPSYRSLSKGTPTFTAHTHMPRNCYHSATLCMHANTHYWTGKMINPSCPGGLGVTVCWTYFTQTGMSDGGGVQDQAREKHVKEVISQLTRVHGTSSPYKGLDLSKLHETLRTHTRLVSLFNTTLTGLHEVSAQNPTNCWICLPLNFRPYVSIPVPEQWNNFSTEINTTSVLVGPLVSNLEITHTSNLTCVKFSNTTYTTNSQCIRWVTPPTQIVCLPSGIFFVCGTSAYRCLNGSSESMCFLSFLVPPMTIYTEQDLYSYVISKPRNKRVPILPFVIGAGVLGALGTGIGGITTSTQFYYKLSQELNGDMERVADSLVTLQDQLNSLAAVVLQNRRALDLLTAERGGTCLFLGEECCYYVNQSGIVTEKVKEIRDRIQRRAEELRNTGPWGLLSQWMPWILPFLGPLAAIILLLLFGPCIFNLLVNFVSSRIEAVKLQMEPKMQSKTKI

SEQ ID NO: 1306 - protein, 525 aa, synthetic construct
METDTLLLWVLLLWVPGSTGDAPPPCRCMTSSSPYQEFLWRMQRPGNIDAPSYRSLSKGTPTFTAHTHMPRNCYHSATLCMHANTHYWTGKMINPSCPGGLGVTVCWTYFTQTGMSDGGGVQDQAREKHVKEVISQLTRVHGTSSPYKGLDLSKLHETLRTHTRLVSLFNTTLTGLHEVSAQNPTNCWICLPLNFRPYVSIPVPEQWNNFSTEINTTSVLVGPLVSNLEITHTSNLTCVKFSNTTYTTNSQCIRWVTPPTQIVCLPSGIFFVCGTSAYRCLNGSSESMCFLSFLVPPMTIYTEQDLYSYVISKPRNKRVPILPFVIGAGVLGALGTGIGGITTSTQFYYKLSQELNGDMERVADSLVTLQDQLNSLAAVVLQNRRALDLLTAERGGTCLFLGEECCYYVNQSGIVTEKVKEIRDRIQRRAEELRNTGPWGLLSQWMPWILPFLGPLAAIILLLLFGPCIFNLLVNFVSSRIEAVKLQMEPKMQSKTKIYRRPLDRPASPRSDVNDIKGTPPEEIS

SEQ ID NO: 1307 - protein, 479 aa, synthetic construct
METDTLLLWVLLLWVPGSTGDAPPPCRCMTSSSPYQEFLWRMQRPGNIDAPSYRSLSKGTPTFTAHTHMPRNCYHSATLCMHANTHYWTGKMINPSCPGGLGVTVCWTYFTQTGMSDGGGVQDQAREKHVKEVISQLTRVHGTSSPYKGLDLSKLHETLRTHTRLVSLFNTTLTGLHEVSAQNPTNCWICLPLNFRPYVSIPVPEQWNNFSTEINTTSVLVGPLVSNLEITHTSNLTCVKFSNTTYTTNSQCIRWVTPPTQIVCLPSGIFFVCGTSAYRCLNGSSESMCFLSFLVPPMTIYTEQDLYSYVISKPRNKRVPILPFVIGAGVLGALGTGIGGITTSTQFYYKLSQELNGDMERVADSLVTLQDQLNSLAAVVLQNRRALDLLTAERGGTCLFLGEECCYYVNQSGIVTEKVKEIRDRIQRRAEELRNTGPWGLLSQWMPWILPFLGPLAAIILLLLFGPCIFNLLVNFVSS

SEQ ID NO: 1308 - protein, 478 aa, synthetic construct
METDTLLLWVLLLWVPGSTGDAPPPCRCMTSSSPYQEFLWRMQRPGNIDAPSYRSLSKGTPTFTAHTHMPRNCYHSATLCMHANTHYWTGKMINPSCPGGLGVTVCWTYFTQTGMSDGGGVQDQAREKHVKEVISQLTRVHGTSSPYKGLDLSKLHETLRTHTRLVSLFNTTLTGLHEVSAQNPTNCWICLPLNFRPYVSIPVPEQWNNFSTEINTTSVLVGPLVSNLEITHTSNLTCVKFSNTTYTTNSQCIRWVTPPTQIVCLPSGIFFVCGTSAYRCLNGSSESMCFLSFLVPPMTIYTEQDLYSYVISKPRNKRVPILPFVIGAGVLGALGTGIGGITTSTQFYYKLSQELNGDMERVADSLVTLQDQLNSLAAVVLQNRRALDLLTAERGGTCLFLGEECCYYVNQSGIVTEKVKEIRDRIQRRAEELRNTGPWGLLSQWMPWILPFLGPLAAIILLLLFGPCIFNLLVNFVS

SEQ ID NO: 1309 - protein, 526 aa, synthetic construct
METDTLLLWVLLLWVPGSTGDAPPPCRCMTSSSPYQEFLWRMQRPGNIDAPSYRSLSKGTPTFTAHTHMPRNCYHSATLCMHANTHYWTGKMINPSCPGGLGVTVCWTYFTQTGMSDGGGVQDQAREKHVKEVISQLTRVHGTSSPYKGLDLSKLHETLRTHTRLVSLFNTTLTGLHEVSAQNPTNCWICLPLNFRPYVSIPVPEQWNNFSTEINTTSVLVGPLVSNLEITHTSNLTCVKFSNTTYTTNSQCIRWVTPPTQIVCLPSGIFFVCGTSAYRCLNGSSESMCFLSFLVPPMTIYTEQDLYSYVISKPRNKRVPILPFVIGAGVLGALGTGIGGITTSTQFYYKLSQELNGDMERVADSLVTLQDQLNSLAAVVLQNRRALDLLTAERGGTCLFLGEECCYYVNQSGIVTEKVKEIRDRIQRRAEELRNTGPWGLLSQWMPWILPFLGPLAAIILLLLFGPCIFNLLVNFVSSRIEAVKLQMEPKMQSKTKIYRRPLDRPASPRSDVNDIKGTPPEEISA

SEQ ID NO: 1310 - protein, 529 aa, synthetic construct
METDTLLLWVLLLWVPGSTGDAPPPCRCMTSSSPYQEFLWRMQRPGNIDAPSYRSLSKGTPTFTAHTHMPRNCYHSATLCMHANTHYWTGKMINPSCPGGLGVTVCWTYFTQTGMSDGGGVQDQAREKHVKEVISQLTRVHGTSSPYKGLDLSKLHETLRTHTRLVSLFNTTLTGLHEVSAQNPTNCWICLPLNFRPYVSIPVPEQWNNFSTEINTTSVLVGPLVSNLEITHTSNLTCVKFSNTTYTTNSQCIRWVTPPTQIVCLPSGIFFVCGTSAYRCLNGSSESMCFLSFLVPPMTIYTEQDLYSYVISKPRNKRVPILPFVIGAGVLGALGTGIGGITTSTQFYYKLSQELNGDMERVADSLVTLQDQLNSLAAVVLQNRRALDLLTAERGGTCLFLGEECCYYVNQSGIVTEKVKEIRDRIQRRAEELRNTGPWGLLSQWMPWILPFLGPLAAIILLLLFGPCIFNLLVNFVSSRIEAVKLQMEPKMQSKTKIYRRPLDRPASPRSDVNDIKGTPPEEISAAQP

SEQ ID NO: 1311 - protein, 532 aa, synthetic construct
METDTLLLWVLLLWVPGSTGDAPPPCRCMTSSSPYQEFLWRMQRPGNIDAPSYRSLSKGTPTFTAHTHMPRNCYHSATLCMHANTHYWTGKMINPSCPGGLGVTVCWTYFTQTGMSDGGGVQDQAREKHVKEVISQLTRVHGTSSPYKGLDLSKLHETLRTHTRLVSLFNTTLTGLHEVSAQNPTNCWICLPLNFRPYVSIPVPEQWNNFSTEINTTSVLVGPLVSNLEITHTSNLTCVKFSNTTYTTNSQCIRWVTPPTQIVCLPSGIFFVCGTSAYRCLNGSSESMCFLSFLVPPMTIYTEQDLYSYVISKPRNKRVPILPFVIGAGVLGALGTGIGGITTSTQFYYKLSQELNGDMERVADSLVTLQDQLNSLAAVVLQNRRALDLLTAERGGTCLFLGEECCYYVNQSGIVTEKVKEIRDRIQRRAEELRNTGPWGLLSQWMPWILPFLGPLAAIILLLLFGPCIFNLLVNFVSSRIEAVKLQMEPKMQSKTKIYRRPLDRPASPRSDVNDIKGTPPEEISAAQPLLR

SEQ ID NO: 1312 - protein, 525 aa, synthetic construct
METDTLLLWVLLLWVPGSTGDAPPPCRCMTSSSPYQEFLWRMQRPGNIDAPSYRSLSKGTPTFTAHTHMPRNCYHSATLCMHANTHYWTGKMINPSCPGGLGVTVCWTYFTQTGMSDGGGVQDQAREKHVKEVISQLTRVHGTSSPYKGLDLSKLHETLRTHTRLVSLFNTTLTGLHEVSAQNPTNCWICLPLNFRPYVSIPVPEQWNNFSTEINTTSVLVGPLVSNLEITHTSNLTCVKFSNTTYTTNSQCIRWVTPPTQIVCLPSGIFFVCGTSAYRCLNGSSESMCFLSFLVPPMTIYTEQDLYSYVISKPRNKRVPILPFVIGAGVLGALGTGIGGITTSTQFYYKLSQELNGDMERVADSLVTLQDQLNSLAAVVLQNRRALDLLTAERGGTCLFLGEECCYYVNQSGIVTEKVKEIRDRIQRRAEELRNTGPWGLLSHWMPWILPFLGPLAAIILLLLFGPCIFNLLVNFVSSRIEAVKLQMEPKMQSKTKIYRRPLDRPASPRSDVNDIKGTPPEEIS

SEQ ID NO: 1313 - protein, 9 aa, synthetic construct
GGGGGGGGG

SEQ ID NO: 1314 - protein, 124 aa, synthetic construct
GSDLGIKLLFAAAKGQDDEVRILLAAGADVNAKDFEGYTPLHVAAYDGHLEIVEVLLKAGADVNAKDSQGRTPLHEAAYSGHLEIVEVLLKAGADVNAQDDAGETPADLAAAWGHEDIAEVLQK

SEQ ID NO: 1315 - protein, 90 aa, synthetic construct
MLPAPKNLVVSRITEDSARLSWTAPDAAFDSFPIRYIETLIWGEAIWLDVPGSERSYDLTGLKPGTEYAVVITGVKGGRFSSPLVASFTT

SEQ ID NO: 1316 - protein, 192 aa, synthetic construct
GMRTEDLPKAVVFLEPQWYRVLEKDSVTLKCQGAYSPEDNSTQWFHNESLISSQASSYFIDAATVDDSGEYRCQTNLSTLSDPVQLEVHIGWLLLQAPRWVFKEEDPIHLRCHSWKNTALHKVTYLQNGKGRKYFHHNSDFYIPKATLKDSGSYFCRGLVGSKNVSSETVNITITQGLAVSTISSFFPPGYQ

SEQ ID NO: 1317 - protein, 307 aa, synthetic construct
MALPVTALLLPLALLLHAARPLFNQEVQIPLTESYCGPCPKNWICYKNNCYQFFDESKNWYESQASCMSQNASLLKVYSKEDQDLLKLVKSYHWMGLVHIPTNGSWQWEDGSILSPNLLTIIEMQKGDCALYASSFKGYIENCSTPNTYICMQRTVGGGGSGGGGSGGGGSDLFNQEVQIPLTESYCGPCPKNWICYKNNCYQFFDESKNWYESQASCMSQNASLLKVYSKEDQDLLKLVKSYHWMGLVHIPTNGSWQWEDGSILSPNLLTIIEMQKGDCALYASSFKGYIENCSTPNTYICMQRTV

SEQ ID NO: 1318 - protein, 187 aa, synthetic construct
MELTDLLLAAMLLAVARLTLSSPVAPACDPRLLNKLLRDSHLLHSRLSQCPDVDPLSIPVLLPAVDFSLGEWKTQTEQSKAQDILGAVSLLLEGVMAARGQLEPSCLSSLLGQLSGQVRLLLGALQGLLGTQLPLQGRTTAHKDPNALFLSLQQLLRGKVRFLLLVEGPTLCVRRTLPTTAVPSSTS

SEQ ID NO: 1319 - protein, 327 aa, synthetic construct
MALPVTALLLPLALLLHAARPEVQLLESGGGLIQPGGSLRLSCAASGFTFSSHAMTWVRQAPGKGLEWVSAISGSGDYTHYADSVKGRFTISRDNSKNTVYLQMNSLRAEDSAVYYCAKDEDGGSLLGHRGQGTLVTVSSTRGGGGSEPHSLSYDITVIPKFRPGPRWCAVQGQVDEKTFLHYDCGNKTVTPVSPLGKKLNVTTAWKAQNPVLREVVDILTEQLWDIQLENYTPKEPLTLQARMSCEQKAEGHSSGSWQFSFDGQIFLLFDSEKRMWTTVHPGARKMKEKWENDKVVATLLWGWSMGDCIGWLEDFLMGMDSTLEPS

SEQ ID NO: 1320 - protein, 51 aa, synthetic construct
MDPDLEIRAAFLRQRNTALRTEVAELEQEVQRLENEVSQYETRYGPLGGGK

SEQ ID NO: 1321 - protein, 51 aa, synthetic construct
MDPDLEIEAAFLERENTALETRVAELRQRVQRLRNRVSQYRTRYGPLGGGK

SEQ ID NO: 1322 - protein, 28 aa, synthetic construct
EVAALEKEVAALEKEVAALEKEVAALEK

SEQ ID NO: 1323 - protein, 28 aa, synthetic construct
KVAALKEKVAALKEKVAALKEKVAALKE

SEQ ID NO: 1324 - protein, 135 aa, synthetic construct
LFNQEVQIPLTESYCGPCPKNWICYKNNCYQFFDESKNWYESQASCMSQNASLLKVYSKEDQDLLKLVKSAHWMGLVHIPTNGSWQWEDGSILSPNLLTIIEMQKGDCALYASSFKGFIENCSTPNTYICMQRTV

SEQ ID NO: 1325 - protein, 135 aa, synthetic construct
LFNQEVQIPLTESYCGPCPKNWICYKNNCYQFFDESKNWYESQASCMSQNASLLKVYSKEDQDLLKLVKSAHWMGLVHIPTNGSWQWEDGSILSPNLLTIIEMQKGDCALYASSFKGYIENCSTPNTYICMQRTV

SEQ ID NO: 1326 - protein, 286 aa, synthetic construct
LFNQEVQIPLTESYCGPCPKNWICYKNNCYQFFDESKNWYESQASCMSQNASLLKVYSKEDQDLLKLVKSAHWMGLVHIPTNGSWQWEDGSILSPNLLTIIEMQKGDCALYASSFKGFIENCSTPNTYICMQRTVGGGGSGGGGSGGGGSDLFNQEVQIPLTESYCGPCPKNWICYKNNCYQFFDESKNWYESQASCMSQNASLLKVYSKEDQDLLKLVKSAHWMGLVHIPTNGSWQWEDGSILSPNLLTIIEMQKGDCALYASSFKGFIENCSTPNTYICMQRTV

SEQ ID NO: 1327 - protein, 286 aa, synthetic construct
LFNQEVQIPLTESYCGPCPKNWICYKNNCYQFFDESKNWYESQASCMSQNASLLKVYSKEDQDLLKLVKSAHWMGLVHIPTNGSWQWEDGSILSPNLLTIIEMQKGDCALYASSFKGYIENCSTPNTYICMQRTVSGGGGSGGGGSGGGGDLFNQEVQIPLTESYCGPCPKNWICYKNNCYQFFDESKNWYESQASCMSQNASLLKVYSKEDQDLLKLVKSAHWMGLVHIPTNGSWQWEDGSILSPNLLTIIEMQKGDCALYASSFKGYIENCSTPNTYICMQRTV

SEQ ID NO: 1328 - protein, 180 aa, synthetic construct
EPHSLSYDITVIPKFRPGPRWCAVQGQVDEKTFLHYDCGNKTVTPVSPLGKKLNVTTAWKAQNPVLREVVDILTEQLWDIQLENYTPKEPLTLQARMSCEQKAEGHSSGSWQFSFDGQIFLLFDSEKRMWTTVHPGARKMKEKWENDKVVATLLWGWSMGDCIGWLEDFLMGMDSTLEPS

SEQ ID NO: 1329 - protein, 180 aa, synthetic construct
EPHSLSYDITVIPKFRPGPRWCAVQGQVDEKTFLHYDCGNKTVTPVSPLGKKLNVTTAWKAQNPVLREVVDILTEQLWDIQLENYTPKEPLTLQARMSCEQKAEGHSSGSWQFSFDGQIFLLFDSEKRMWTTVHPGARKMKEKWENDKVVATKLYLWSMGDCIGWLEDFLMGMDSTLEPS

SEQ ID NO: 1330 - protein, 15 aa, synthetic construct
GGGGSGGGGSGGGGS

SEQ ID NO: 1331 - protein, 6 aa, synthetic construct
SGGGGS

SEQ ID NO: 1332 - protein, 141 aa, synthetic construct
DIQNPDPAVYQLRDSKSSDKSVCLFTDFDSQTNVSQSKDSDVYITDKTVLDMRSMDFKSNSAVAWSNKSDFACANAFNNSIIPEDTFFPSPESSCDVKLVEKSFETDTNLNFQNLSVIGFRILLLKVAGFNLLMTLRLWSS

SEQ ID NO: 1333 - protein, 140 aa, synthetic construct
IQNPDPAVYQLRDSKSSDKSVCLFTDFDSQTNVSQSKDSDVYITDKTVLDMRSMDFKSNSAVAWSNKSDFACANAFNNSIIPEDTFFPSPESSCDVKLVEKSFETDTNLNFQNLSVIGFRILLLKVAGFNLLMTLRLWSS

SEQ ID NO: 1334 - protein, 140 aa, synthetic construct
IQNPDPAVYQLRDSKSSDKSVCLFTDFDSQTNVSQSKDSDVYITDKCVLDMRSMDFKSNSAVAWSNKSDFACANAFNNSIIPEDTFFPSSDVPCDVKLVEKSFETDTNLNFQNLSVIGFRILLLKVAGFNLLMTLRLWSS

SEQ ID NO: 1335 - protein, 140 aa, synthetic construct; identical to SEQ ID NO: 1333

SEQ ID NO: 1336 - protein, 137 aa, synthetic construct
PDPAVYQLRDSKSSDKSVCLFTDFDSQTNVSQSKDSDVYITDKTVLDMRSMDFKSNSAVAWSNKSDFACANAFNNSIIPEDTFFPSPESSCDVKLVEKSFETDTNLNFQNLSVIGFRILLLKVAGFNLLMTLRLWSS

SEQ ID NO: 1337 - protein, 140 aa, synthetic construct
IQNPDPAVYQLRDSKSSDKSVCLFTDFDSQTNVSQSKDSDVYITDKCVLDMRSMDFKSNSAVAWSNKSDFACANAFNNSIIPEDTFFPSPESSCDVKLVEKSFETDTNLNFQNLSVIGFRILLLKVAGFNLLMTLRLWSS

SEQ ID NO: 1338 - protein, 137 aa, synthetic construct
PDPAVYQLRDSKSSDKSVCLFTDFDSQTNVSQSKDSDVYITDKCVLDMRSMDFKSNSAVAWSNKSDFACANAFNNSIIPEDTFFPSPESSCDVKLVEKSFETDTNLNFQNLSVIGFRILLLKVAGFNLLMTLRLWSS

SEQ ID NO: 1339 - protein, 140 aa, synthetic construct
IQNPDPAVYQLRDSKSSDKSVCLFTDFDSQTNVSQSKDSDVYITDKTVLDMRSMDFKSNSAVAWSNKSDFACANAFNNSIIPEDTFFPSSDVPCDVKLVEKSFETDTNLNFQNLSVIGFRILLLKVAGFNLLMTLRLWSS

SEQ ID NO: 1340 - protein, 140 aa, synthetic construct
IQNPDPAVYQLRDSKSSDKSVCLFTDFDSQTNVSQSKDSDVYITDKTVLDMRSMDFKSNRAVAWSNKSDFACANAFNNSIIPEDTFFPSPESSCDVKLVEKSFETDTNLNFQNLSVIGFRILLLKVAGFNLLMTLRLWSS

SEQ ID NO: 1341 - protein, 140 aa, synthetic construct
IQNPDPAVYQLRDSKSSDKSVCLFTDFDSQTNVSQSKDSDVYITDKTVLDMRSMDFKSNRAVAWSNKSDFACANAFNNSIIPEDTFFPSSDVPCDVKLVEKSFETDTNLNFQNLSVIGFRILLLKVAGFNLLMTLRLWSS

SEQ ID NO: 1342 - protein, 140 aa, synthetic construct
IQNPDPAVYQLRDSKSSDKSVCLFTDFDSQTNVSQSKDSDVYITDKTVLDMRSMDFKSNSAVAWSNKSDFACANAFNNSIIPEDTFFPSSDSSCDVKLVEKSFETDTNLNFQNLSVIGFRILLLKVAGFNLLMTLRLWSS

SEQ ID NO: 1343 - protein, 140 aa, synthetic construct
IQNPDPAVYQLRDSKSSDKSVCLFTDFDSQTNVSQSKDSDVYITDKCVLDMRSMDFKSNSAVAWSNKSDFACANAFNNSIIPEDTFFPSPESSCDVKLVEKSFETDTNLNFQNLLVIVLRILLLKVAGFNLLMTLRLWSS

SEQ ID NO: 1344 - protein, 140 aa, synthetic construct; identical to SEQ ID NO: 1343

SEQ ID NO: 1345 - protein, 140 aa, synthetic construct
IQNPDPAVYQLRDSKSSDKFVCLFTDFDSQINVSQSKDSDVYITDKCVLDMRSMDFKSNSAVAWSNKSDFTCANAFNNSIIPEDTFFPSPESSCDVKLVEKSFETDTNLNFQNLSVIGFRILLLKVAGFNLLMTLRLWSS

SEQ ID NO: 1346 - protein, 140 aa, synthetic construct
IQNPDPAVYQLRDSKSSDKSVCLFTDFDSQTNVSQSKDSDVYITDKTVLDMRSMDFKSNSAVAWSSKSDFACANAFNNSIIPEDTFFPSPEMACDVKLVEKSFETDTNLNFQNLLVIWLRILLLKVAGFNLLMTLRLWSS

SEQ ID NO: 1347 - protein, 140 aa, synthetic construct
IQNPDPAVYQLRDSKSSDKSVCLFTDFDSQTNVSQSKDSDVYITDKTVLDMRSMDFKSNSAVAWSTKSDFACANAFNNSIIPEDTFFPSPEVVCDVKLVEKSFETDTNLNFQNLVVIGARILLLKVAGFNLLMTLRLWSS

SEQ ID NO: 1348 - protein, 107 aa, synthetic construct
IQNPDPAVYITDKTVLDMRSMDFKSNSAVAWSNKSDFACANAFNNSIIPEDTFFPSPESSCDVKLVEKSFETDTNLNFQNLSVIGFRILLLKVAGFNLLMTLRLWSS

SEQ ID NO: 1349 - protein, 136 aa, synthetic construct
IQNPEPAVYQLKDPRSQDSTLCLFTDFDSQINVPKTMESGTFITDKTVLDMKAMDSKSNGAIAWSNQTSFTCQDIFKETNATYPSSDVPCDATLTEKSFETDMNLNFQNLSVMGLRILLLKVAGFNLLMTLRLWSS

SEQ ID NO: 1350 - protein, 136 aa, synthetic construct
IQNPEPAVYQLKDPRSQDSTLCLFTDFDSQINVPKTMESGTFITDKCVLDMKAMDSKSNGAIAWSNQTSFTCQDIFKETNATYPSSDVPCDATLTEKSFETDMNLNFQNLSVMGLRILLLKVAGFNLLMTLRLWSS

SEQ ID NO: 1351 - protein, 136 aa, synthetic construct
IQNPEPAVYQLKDPRSQDSTLCLFTDFDSQINVPKTMESGTFITDKCVLDMKAMDSKSNGAIAWSNQTSFTCQDIFKETNATYPSSDVPCDATLTEKSFETDMNLNFQNLLVVGLRILLLKVAGFNLLMTLRLWSS

SEQ ID NO: 1352 - protein, 133 aa, synthetic construct
VQDPDPSVYQMRSPKTGRTVCLFTDFDSQADFQKPEGATVISLNSTVLDMKVMDSKSNGALTWNSETNIECKENFQQPFYPSSNYSCDAKLIEKSFETDMDLNFYNLLVIGLRILLLKVIGFNLFMTLRLWSC

SEQ ID NO: 1353 - protein, 239 aa, synthetic construct
IQNPDPAVYQLRDSKSSDKSVCLFTDFDSQTNVSQSKDSDVYITDKTVLDMRSMDFKSNSAVAWSNKSDFACANAFNNSIIPEDTFFPSPESSCGTQSFGLLDPKLCYLLDGILFIYGVILTALFLRVKFSRSADAPAYQQGQNQLYNELNLGRREEYDVLDKRRGRDPEMGGKPQRRKNPQEGLYNELQKDKMAEAYSEIGMKGERRRGKGHDGLYQGLSTATKDTYDALHMQALPPR

SEQ ID NO: 1354 - protein, 177 aa, synthetic construct
EDLNKVFPPEVAVFEPSEAEISHTQKATLVCLATGFFPDHVELSWWVNGKEVHSGVSTDPQPLKEQPALNDSRYCLSSRLRVSATFWQNPRNHFRCQVQFYGLSENDEWTQDRAKPVTQIVSAEAWGRADCGFTSVSYQQGVLSATILYEILLGKATLYAVLVSALVLMAMVKRKDF

SEQ ID NO: 1355 - protein, 179 aa, synthetic construct
EDLKNVFPPEVAVFEPSEAEISHTQKATLVCLATGFYPDHVELSWWVNGKEVHSGVSTDPQPLKEQPALNDSRYCLSSRLRVSATFWQNPRNHFRCQVQFYGLSENDEWTQDRAKPVTQIVSAEAWGRADCGFTSESYQQGVLSATILYEILLGKATLYAVLVSALVLMAMVKRKDSRG

SEQ ID NO: 1356 - protein, 179 aa, synthetic construct; identical to SEQ ID NO: 1355

SEQ ID NO: 1357 - protein, 179 aa, synthetic construct
EDLKNVFPPEVAVFEPSEAEISHTQKATLVCLATGFYPDHVELSWWVNGKEVHSGVCTDPQPLKEQPALNDSRYCLSSRLRVSATFWQNPRNHFRCQVQFYGLSENDEWTQDRAKPVTQIVSAEAWGRADCGFTSESYQQGVLSATILYEILLGKATLYAVLVSALVLMAMVKRKDSRG

SEQ ID NO: 1358 - protein, 179 aa, synthetic construct
EDLKNVFPPEVAVFEPSKAEIAHTQKATLVCLATGFYPDHVELSWWVNGKEVHSGVCTDPQPLKEQPALNDSRYCLSSRLRVSATFWQNPRNHFRCQVQFYGLSENDEWTQDRAKPVTQIVSAEAWGRADCGITSASYHQGVLSATILYEILLGKATLYAVLVSALVLMAMVKRKDSRG

SEQ ID NO: 1359 - protein, 179 aa, synthetic construct; identical to SEQ ID NO: 1355

SEQ ID NO: 1360 - protein, 178 aa, synthetic construct
DLKNVFPPEVAVFEPSEAEISHTQKATLVCLATGFYPDHVELSWWVNGKEVHSGVSTDPQPLKEQPALNDSRYCLSSRLRVSATFWQNPRNHFRCQVQFYGLSENDEWTQDRAKPVTQIVSAEAWGRADCGFTSESYQQGVLSATILYEILLGKATLYAVLVSALVLMAMVKRKDSRG

SEQ ID NO: 1361 - protein, 177 aa, synthetic construct
EDLKNVFPPEVAVFEPSEAEISHTQKATLVCLATGFFPDHVELSWWVNGKEVHSGVSTDPQPLKEQPALNDSRYCLSSRLRVSATFWQNPRNHFRCQVQFYGLSENDEWTQDRAKPVTQIVSAEAWGRADCGFTSESYQQGVLSATILYEILLGKATLYAVLVSALVLMAMVKRKDF

SEQ ID NO: 1362 - protein, 177 aa, synthetic construct; identical to SEQ ID NO: 1354

SEQ ID NO: 1363 - protein, 179 aa, synthetic construct
EDLKNVFPPEVAVFEPSKAEIAHTQKATLVCLATGFYPDHVELSWWVNGKEVHSGVSTDPQPLKEQPALNDSRYCLSSRLRVSATFWQNPRNHFRCQVQFYGLSENDEWTQDRAKPVTQIVSAEAWGRADCGITSASYHQGVLSATILYEILLGKATLYAVLVSALVLMAMVKRKDSRG

SEQ ID NO: 1364 - protein, 179 aa, synthetic construct
EDLKNVFPPEVAVFEPSKAEIAHTQKATLVCLATGFYPDHVELSWWVNGKEVHSGVSTDPQPLKEQPALNDSRYCLSSRLRVSATFWQNPRNHFRCQVQFYGLSENDEWTQDRAKPVTQIVSAEAWGRADCGFTSESYQQGVLSATILYEILLGKATLYAVLVSALVLMAMVKRKDSRG

SEQ ID NO: 1365 - protein, 179 aa, synthetic construct
EDLKNVFPPEVAVFEPSKAEISHTQKATLVCLATGFYPDHVELSWWVNGKEVHSGVSTDPQPLKEQPALNDSRYCLSSRLRVSATFWQNPRNHFRCQVQFYGLSENDEWTQDRAKPVTQIVSAEAWGRADCGITSESYQQGVLSATILYEILLGKATLYAVLVSALVLMAMVKRKDSRG

SEQ ID NO: 1366 - protein, 179 aa, synthetic construct
EDLKNVFPPEVAVFEPSKAEISHTQKATLVCLATGFYPDHVELSWWVNGKEVHSGVSTDPQPLKEQPALNDSRYCLSSRLRVSATFWQNPRNHFRCQVQFYGLSENDEWTQDRAKPVTQIVSAEAWGRADCGFTSASYQQGVLSATILYEILLGKATLYAVLVSALVLMAMVKRKDSRG

SEQ ID NO: 1367 - protein, 179 aa, synthetic construct
EDLKNVFPPEVAVFEPSKAEISHTQKATLVCLATGFYPDHVELSWWVNGKEVHSGVSTDPQPLKEQPALNDSRYCLSSRLRVSATFWQNPRNHFRCQVQFYGLSENDEWTQDRAKPVTQIVSAEAWGRADCGFTSESYHQGVLSATILYEILLGKATLYAVLVSALVLMAMVKRKDSRG

SEQ ID NO: 1368 - protein, 179 aa, synthetic construct
EDLKNVFPPEVAVFEPSRAEIAHTQKATLVCLATGFYPDHVELSWWVNGKEVHSGVSTDPQPLKEQPALNDSRYCLSSRLRVSATFWQNPRNHFRCQVQFYGLSENDEWTQDRAKPVTQIVSAEAWGRADCGFTSESYQQGVLSATILYEILLGKATLYAVLVSALVLMAMVKRKDSRG

SEQ ID NO: 1369 - protein, 179 aa, synthetic construct
EDLKNVFPPEVAVFEPSRAEISHTQKATLVCLATGFYPDHVELSWWVNGKEVHSGVSTDPQPLKEQPALNDSRYCLSSRLRVSATFWQNPRNHFRCQVQFYGLSENDEWTQDRAKPVTQIVSAEAWGRADCGFTSESYQQGVLSATILYEILLGKATLYAVLVSALVLMAMVKRKDSRG

SEQ ID NO: 1370 - protein, 179 aa, synthetic construct
EDLKNVFPPEVAVFEPSKAEIAHTQKATLVCLATGFYPDHVELSWWVNGKEVHSGVSTDPQPLKEQPALNDSRYCLSSGLRVSATFWQNPRNHFRCQVQFYGLSENDEWTQDRAKPVTQIVSAEAWGRADCGITSASYHQGVLSATILYEILLGKATLYAVLVSALVLMAMVKRKDSRG

SEQ ID NO: 1371 - protein, 179 aa, synthetic construct
EDLKNVFPPEVAVFEPSKAEIAHTQKATLVCLATGFYPDHVELSWWVNGKEVHSGVSTDPQPLKEQPALNDSRYCLSSGLRVSATFWQNPRNHFRCQVQFYGLSENDEWTQDRAKPVTQIVSAEAWGRADCGFTSESYQQGVLSATILYEILLGKATLYAVLVSALVLMAMVKRKDSRG

SEQ ID NO: 1372 - protein, 179 aa, synthetic construct
EDLKNVFPPEVAVFEPSEAEISHTQKATLVCLATGFYPDHVELSWWVNGKEVHSGVSTDPQPLKEQPALNDSRYCLSSGLRVSATFWQNPRNHFRCQVQFYGLSENDEWTQDRAKPVTQIVSAEAWGRADCGFTSESYQQGVLSATILYEILLGKATLYAVLVSALVLMAMVKRKDSRG

SEQ ID NO: 1373 - protein, 179 aa, synthetic construct
EDLKNVFPPEVAVFEPSRAEISHTQKATLVCLATGFYPDHVELSWWVNGKEVHSGVCTDPQPLKEQPALNDSRYCLSSRLRVSATFWQNPRNHFRCQVQFYGLSENDEWTQDRAKPVTQIVSAEAWGRADCGFTSESYQQGVLSATILYEILLGKATLYAVLVSALVLMAMVKRKDSRG

SEQ ID NO: 1374 - protein, 179 aa, synthetic construct
EDLKNVFPPEVAVFEPSRAEIAHTQKATLVCLATGFYPDHVELSWWVNGKEVHSGVCTDPQPLKEQPALNDSRYCLSSRLRVSATFWQNPRNHFRCQVQFYGLSENDEWTQDRAKPVTQIVSAEAWGRADCGFTSESYQQGVLSATILYEILLGKATLYAVLVSALVLMAMVKRKDSRG

SEQ ID NO: 1375 - protein, 179 aa, synthetic construct
EDLKNVFPPEVAVFEPSKAEISRTQKATLVCLATGFYPPHVELSWWVNGKEVHDGVCTDPQPLKEQPALNDSRYCLSSRLRVSATFWQNPRNHFRCQVQFYGLSENDEWTQDRAKPVTQIVSAEAWGRADCGFTSESYQQGVLSATILYEILLGKATLYAVLVSALVLMAMVKRKDSRG

SEQ ID NO: 1376 - protein, 179 aa, synthetic construct
EDLKHVFPPEVAVFEPSDAEIWHTQKATLVCLATGFYPDHVELSWWVNGKEVHSGVSTDPQPLKEQPALNDSRYCLSSRLRVSATFWQNPRNHFRCQVQFYGLSENDEWTQDRAKPVTQIVSAEAWGRADCGFTSESYQQGVLSATILYEILLGKATLYAVLVSALVLMAMVKRKDSRG

SEQ ID NO: 1377 - protein, 171 aa, synthetic construct
EDLRNVTPPKVSLFEPSKAEIANKQKATLVCLARGFFPDHVELSWWVNGKEVHSGVSTDPQAYKESNYSYCLSSRLRVSATFWHNPRNHFRCQVQFHGLSEEDKWPEGSPKPVTQNISAEAWGRACGITSSYQQGVLSATILYEILLGKATLYAVLVSTLVVMAMVKRKNS

SEQ ID NO: 1378 - protein, 171 aa, synthetic construct
EDLRNVTPPKVSLFEPSKAEIANKQKATLVCLARGFFPDHVELSWWVNGKEVHSGVCTDPQAYKESNYSYCLSSRLRVSATFWHNPRNHFRCQVQFHGLSEEDKWPEGSPKPVTQNISAEAWGRACGITSSYQQGVLSATILYEILLGKATLYAVLVSTLVVMAMVKRKNS

SEQ ID NO: 1379 - protein, 177 aa, synthetic construct
EDLQKVTPPTVTVFEPSEAEISRTQKATLVCLARGFYPDHVELSWWVNGKEVTSGFSTDPQPDKERPSENDSSYCLSSRLRVSASFWHNPRNHFRCQVQFYGLGDDDEWKYDRVKPITQNISAEAWGRADCGFTSVSYHQGVLSATILYEILLGKATLYAVLVSILVLMAKVKRKGS

SEQ ID NO: 1380 - protein, 276 aa, synthetic construct
EDLKNVFPPEVAVFEPSEAEISHTQKATLVCLATGFYPDHVELSWWVNGKEVHSGVSTDPQPLKEQPALNDSRYCLSSRLRVSATFWQNPRNHFRCQVQFYGLSENDEWTQDRAKPVTQIVSAEAWGRADCGSQSFGLLDPKLCYLLDGILFIYGVILTALFLRVKFSRSADAPAYQQGQNQLYNELNLGRREEYDVLDKRRGRDPEMGGKPQRRKNPQEGLYNELQKDKMAEAYSEIGMKGERRRGKGHDGLYQGLSTATKDTYDALHMQALPPR

SEQ ID NO: 1381 - protein, 269 aa, synthetic construct
GCPALPTGVGGTPFPSLAPPIMLLVDGKQQMVVVCLVLDVAPPGLDSPIWFSAGNGSALDAFTYGPSPATDGTWTNLAHLSLPSEELASWEPLVCHTGPGAEGHSRSTQPMHLSGEASTARTCPQEPLRGTPGGALWLGVLRLLLFKLLLFDLLLTCSCLCDPAGPLPSPATTTRLRALGSHRLHPATETGGREATSSPRPQPRDRRWGDTPPGRKPGSPVWGEGSYLSSYPTCPAQAWCSRSRLRAPSSSLGAFFAGDLPPPLQAGAA

SEQ ID NO: 1382 - protein, 258 aa, synthetic construct
TPFPSLAPPIMLLVDGKQQMVVVCLVLDVAPPGLDSPIWFSAGNGSALDAFTYGPSPATDGTWTNLAHLSLPSEELASWEPLVCHTGPGAEGHSRSTQPMHLSGEASTARTCPQEPLRGTPGGALWLGVLRLLLFKLLLFDLLLTCSCLCDPAGPLPSPATTTRLRALGSHRLHPATETGGREATSSPRPQPRDRRWGDTPPGRKPGSPVWGEGSYLSSYPTCPAQAWCSRSALRAPSSSLGAFFAGDLPPPLQAGAA

SEQ ID NO: 1383 - protein, 210 aa, synthetic construct
TPFPSLAPPIMLLVDGKQQMVVVCLVLDVAPPGLDSPIWFSAGNGSALDAFTYGPSPATDGTWTNLAHLSLPSEELASWEPLVCHTGPGAEGHSRSTQPMHLSGEASTARTCPQEPLRGTPGGALWLGVLRLLLFKLLLFDLLLTCSCLCDPAGPLPSPATTTRLRALGSHRLHPATETGGREATSSPRPQPRDRRWGDTPPGRKPGSPV

SEQ ID NO: 1384 - protein, 189 aa, synthetic construct
DKQLDADVSPKPTIFLPSIAETKLQKAGTYLCLLEKFFPDIIKIHWQEKKSNTILGSQEGNTMKTNDTYMKFSWLTVPEESLDKEHRCIVRHENNKNGIDQEIIFPPIKTDVTTVDPKYNYSKDANDVITMDPKDNWSKDANDTLLLQLTNTSAYYMYLLLLLKSVVYFAIITCCLLGRTAFCCNGEKS

SEQ ID NO: 1385 - protein, 173 aa, synthetic construct
DKQLDADVSPKPTIFLPSIAETKLQKAGTYLCLLEKFFPDVIKIHWQEKKSNTILGSQEGNTMKTNDTYMKFSWLTVPEKSLDKEHRCIVRHENNKNGVDQEIIFPPIKTDVITMDPKDNCSKDANDTLLLQLTNTSAYYMYLLLLLKSVVYFAIITCCLLRRTAFCCNGEKS

SEQ ID NO: 1386 - protein, 168 aa, synthetic construct
ADVSPKPTIFLPSIAETKLQKAGTYLCLLEKFFPDVIKIHWQEKKSNTILGSQEGNTMKTNDTYMKFSWLTVPEKSLDKEHRCIVRHENNKNGVDQEIIFPPIKTDVITMDPKDNCSKDANDTLLLQLTNTSAYYMYLLLLLKSVVYFAIITCCLLRRTAFCCNGEKS

SEQ ID NO: 1387 - protein, 166 aa, synthetic construct
VSPKPTIFLPSIAETKLQKAGTYLCLLEKFFPDVIKIHWQEKKSNTILGSQEGNTMKTNDTYMKFSWLTVPEKSLDKEHRCIVRHENNKNGVDQEIIFPPIKTDVITMDPKDNCSKDANDTLLLQLTNTSAYYMYLLLLLKSVVYFAIITCCLLRRTAFCCNGEKS

SEQ ID NO: 1388 - protein, 161 aa, synthetic construct
TIFLPSIAETKLQKAGTYLCLLEKFFPDVIKIHWQEKKSNTILGSQEGNTMKTNDTYMKFSWLTVPEKSLDKEHRCIVRHENNKNGVDQEIIFPPIKTDVITMDPKDNCSKDANDTLLLQLTNTSAYYMYLLLLLKSVVYFAIITCCLLRRTAFCCNGEKS

SEQ ID NO: 1389 - protein, 172 aa, synthetic construct
DKRLDADISPKPTIFLPSVAETNLHKTGTYLCLLEKFFPDVIRVYWKEKDGNTILDSQEGDTLKTNDTYMKFSWLTVPERAMGKEHRCIVKHENNKGGADQEIFFPSIKKVAVSTKPTTCWQDKNDVLQLQFTITSAYYTYLLLLLKSVIYLAIISFSLLRRTSVCGNEKKS

SEQ ID NO: 1390 - protein, 153 aa, synthetic construct
SQPHTKPSVFVMKNGTNVACLVKEFYPKDIRINLVSSKKITEFDPAIVISPSGKYNAVKLGKYEDSNSVTCSVQHDNKTVHSTDFEVKTDSTDHVKPKETENTKQPSKSCHKPKAIVHTEKVNMMSLTVLGLRMLFAKTVAVNFLLTAKLFFL

SEQ ID NO: 1391 - protein, 153 aa, synthetic construct; identical to SEQ ID NO: 1390

SEQ ID NO: 1392 - protein, 152 aa, synthetic construct
SQPPAKPSVFIMKNGTNVACLVKDFYPKEVTISLRSSKKIVEFDPAIVISPSGKYSAVKLGQYGDSNSVTCSVQHNSETVHSTDFEPYANSFNNEKLPEPENDTQISEPCYGPRVTVHTEKVNMMSLTVLGLRLLFAKTIAINFLLTVKLFF

SEQ ID NO: 1393 - protein, 30 aa, synthetic construct
QSFGLLDPKLCYLLDGILFIYGVILTALFL

SEQ ID NO: 1394 - protein, 143 aa, synthetic construct
QSFGLLDPKLCYLLDGILFIYGVILTALFLRVKFSRSADAPAYQQGQNQLYNELNLGRREEYDVLDKRRGRDPEMGGKPQRRKNPQEGLYNELQKDKMAEAYSEIGMKGERRRGKGHDGLYQGLSTATKDTYDALHMQALPPR

SEQ ID NO: 1395 - protein, 143 aa, synthetic construct; identical to SEQ ID NO: 1394

SEQ ID NO: 1396 - protein, 41 aa, synthetic construct
RSKRSRLLHSDYMNMTPRRPGPTRKHYQPYAPPRDFAAYRS

SEQ ID NO: 1397 - protein, 42 aa, synthetic construct
KRGRKKLLYIFKQPFMRPVQTTQEEDGCSCRFPEEEEGGCEL

SEQ ID NO: 1398 - protein, 55 aa, synthetic construct
KNRKAKAKPVTRGAGAGGRQRGQNKERPPPVPNPDYEPIRKGQRDLYSGLNQRRI

SEQ ID NO: 1399 - protein, 30 aa, synthetic construct; identical to SEQ ID NO: 1393

SEQ ID NO: 1400 - protein, 113 aa, synthetic construct
RVKFSRSADAPAYQQGQNQLYNELNLGRREEYDVLDKRRGRDPEMGGKPQRRKNPQEGLYNELQKDKMAEAYSEIGMKGERRRGKGHDGLYQGLSTATKDTYDALHMQALPPR

SEQ ID NO: 1401 - protein, 143 aa, synthetic construct; identical to SEQ ID NO: 1394

SEQ ID NO: 1402 - protein, 41 aa, synthetic construct; identical to SEQ ID NO: 1396

SEQ ID NO: 1403 - protein, 42 aa, synthetic construct; identical to SEQ ID NO: 1397

SEQ ID NO: 1404 - protein, 184 aa, synthetic construct
QSFGLLDPKLCYLLDGILFIYGVILTALFLRSKRSRLLHSDYMNMTPRRPGPTRKHYQPYAPPRDFAAYRSRVKFSRSADAPAYQQGQNQLYNELNLGRREEYDVLDKRRGRDPEMGGKPQRRKNPQEGLYNELQKDKMAEAYSEIGMKGERRRGKGHDGLYQGLSTATKDTYDALHMQALPPR

SEQ ID NO: 1405 - protein, 185 aa, synthetic construct
QSFGLLDPKLCYLLDGILFIYGVILTALFLKRGRKKLLYIFKQPFMRPVQTTQEEDGCSCRFPEEEEGGCELRVKFSRSADAPAYQQGQNQLYNELNLGRREEYDVLDKRRGRDPEMGGKPQRRKNPQEGLYNELQKDKMAEAYSEIGMKGERRRGKGHDGLYQGLSTATKDTYDALHMQALPPR

SEQ ID NO: 1406 - protein, 184 aa, synthetic construct; identical to SEQ ID NO: 1404

SEQ ID NO: 1407 - protein, 185 aa, synthetic construct; identical to SEQ ID NO: 1405

SEQ ID NO: 1408 - protein, 60 aa, synthetic construct
IPEDTFFPSPESSCDVKLVEKSFETDTNLNFQNLSVIGFRILLLKVAGFNLLMTLRLWSS

SEQ ID NO: 1409 - protein, 50 aa, synthetic construct
ESSCDVKLVEKSFETDTNLNFQNLSVIGFRILLLKVAGFNLLMTLRLWSS

SEQ ID NO: 1410 - protein, 179 aa, synthetic construct; identical to SEQ ID NO: 1357

SEQ ID NO: 1411 - protein, 115 aa, synthetic construct
EQPALNDSRYCLSSRLRVSATFWQNPRNHFRCQVQFYGLSENDEWTQDRAKPVTQIVSAEAWGRADCGFTSESYQQGVLSATILYEILLGKATLYAVLVSALVLMAMVKRKDSRG

SEQ ID NO: 1412 - protein, 53 aa, synthetic construct
GRADCGFTSESYQQGVLSATILYEILLGKATLYAVLVSALVLMAMVKRKDSRG

SEQ ID NO: 1413 - protein, 51 aa, synthetic construct
ADCGFTSESYQQGVLSATILYEILLGKATLYAVLVSALVLMAMVKRKDSRG

SEQ ID NO: 1414 - protein, 173 aa, synthetic construct; identical to SEQ ID NO: 1385

SEQ ID NO: 1415 - protein, 67 aa, synthetic construct
PIKTDVITMDPKDNCSKDANDTLLLQLTNTSAYYMYLLLLLKSVVYFAIITCCLLRRTAFCCNGEKS

SEQ ID NO: 1416 - protein, 59 aa, synthetic construct
MDPKDNCSKDANDTLLLQLTNTSAYYMYLLLLLKSVVYFAIITCCLLRRTAFCCNGEKS

SEQ ID NO: 1417 - protein, 153 aa, synthetic construct; identical to SEQ ID NO: 1390

SEQ ID NO: 1418 - protein, 68 aa, synthetic construct
EVKTDSTDHVKPKETENTKQPSKSCHKPKAIVHTEKVNMMSLTVLGLRMLFAKTVAVNFLLTAKLFFL

SEQ ID NO: 1419 - protein, 61 aa, synthetic construct
DHVKPKETENTKQPSKSCHKPKAIVHTEKVNMMSLTVLGLRMLFAKTVAVNFLLTAKLFFL

SEQ ID NO: 1420 - protein, 177 aa, synthetic construct
QSFGLLDPKLCYLLDGILFIYGVILTALFLNIYDAFVIYSSQDEDWVRNELVKNLEEGVPPFQLCLHYRDFIPGVAIAANIIHEGFHKSRKVIVVVSQHFIQSRWCIFEYEIAQTWQFLSSRAGIIFIVLQKVEKTLLRQQVELYRLLSRNTYLEWEDSVLGRHIFWRRLRKALLDG

SEQ ID NO: 1421 - protein, 289 aa, synthetic construct
QSFGLLDPKLCYLLDGILFIYGVILTALFLRVKFSRSADAPAYQQGQNQLYNELNLGRREEYDVLDKRRGRDPEMGGKPRRKNPQEGLYNELQKDKMAEAYSEIGMKGERRRGKGHDGLYQGLSTATKDTYDALHMQALPPRNIYDAFVIYSSQDEDWVRNELVKNLEEGVPPFQLCLHYRDFIPGVAIAANIIHEGFHKSRKVIVVVSQHFIQSRWCIFEYEIAQTWQFLSSRAGIIFIVLQKVEKTLLRQQVELYRLLSRNTYLEWEDSVLGRHIFWRRLRKALLDG

SEQ ID NO: 1422 - protein, 218 aa, synthetic construct
QSFGLLDPKLCYLLDGILFIYGVILTALFLHRRACRKRIRQKLHLCYPVQTSQPKLELVDSRPRRSSTQLRSGASVTEPVAEERGLMSQPLMETCHSVGAAYLESLPLQDASPAGGPSSPRDLPEPRVSTEHTNNKIEKIYIMKADTVIVGTVKAELPEGRGLAGPAEPELEEELEADHTPHYPEQETEPPLGSCSDVMLSVEEEGKEDPLPTAASGK

SEQ ID NO: 1423 - protein, 331 aa, synthetic construct
QSFGLLDPKLCYLLDGILFIYGVILTALFLHRRACRKRIRQKLHLCYPVQTSQPKLELVDSRPRRSSTQLRSGASVTEPVAEERGLMSQPLMETCHSVGAAYLESLPLQDASPAGGPSSPRDLPEPRVSTEHTNNKIEKIYIMKADTVIVGTVKAELPEGRGLAGPAEPELEEELEADHTPHYPEQETEPPLGSCSDVMLSVEEEGKEDPLPTAASGKRVKFSRSADAPAYQQGQNQLYNELNLGRREEYDVLDKRRGRDPEMGGKPQRRKNPQEGLYNELQKDKMAEAYSEIGMKGERRRGKGHDGLYQGLSTATKDTYDALHMQALPPR

SEQ ID NO: 1424 - protein, 218 aa, synthetic construct; identical to SEQ ID NO: 1422

SEQ ID NO: 1425 - protein, 331 aa, synthetic construct; identical to SEQ ID NO: 1423

SEQ ID NO: 1426 - protein, 110 aa, synthetic construct
LGEPQLCYILDAILFLYGIVLTLLYCKRGRKKLLYIFKQPFMRPVQTTQEEDGCSCRFPEEEEGGCELRLKIQVRKAAITSYEKSDGVYTGLSTRNQETYETLKHEKPPQ

SEQ ID NO: 1427 - protein, 110 aa, synthetic construct
LGEPQLCYILDAILFLYGIVLTLLYCRLKIQVRKAAITSYEKSDGVYTGLSTRNQETYETLKHEKPPQKRGRKKLLYIFKQPFMRPVQTTQEEDGCSCRFPEEEEGGCEL

SEQ ID NO: 1428 - protein, 110 aa, synthetic construct; identical to SEQ ID NO: 1426

SEQ ID NO: 1429 - protein, 110 aa, synthetic construct; identical to SEQ ID NO: 1427

SEQ ID NO: 1430 - protein, 109 aa, synthetic construct
LGEPQLCYILDAILFLYGIVLTLLYCRSKRSRLLHSDYMNMTPRRPGPTRKHYQPYAPPRDFAAYRSRLKIQVRKAAITSYEKSDGVYTGLSTRNQETYETLKHEKPPQ

SEQ ID NO: 1431 - protein, 109 aa, synthetic construct; identical to SEQ ID NO: 1430

SEQ ID NO: 1432 - protein, 162 aa, synthetic construct
QSFGLLDPKLCYLLDGILFIYGVILTALFLHLCCRRRRARLRFMKQFYKRVKFSRSADAPAYQQGQNQLYNELNLGRREEYDVLDKRRGRDPEMGGKPQRRKNPQEGLYNELQKDKMAEAYSEIGMKGERRRGKGHDGLYQGLSTATKDTYDALHMQALPPR

SEQ ID NO: 1433 - protein, 175 aa, synthetic construct
QSFGLLDPKLCYLLDGILFIYGVILTALFLLYCNHRNRRRVCKCPRPVVKSGDKPSLSARYVRVKFSRSADAPAYQQGQNQLYNELNLGRREEYDVLDKRRGRDPEMGGKPQRRKNPQEGLYNELQKDKMAEAYSEIGMKGERRRGKGHDGLYQGLSTATKDTYDALHMQALPPR

SEQ ID NO: 1434 - protein, 183 aa, synthetic construct
QSFGLLDPKLCYLLDGILFIYGVILTALFLCVRCRHRRRQAERMSQIKRLLSEKKTCQCPHRFQKTCSPIRVKFSRSADAPAYQQGQNQLYNELNLGRREEYDVLDKRRGRDPEMGGKPQRRKNPQEGLYNELQKDKMAEAYSEIGMKGERRRGKGHDGLYQGLSTATKDTYDALHMQALPPR

SEQ ID NO: 1435 - protein, 183 aa, synthetic construct; identical to SEQ ID NO: 1434

SEQ ID NO: 1436 - protein, 196 aa, synthetic construct
MNQADPRLRAVCLWTLTSAAMSRGDNCTDLLALGIPSITQAWGLWVLLGAVTLLFLISLAAHLSQWTRGRSRSHPGQGRSGESVEEVPLYGNLHYLQTGRLSQDPEPDQQDPTLGGPARAAEEVMCYTSLQLRPPQGRIPGPGTPVKYSEVVLDSEPKSQASGPEPELYASVCAQTRRARASFPDQAYANSQPAAS

SEQ ID NO: 1437 - protein, 172 aa, synthetic construct
DNCTDLLALGIPSITQAWGLWVLLGAVTLLFLISLAAHLSQWTRGRSRSHPGQGRSGESVEEVPLYGNLHYLQTGRLSQDPEPDQQDPTLGGPARAAEEVMCYTSLQLRPPQGRIPGPGTPVKYSEVVLDSEPKSQASGPEPELYASVCAQTRRARASFPDQAYANSQPAAS

SEQ ID NO: 1438 - protein, 196 aa, synthetic construct
MNQADPRLRAVCLWTLTSAAMSRGDQCTDLLALGIPSITQAWGLWVLLGAVTLLFLISLAAHLSQWTRGRSRSHPGQGRSGESVEEVPLYGNLHYLQTGRLSQDPEPDQQDPTLGGPARAAEEVMCYTSLQLRPPQGRIPGPGTPVKYSEVVLDSEPKSQASGPEPELYASVCAQTRRARASFPDQAYANSQPAAS

SEQ ID NO: 1439 - protein, 172 aa, synthetic construct
DQCTDLLALGIPSITQAWGLWVLLGAVTLLFLISLAAHLSQWTRGRSRSHPGQGRSGESVEEVPLYGNLHYLQTGRLSQDPEPDQQDPTLGGPARAAEEVMCYTSLQLRPPQGRIPGPGTPVKYSEVVLDSEPKSQASGPEPELYASVCAQTRRARASFPDQAYANSQPAAS

SEQ ID NO: 1440 - protein, 186 aa, synthetic construct
MSGISGCPFFLWGLLALLGLALVISLIFNISHYVEKQRQDKMYSYSSDHTRVDEYYIEDTPIYGNLDDMISEPMDENCYEQMKARPEKSVNKMQEATPSAQATNETQMCYASLDHSVKGKRRKPRKQNTHFSDKDGDEQLHAIDASVSKTTLVDSFSPESQAVEENIHDDPIRLFGLIRAKREPIN

SEQ ID NO: 1441 - protein, 186 aa, synthetic construct; identical to SEQ ID NO: 1440

SEQ ID NO: 1442 - protein, 214 aa, synthetic construct
GMRTEDLPKAVVFLEPQWYRVLEKDSVTLKCQGAYSPEDNSTQWFHNESLISSQASSYFIDAATVDDSGEYRCQTNLSTLSDPVQLEVHIGWLLLQAPRWVFKEEDPIHLRCHSWKNTALHKVTYLQNGKGRKYFHHNSDFYIPKATLKDSGSYFCRGLVGSKNVSSETVNITITQGLAVPTISSFFPPGYQVSFCLVMVLLFAVDTGLYFSVK

SEQ ID NO: 1443 - protein, 213 aa, synthetic construct
GMRTEDLPKAVVFLEPQWYRVLEKDSVTLKCQGAYSPEDNSTQWFHNESLISSQASSYFIDAATVDDSGEYRCQTNLSTLSDPVQLEVHIGWLLLQAPRWVFKEEDPIHLRCHSWKNTALHKVTYLQNGKGRKYFHHNSDFYIPKATLKDSGSYFCRGLVGSKNVSSETVNITITQGLAVPTISSFFPPGYQVSFCLVMVLLFAVDTGLYFSV

SEQ ID NO: 1444 - protein, 212 aa, synthetic construct
GMRTEDLPKAVVFLEPQWYRVLEKDSVTLKCQGAYSPEDNSTQWFHNESLISSQASSYFIDAATVDDSGEYRCQTNLSTLSDPVQLEVHIGWLLLQAPRWVFKEEDPIHLRCHSWKNTALHKVTYLQNGKGRKYFHHNSDFYIPKATLKDSGSYFCRGLVGSKNVSSETVNITITQGLAVPTISSFFPPGYQVSFCLVMVLLFAVDTGLYFS

SEQ ID NO: 1445 - protein, 213 aa, synthetic construct
GMRTEDLPKAVVFLEPQWYRVLEKDSVTLKCQGAYSPEDNSTQWFHNESLISSQASSYFIDAATVDDSGEYRCQTNLSTLSDPVQLEVHIGWLLLQAPRWVFKEEDPIHLRCHSWKNTALHKVTYLQNGKGRKYFHHNSDFYIPKATLKDSGSYFCRGLVGSKNVSSETVNITITQGLAVPTISSFFPPGYQVSFCLVMVLLFAVDTGLYFYV

SEQ ID NO: 1446 - protein, 238 aa, synthetic construct
GMRTEDLPKAVVFLEPQWYRVLEKDSVTLKCQGAYSPEDNSTQWFHNESLISSQASSYFIDAATVDDSGEYRCQTNLSTLSDPVQLEVHIGWLLLQAPRWVFKEEDPIHLRCHSWKNTALHKVTYLQNGKGRKYFHHNSDFYIPKATLKDSGSYFCRGLVGSKNVSSETVNITITQGLAVPTISSFFPPGYQVSFCLVMVLLFAVDTGLYFSVKTNIRSSTRDWKDHKFKWRKDPQDK

SEQ ID NO: 1447 - protein, 22 aa, synthetic construct
VKQTLNFDLLKLAGDVESNPGP

SEQ ID NO: 1448 - protein, 18 aa, synthetic construct
EGRGSLLTCGDVEENPGP

SEQ ID NO: 1449 - protein, 18 aa, synthetic construct
EGRGSLLTCGDVEENPGP

SEQ ID NO: 1450 - protein, 19 aa, synthetic construct
ATNFSLLKQAGDVEENPGP

SEQ ID NO: 1451 - protein, 19 aa, synthetic construct
ATNFSLLKQAGDVEQNPGP

SEQ ID NO: 1452 - protein, 20 aa, synthetic construct
QCTNYALLKLAGDVESNPGP

SEQ ID NO: 1453 - protein, 4 aa, synthetic construct
SGSG

SEQ ID NO: 1454 - protein, 4 aa, synthetic construct
SGSG

SEQ ID NO: 1455 - protein, 4 aa, synthetic construct
RAKR

SEQ ID NO: 1456 - protein, 4 aa, synthetic construct
RAKR

SEQ ID NO: 1457 - protein, 4 aa, synthetic construct
RAKR

SEQ ID NO: 1458 - protein, 106 aa, synthetic construct
GQPKANPTVTLFPPSSEELQANKATLVCLISDFYPGAVTVAWKADGSPVKAGVETTKPSKQSNNKYAASSYLSLTPEQWKSHRSYSCQVTHEGSTVEKTVAPTECS

SEQ ID NO: 1459 - protein, 103 aa, synthetic construct
ASTKGPSVFPLAPSSKSTSGGTAALGCLVKDYFPEPVTVSWNSGALTSGVHTFPAVLQSSGLYSLSSVVTVPSSSLGTQTYICNVNHKPSNTKVDKRVEPKSC

SEQ ID NO: 1460 - protein, 102 aa, synthetic construct
ASTKGPSVFPLAPSSKSTSGGTAALGCLVKDYFPEPVTVSWNSGALTSGVHTFPAVLQSSGLYSLSSVVTVPSSSLGTQTYICNVNHKPSNTKVDKRVEPKS

SEQ ID NO: 1461 - protein, 113 aa, synthetic construct
ASTKGPSVFPLAPSSKSTSGGTAALGCLVKDYFPEPVTVSWNSGALTSGVHTFPAVLQSSGLYSLSSVVTVPSSSLGTQTYICNVNHKPSNTKVDKRVEPKSCDKTHTCPPCP

SEQ ID NO: 1462 - protein, 103 aa, synthetic construct
ASTKGPSVFPLAPSSKSTSGGTAALGCLVKDYFPEPVTVSWNSGALTSGVHTFPAVLQSSGLYSLSSVVTVPSSSLGTQTYICNVNHKPSNTKVDKKVEPKSC

SEQ ID NO: 1463 - protein, 102 aa, synthetic construct
ASTKGPSVFPLAPSSKSTSGGTAALGCLVKDYFPEPVTVSWNSGALTSGVHTFPAVLQSSGLYSLSSVVTVPSSSLGTQTYICNVNHKPSNTKVDKKVEPKS

SEQ ID NO: 1464 - protein, 113 aa, synthetic construct
ASTKGPSVFPLAPSSKSTSGGTAALGCLVKDYFPEPVTVSWNSGALTSGVHTFPAVLQSSGLYSLSSVVTVPSSSLGTQTYICNVNHKPSNTKVDKKVEPKSCDKTHTCPPCP

SEQ ID NO: 1465 - protein, 101 aa, synthetic construct
ASTKGPSVFPLAPCSRSTSESTAALGCLVKDYFPEPVTVSWNSGALTSGVHTFPAVLQSSGLYSLSSVVTVPSSNFGTQTYTCNVDHKPSNTKVDKTVERK

SEQ ID NO: 1466 - protein, 102 aa, synthetic construct
ASTKGPSVFPLAPCSRSTSESTAALGCLVKDYFPEPVTVSWNSGALTSGVHTFPAVLQSSGLYSLSSVVTVPSSNFGTQTYTCNVDHKPSNTKVDKTVERKC

SEQ ID NO: 1467 - protein, 103 aa, synthetic construct
ASTKGPSVFPLAPCSRSTSESTAALGCLVKDYFPEPVTVSWNSGALTSGVHTFPAVLQSSGLYSLSSVVTVPSSNFGTQTYTCNVDHKPSNTKVDKTVERKCC

SEQ ID NO: 1468 - protein, 103 aa, synthetic construct
ASTKGPSVFPLAPCSRSTSESTAALGCLVKDYFPEPVTVSWNSGALTSGVHTFPAVLQSSGLYSLSSVVTVPSSSLGTKTYTCNVDHKPSNTKVDKRVESKYG

SEQ ID NO: 1469 - protein, 121 aa, synthetic construct
ASPTSPKVFPLSLCSTQPDGNVVIACLVQGFFPQEPLSVTWSESGQGVTARNFPPSQDASGDLYTTSSQLTLPATQCLAGKSVTCHVKHYTNPSQDVTVPCPVPSTPPTPSPSTPPTPSPS

SEQ ID NO: 1470 - protein, 108 aa, synthetic construct
ASPTSPKVFPLSLDSTPQDGNVVVACLVQGFFPQEPLSVTWSESGQNVTARNFPPSQDASGDLYTTSSQLTLPATQCPDGKSVTCHVKHYTNPSQDVTVPCPVPPPPP

SEQ ID NO: 1471 - protein, 159 aa, synthetic construct
APTKAPDVFPIISGCRHPKDNSPVVLACLITGYHPTSVTVTWYMGTQSQPQRTFPEIQRRDSYYMTSSQLSTPLQQWRQGEYKCVVQHTASKSKKEIFRWPESPKAQASSVPTAQPQAEGSLAKATTAPATTRNTGRGGEEKKKEKEKEEQEERETKTP

SEQ ID NO: 1472 - protein, 103 aa, synthetic construct
ASTQSPSVFPLTRCCKNIPSNATSVTLGCLATGYFPEPVMVTWDTGSLNGTTMTLPATTLTLSGHYATISLLTVSGAWAKQMFTCRVAHTPSSTDWVDNKTFS

SEQ ID NO: 1473 - protein, 104 aa, synthetic construct
GSASAPTLFPLVSCENSPSDTSSVAVGCLAQDFLPDSITLSWKYKNNSDISSTRGFPSVLRGGKYAATSQVLLPSKDVMQGTDEHVVCKVQHPNGNKEKNVPLP

SEQ ID NO: 1474 - protein, 80 aa, synthetic construct
IQNPDPAVYQLRDSKSSDKSVCLFTDFDSQTNVSQSKDSDVYITDKTVLDMRSMDFKSNSAVAWSNKSDFACANAFNNSI

SEQ ID NO: 1475 - protein, 90 aa, synthetic construct
IQNPDPAVYQLRDSKSSDKSVCLFTDFDSQTNVSQSKDSDVYITDKTVLDMRSMDFKSNSAVAWSNKSDFACANAFNNSIIPEDTFFPSP

SEQ ID NO: 1476 - protein, 126 aa, synthetic construct
EDLKNVFPPEVAVFEPSEAEISHTQKATLVCLATGFYPDHVELSWWVNGKEVHSGVSTDPQPLKEQPALNDSRYCLSSRLRVSATFWQNPRNHFRCQVQFYGLSENDEWTQDRAKPVTQIVSAEAW

SEQ ID NO: 1477 - protein, 128 aa, synthetic construct
EDLKNVFPPEVAVFEPSEAEISHTQKATLVCLATGFYPDHVELSWWVNGKEVHSGVSTDPQPLKEQPALNDSRYCLSSRLRVSATFWQNPRNHFRCQVQFYGLSENDEWTQDRAKPVTQIVSAEAWGR

SEQ ID NO: 1478 - protein, 106 aa, synthetic construct
DKQLDADVSPKPTIFLPSIAETKLQKAGTYLCLLEKFFPDVIKIHWQEKKSNTILGSQEGNTMKTNDTYMKFSWLTVPEKSLDKEHRCIVRHENNKNGVDQEIIFP

SEQ ID NO: 1479 - protein, 114 aa, synthetic construct
DKQLDADVSPKPTIFLPSIAETKLQKAGTYLCLLEKFFPDVIKIHWQEKKSNTILGSQEGNTMKTNDTYMKFSWLTVPEKSLDKEHRCIVRHENNKNGVDQEIIFPPIKTDVIT

SEQ ID NO: 1480 - protein, 85 aa, synthetic construct
SQPHTKPSVFVMKNGTNVACLVKEFYPKDIRINLVSSKKITEFDPAIVISPSGKYNAVKLGKYEDSNSVTCSVQHDNKTVHSTDF

SEQ ID NO: 1481 - protein, 92 aa, synthetic construct
SQPHTKPSVFVMKNGTNVACLVKEFYPKDIRINLVSSKKITEFDPAIVISPSGKYNAVKLGKYEDSNSVTCSVQHDNKTVHSTDFEVKTDST

SEQ ID NO: 1482 - protein, 131 aa, synthetic construct
EDLKNVFPPEVAVFEPSEAEISHTQKATLVCLATGFYPDHVELSWWVNGKEVHSGVSTDPQPLKEQPALNDSRYCLSSRLRVSATFWQNPRNHFRCQVQFYGLSENDEWTQDRAKPVTQIVSAEAWGRADC

SEQ ID NO: 1483 - protein, 94 aa, synthetic construct
IQNPDPAVYQLRDSKSSDKSVCLFTDFDSQTNVSQSKDSDVYITDKTVLDMRSMDFKSNSAVAWSNKSDFACANAFNNSIIPEDTFFPSPESSC

SEQ ID NO: 1484 - protein, 94 aa, synthetic construct; identical to SEQ ID NO: 1483

SEQ ID NO: 1485 - protein, 79 aa, synthetic construct
KSSDKSVCLFTDFDSQTNVSQSKDSDVYITDKTVLDMRSMDFKSNSAVAWSNKSDFACANAFNNSIIPEDTFFPSPESS

SEQ ID NO: 1486 - protein, 126 aa, synthetic construct; identical to SEQ ID NO: 1476

SEQ ID NO: 1487 - protein, 110 aa, synthetic construct
PEVAVFEPSEAEISHTQKATLVCLATGFYPDHVELSWWVNGKEVHSGVSTDPQPLKEQPALNDSRYCLSSRLRVSATFWQNPRNHFRCQVQFYGLSENDEWTQDRAKPVT

SEQ ID NO: 1488 - protein, 114 aa, synthetic construct; identical to SEQ ID NO: 1479

SEQ ID NO: 1489 - protein, 95 aa, synthetic construct
PKPTIFLPSIAETKLQKAGTYLCLLEKFFPDVIKIHWQEKKSNTILGSQEGNTMKTNDTYMKFSWLTVPEKSLDKEHRCIVRHENNKNGVDQEII

SEQ ID NO: 1490 - protein, 85 aa, synthetic construct; identical to SEQ ID NO: 1480

SEQ ID NO: 1491 - protein, 92 aa, synthetic construct; identical to SEQ ID NO: 1481

SEQ ID NO: 1492 - protein, 21 aa, synthetic construct
DVKLVEKSFETDTNLNFQNLS

SEQ ID NO: 1493 - protein, 22 aa, synthetic construct
CDVKLVEKSFETDTNLNFQNLS

SEQ ID NO: 1494 - protein, 19 aa, synthetic construct
GRADCGFTSESYQQGVLSA

SEQ ID NO: 1495 - protein, 27 aa, synthetic construct
QIVSAEAWGRADCGFTSESYQQGVLSA

SEQ ID NO: 1496 - protein, 24 aa, synthetic construct
MDPKDNCSKDANDTLLLQLTNTSA

SEQ ID NO: 1497 - protein, 34 aa, synthetic construct
FPPIKTDVITMDPKDNCSKDANDTLLLQLTNTSA

SEQ ID NO: 1498 - protein, 44 aa, synthetic construct
EVKTDSTDHVKPKETENTKQPSKSCHKPKAIVHTEKVNMMSLTV

SEQ ID NO: 1499 - protein, 37 aa, synthetic construct
DHVKPKETENTKQPSKSCHKPKAIVHTEKVNMMSLTV

SEQ ID NO: 1500 - protein, 10 aa, synthetic construct
QSFGLLDPKL

SEQ ID NO: 1501 - protein, 110 aa, synthetic construct
ASTKGPSVFPLAPCSRSTSESTAALGCLVKDYFPEPVTVSWNSGALTSGVHTFPAVLQSSGLYSLSSVVTVPSSNFGTQTYTCNVDHKPSNTKVDKTVERKCCVECPPCP

SEQ ID NO: 1502 - protein, 20 aa, synthetic construct
VIGFRILLLKVAGFNLLMTL

SEQ ID NO: 1503 - protein, 23 aa, synthetic construct
TILYEILLGKATLYAVLVSALVL

SEQ ID NO: 1504 - protein, 23 aa, synthetic construct
YYMYLLLLLKSVVYFAIITCCLL

SEQ ID NO: 1505 - protein, 23 aa, synthetic construct
LGLRMLFAKTVAVNFLLTAKLFF

SEQ ID NO: 1506 - protein, 20 aa, synthetic construct
CYLLDGILFIYGVILTALFL

SEQ ID NO: 1507 - protein, 191 aa, synthetic construct
ASTKGPSVFPLAPCSRSTSESTAALGCLVKDYFPEPVTVSWNSGALTSGVHTFPAVLQSSGLYSLSSVVTVPSSNFGTQTYTCNVDHKPSNTKVDKTVERKCCTPPPCPRCPEPKSCDTPPPCPRCPEPKSCDTPPPCPRCPEPKSCDTPPPCPRCPEPKSCDTPPPCPRCPEPKSCDTPPPCPRCPEPKS

SEQ ID NO: 1508 - protein, 5 aa, synthetic construct
RLWSS

SEQ ID NO: 1509 - protein, 11 aa, synthetic construct
MAMVKRKDSRG

SEQ ID NO: 1510 - protein, 12 aa, synthetic construct
RRTAFCCNGEKS

SEQ ID NO: 1511 - protein, 113 aa, synthetic construct; identical to SEQ ID NO: 1400

SEQ ID NO: 1512 - protein, 110 aa, synthetic construct
ASTKGPSVFPLAPCSRSTSESTAALGCLVKDYFPEPVTVSWNSGALTSGVHTFPAVLQSSGLYSLSSVVTVPSSSLGTKTYTCNVDHKPSNTKVDKRVESKYGPPCPPCP

SEQ ID NO: 1513 - protein, 10 aa, synthetic construct
DKTHTCPPCP

SEQ ID NO: 1514 - protein, 9 aa, synthetic construct
CCVECPPCP

SEQ ID NO: 1515 - protein, 234 aa, synthetic construct
PAEPKSPDKTHTCPPCPAPPVAGPSVFLFPPKPKDTLMIARTPEVTCVVVDVSHEDPEVKFNWYVDGVEVHNAKTKPREEQYNSTYRVVSVLTVLHQDWLNGKEYKCKVSNKALPAPIEKTISKAKGQPREPQVYTLPPSRDELTKNQVSLTCLVKGFYPSDIAVEWESNGQPENNYKTTPPVLDSDGSFFLYSKLTVDKSRWQQGNVFSCSVMHEALHNHYTQKSLSLSPGKK

SEQ ID NO: 1516 - protein, 235 aa, synthetic construct
PAEPKSPDKTHTCPPCPAPPVAGPSVFLFPPKPKDTLMIARTPEVTCVVVDVSHEDPEVKFNWYVDGVEVHNAKTKPREEQYNSTYRVVSVLTVLHQDWLNGKEYKCKVSNKALPAPIEKTISKAKGQPREPQVYTLPPSRDELTKNQVSLTCLVKGFYPSDIAVEWESNGQPENNYKTTPPVLDSDGSFFLYSKLTVDKSRWQQGNVFSCSVMHEALHNHYTQKSLSSLSPGKK

SEQ ID NO: 1517 - protein, 229 aa, synthetic construct
ESKYGPPCPPCPAPEFEGGPSVFLFPPKPKDTLMISRTPEVTCVVVDVSQEDPEVQFNWYVDGVEVHNAKTKPREEQFNSTYRVVSVLTVLHQDWLNGKEYKCKVSNKGLPSSIEKTISKAKGQPREPQVYTLPPSQEEMTKNQVSLTCLVKGFYPSDIAVEWESNGQPENNYKTTPPVLDSDGSFFLYSRLTVDKSRWQEGNVFSCSVMHEALHNHYTQKSLSLSLGK

SEQ ID NO: 1518 - protein, 119 aa, synthetic construct
ESKYGPPCPPCPGQPREPQVYTLPPSQEEMTKNQVSLTCLVKGFYPSDIAVEWESNGQPENNYKTTPPVLDSDGSFFLYSRLTVDKSRWQEGNVFSCSVMHEALHNHYTQKSLSLSLGK

SEQ ID NO: 1519 - protein, 12 aa, synthetic construct
ESKYGPPCPPCP

SEQ ID NO: 1520 - protein, 88 aa, synthetic construct
TPPPCPRCPEPKSCDTPPPCPRCPEPKSCDTPPPCPRCPEPKSCDTPPPCPRCPEPKSCDTPPPCPRCPEPKSCDTPPPCPRCPEPKS

SEQ ID NO: 1521 - protein, 210 aa, synthetic construct
MRPRLWLLLAAQLTVLHGNSVLQQTPAYIKVQTNKMVMLSCEAKISLSNMRIYWLRQRQAPSSDSHHEFLALWDSAKGTIHGEEVEQEKIAVFRDASRFILNLTSVKPEDSGIYFCMIVGSPELTFGKGTQLSVVDFLPTTAQPTKKSTLKKRVCRLPRPETQKGPLCSPITLGLLVAGVLVLLVSLGVAIHLCCRRRRARLRFMKQFYK

SEQ ID NO: 1522 - protein, 235 aa, synthetic construct
MALPVTALLLPLALLLHAARPSQFRVSPLDRTWNLGETVELKCQVLLSNPTSGCSWLFQPRGAAASPTFLLYLSQNKPKAAEGLDTQRFSGKRLGDTFVLTLSDFRRENEGYYFCSALSNSIMYFSHFVPVFLPAKPTTTPAPRPPTPAPTIASQPLSLRPEACRPAAGGAVHTRGLDFACDIYIWAPLAGTCGVLLLSLVITLYCNHRNRRRVCKCPRPVVKSGDKPSLSARYV

SEQ ID NO: 1523 - protein, 458 aa, synthetic construct
MNRGVPFRHLLLVLQLALLPAATQGKKVVLGKKGDTVELTCTASQKKSIQFHWKNSNQIKILGNQGSFLTKGPSKLNDRADSRRSLWDQGNFPLIIKNLKIEDSDTYICEVEDQKEEVQLLVFGLTANSDTHLLQGQSLTLTLESPPGSSPSVQCRSPRGKNIQGGKTLSVSQLELQDSGTWTCTVLQNQKKVEFKIDIVVLAFQKASSIVYKKEGEQVEFSFPLAFTVEKLTGSGELWWQAERASSSKSWITFDLKNKEVSVKRVTQDPKLQMGKKLPLHLTLPQALPQYAGSGNLTLALEAKTGKLHQEVNLVVMRATQLQKNLTCEVWGPTSPKLMLSLKLENKEAKVSKREKAVWVLNPEAGMWQCLLSDSGQVLLESNIKVLPTWSTPVQPMALIVLGGVAGLLLFIGLGIFFCVRCRHRRRQAERMSQIKRLLSEKKTCQCPHRFQKTCSPI

SEQ ID NO: 1524 - protein, 19 aa, synthetic construct
HLCCRRRRARLRFMKQFYK

SEQ ID NO: 1525 - protein, 32 aa, synthetic construct
LYCNHRNRRRVCKCPRPVVKSGDKPSLSARYV

SEQ ID NO: 1526 - protein, 40 aa, synthetic construct
CVRCRHRRRQAERMSQIKRLLSEKKTCQCPHRFQKTCSPI

SEQ ID NO: 1527 - protein, 8 aa, synthetic construct
DYKDDDDK

SEQ ID NO: 1528 - protein, 730 aa, synthetic construct
MALPVTALLLPLALLLHAARPDIQMTQTTSSLSASLGDRVTISCRASQDISKYLNWYQQKPDGTVKLLIYHTSRLHSGVPSRFSGSGSGTDYSLTISNLEQEDIATYFCQQGNTLPYTFGGGTKLEITGGGGSGGGGSGGGGSEVKLQESGPGLVAPSQSLSVTCTVSGVSLPDYGVSWIRQPPRKGLEWLGVIWGSETTYYNSALKSRLTIIKDNSKSQVFLKMNSLQTDDTAIYYCAKHYYYGGSYAMDYWGQGTSVTVSSTRGGSGVFTLEDFVGDWRQTAGYNLDQVLEQGGVSSLFQNLGVSVTPIQRIVLSGENGLKIDIHVIIPYEGLSGDQMGQIEKIFKVVYPVDDHHFKVILHYGTLVIDGVTPNMIDYFGRPYEGIAVFDGKKITVTGTLWNGNKIIDERLINPDGSLLFRVTINGVTGWRLCERILALEGGSWSHPQFEKDYKDDDDKGSDYKDDDDKGSDYKDDDDKGSDYKDDDDKAWSHPQFEKHHHHHHHHTSGSGEGRGSLLTCGDVEENPGPHMTEYKPTVRLATRDDVPRAVRTLAAAFADYPATRHTVDPDRHIERVTELQELFLTRVGLDIGKVWVADDGAAVAVWTTPESVEAGAVFAEIGPRMAELSGSRLAAQQQMEGLLAPHRPKEPAWFLATVGVSPDHQGKGLGSAVVLPGVEAAERAGVPAFLETSAPRNLPFYERLGFTVTADVEVPEGPRTWCMTRKPGA

SEQ ID NO: 1529 - protein, 675 aa, synthetic construct
MPSWALFMVTSCLLLAPQNLAQVSSQDVSLLASDSEPLKCFSRTFEDLTCFWDEEEAAPSGTYQLLYAYPREKPRACPLSSQSMPHFGTRYVCQFPDQEEVRLFFPLHLWVKNVFLNQTRTQRVLFVDSVGLPAPPSIIKAMGGSQPGELQISWEEPAPEISDFLRYELRYGPRDPKNSTGPTVIQLIATETCCPALQRPHSASALDQSPCAQPTMPWQDGPKQTSPSREASALTAEGGSCLISGLQPGNSYWLQLRSEPDGISLGGSWGSWSLPVTVDLPGDAVALGLQCFTLDLKNVTCQWQQQDHASSQGFFYHSRARCCPRDRYPIWENCEEEEKTNPGLQTPQFSRCHFKSRNDSIIHILVEVTTAPGTVHSYLGSPFWIHQAVRLPTPNLHWREISSGHLELEWQHPSSWAAQETCYQLRYTGEGHQDWKVLEPPLGARGGTLELRPRSRYRLQLRARLNGPTYQGPWSSWSDPTRVETATETATRGGSGVFTLEDFVGDWRQTAGYNLDQVLEQGGVSSLFQNLGVSVTPIQRIVLSGENGLKIDIHVIIPYEGLSGDQMGQIEKIFKVVYPVDDHHFKVILHYGTLVIDGVTPNMIDYFGRPYEGIAVFDGKKITVTGTLWNGNKIIDERLINPDGSLLFRVTINGVTGWRLCERILASWKDASGWS

SEQ ID NO: 1530 - protein, 483 aa, synthetic construct
MPPPRLLFFLLFLTPMEVRPDYKDDDDKEEPLVVKVEEGDNAVLQCLKGTSDGPTQQLTWSRESPLKPFLKLSLGLPGLGIHMRPLAIWLFIFNVSQQMGGFYLCQPGPPSEKAWQPGWTVNVEGSGELFRWNVSDLGGLGCGLKNRSSEGPSSPSGKLMSPKLYVWAKDRPEIWEGEPPCLPPRDSLNQSLSQDLTMAPGSTLWLSCGVPPDSVSRGPLSWTHVHPKGPKSLLSLELKDDRPARDMWVMETGLLLPRATAQDAGKYYCHRGNLTMSFHLEITARPVLWHWLLRTGGWTRGGSGVFTLEDFVGDWRQTAGYNLDQVLEQGGVSSLFQNLGVSVTPIQRIVLSGENGLKIDIHVIIPYEGLSGDQMGQIEKIFKVVYPVDDHHFKVILHYGTLVIDGVTPNMIDYFGRPYEGIAVFDGKKITVTGTLWNGNKIIDERLINPDGSLLFRVTINGVTGWRLCERILASWKDASGWS

SEQ ID NO: 1531 - protein, 765 aa, synthetic construct
MPPPRLLFFLLFLTPMEVRPDYKDDDDKEEPLVVKVEEGDNAVLQCLKGTSDGPTQQLTWSRESPLKPFLKLSLGLPGLGIHMRPLAIWLFIFNVSQQMGGFYLCQPGPPSEKAWQPGWTVNVEGSGELFRWNVSDLGGLGCGLKNRSSEGPSSPSGKLMSPKLYVWAKDRPEIWEGEPPCLPPRDSLNQSLSQDLTMAPGSTLWLSCGVPPDSVSRGPLSWTHVHPKGPKSLLSLELKDDRPARDMWVMETGLLLPRATAQDAGKYYCHRGNLTMSFHLEITARPVLWHWLLRTGGWTRGGSGVFTLEDFVGDWRQTAGYNLDQVLEQGGVSSLFQNLGVSVTPIQRIVLSGENGLKIDIHVIIPYEGLSGDQMGQIEKIFKVVYPVDDHHFKVILHYGTLVIDGVTPNMIDYFGRPYEGIAVFDGKKITVTGTLWNGNKIIDERLINPDGSLLFRVTINGVTGWRLCERILALEGGSWSHPQFEKDYKDDDDKGSDYKDDDDKGSDYKDDDDKGSDYKDDDDKAWSHPQFEKHHHHHHHHTSGSGEGRGSLLTCGDVEENPGPHMTEYKPTVRLATRDDVPRAVRTLAAAFADYPATRHTVDPDRHIERVTELQELFLTRVGLDIGKVWVADDGAAVAVWTTPESVEAGAVFAEIGPRMAELSGSRLAAQQQMEGLLAPHRPKEPAWFLATVGVSPDHQGKGLGSAVVLPGVEAAERAGVPAFLETSAPRNLPFYERLGFTVTADVEVPEGPRTWCMTRKPGA

SEQ ID NO: 1532 - protein, 8 aa, synthetic construct
WSHPQFEK

SEQ ID NO: 1533 - protein, 199 aa, synthetic construct
MTEYKPTVRLATRDDVPRAVRTLAAAFADYPATRHTVDPDRHIERVTELQELFLTRVGLDIGKVWVADDGAAVAVWTTPESVEAGAVFAEIGPRMAELSGSRLAAQQQMEGLLAPHRPKEPAWFLATVGVSPDHQGKGLGSAVVLPGVEAAERAGVPAFLETSAPRNLPFYERLGFTVTADVEVPEGPRTWCMTRKPGA

SEQ ID NO: 1534 - protein, 132 aa, synthetic construct
MAKPLSQEESTLIERATATINSIPISEDYSVASAALSSDGRIFTGVNVYHFTGGPCAELVVLGTAAAAAAGNLTCIVAIGNENRGILSPCGRCRQVLLDLHPGIKAIVKDSDGQPTAVGIRELLPSGYVWEG

SEQ ID NO: 1535 - protein, 172 aa, synthetic construct
MGNEASYPLEMCSHFDADEIKRLGKRFKKLDLDNSGSLSVEEFMSLPELQQNPLVQRVIDIFDTDGNGEVDFKEFIEGVSQFSVKGDKEQKLRFAFRIYDMDKDGYISNGELFQVLKMMVGNNTKLADTQLQQIVDKTIINADKDGDGRISFEEFCAVVGGLDIHKKMVVDV

SEQ ID NO: 1536 - protein, 357 aa, synthetic construct
MLLLVTSLLLCELPHPAFLLIPRKVCNGIGIGEFKDSLSINATNIKHFKNCTSISGDLHILPVAFRGDSFTHTPPLDPQELDILKTVKEITGFLLIQAWPENRTDLHAFENLEIIRGRTKQHGQFSLAVVSLNITSLGLRSLKEISDGDVIISGNKNLCYANTINWKKLFGTSGQKTKIISNRGENSCKATGQVCHALCSPEGCWGPEPRDCVSCRNVSRGRECVDKCNLLEGEPREFVENSECIQCHPECLPQAMNITCTGRGPDNCIQCAHYIDGPHCVKTCPAGVMGENNTLVWKYADAGHVCHLCHPNCTYGCTGPGLEGCPTNGPKIPSIATGMVGALLLLLVVALGIGLFM

SEQ ID NO: 1537 - protein, 424 aa, synthetic construct
MRPSGTAGAAFLALLAALCPASRALEEKKGNYVVTDHGSCVRACGADSYEMEEDGVRKCKKCEGPCRKVCNGIGIGEFKDSLSINATNIKHFKNCTSISGDLHILPVAFRGDSFTHTPPLDPQELDILKTVKEITGFLLIQAWPENRTDLHAFENLEIIRGRTKQHGQFSLAVVSLNITSLGLRSLKEISDGDVIISGNKNLCYANTINWKKLFGTSGQKTKIISNRGENSCKATGQVCHALCSPEGCWGPEPRDCVSCRNVSRGRECVDKCNLLEGEPREFVENSECIQCHPECLPQAMNITCTGRGPDNCIQCAHYIDGPHCVKTCPAGVMGENNTLVWKYADAGHVCHLCHPNCTYGCTGPGLEGCPTNGPKIPSIATGMVGALLLLLVVALGIGLFMRRRHIVRKRTLRRLLQERELVEP

SEQ ID NO: 1538 - protein, 333 aa, synthetic construct
MPPPRLLFFLLFLTPMEVRPEEPLVVKVEEGDNAVLQCLKGTSDGPTQQLTWSRESPLKPFLKLSLGLPGLGIHMRPLAIWLFIFNVSQQMGGFYLCQPGPPSEKAWQPGWTVNVEGSGELFRWNVSDLGGLGCGLKNRSSEGPSSPSGKLMSPKLYVWAKDRPEIWEGEPPCLPPRDSLNQSLSQDLTMAPGSTLWLSCGVPPDSVSRGPLSWTHVHPKGPKSLLSLELKDDRPARDMWVMETGLLLPRATAQDAGKYYCHRGNLTMSFHLEITARPVLWHWLLRTGGWKVSAVTLAYLIFCLCSLVGILHLQRALVLRRKRKRMTDPTRRF

SEQ ID NO: 1539 - protein, 105 aa, synthetic construct
MALPVTALLLPLALLLHAARPFEMLQMAGQCSQNEYFDSLLHACIPCQLRCSSNTPPLTCQRYCNASVTNSVKGTNAILWTCLGLSLIISLAVFVLMFLLRKINS

SEQ ID NO: 1540 - protein, 188 aa, synthetic construct
MATYEVLCEVARKLGTDDREVVLFLLNVFIPQPTLAQLIGALRALKEEGRLTFPLLAECLFRAGRRDLLRDLLHLDPRFLERHLAGTMSYFSPYQLTVLHVDGELCARDIRSLIFLSKDTIGSRSTPQTFLHWVYCMENLDLLGPTDVDALMSMLRSLSRVDLQRQVQTLMGLHLSGPSHSQHYRHTP

SEQ ID NO: 1541 - protein, 241 aa, synthetic construct
MSDSKEVPSLPFLRHLLEELDSHEDSLLLFLCHDAAPGCTTVTQALCSLSQQRKLTLAALVEMLYVLQRMDLLKSRFGLSKEGAEQLLGTSFLTRYRKLMVCVGEELDSSELRALRLFACNLNPSLSTALSESSRFVELVLALENVGLVSPSSVSVLADMLRTLRRLDLCQQLVEYEQQEQARYRYCYAASPSLPVRTLRRGHGASEHEQLCMPVQESSDSPELLRTPVQESSSDSPEQTT

SEQ ID NO: 1542 - protein, 188 aa, synthetic construct; identical to SEQ ID NO: 1540

SEQ ID NO: 1543 - protein, 400 aa, synthetic construct
MLEGVQVETISPGDGRTFPKRGQTCVVHYTGMLEDGKKVDSSRDRNKPFKFMLGKQEVIRGWEEGVAQMSVGQRAKLTISPDYAYGATGHPGIIPPHATLVFDVELLKLESGGGSGVDGFGDVGALESLRGNADLAYILSMEPCGHCLIINNVNFCRESGLRTRTGSNIDCEKLRRRFSSLHFMVEVKGDLTAKKMVLALLELAQQDHGALDCCVVVILSHGCQASHLQFPGAVYGTDGCPVSVEKIVNIFNGTSCPSLGGKPKLFFIQACGGEQKDHGFEVASTSPEDESPGSNPEPDATPFQEGLRTFDQLDAISSLPTPSDIFVSYSTFPGFVSWRDPKSGSWYVETLDDIFEQWAHSEDLQSLLLRVANAVSVKGIYKQMPGCFNFLRKKLFFKTS

SEQ ID NO: 1544 - protein, 395 aa, synthetic construct
MYRMQLLSCIALSLALVTNSAPTSSSTKKTQLQLEHLLLDLQMILNGINNYKNPKLTRMLTFKFYMPKKATELKHLQCLEEELKPLEEVLNLAQSKNFHLRPRDLISNINVIVLELKGSETTFMCEYADETATIVEFLNRWITFCQSIISTLTTRGGGSSRKIEVMYPPPYLDNEKSNGTIIHVKGKHLCPSPLFPGPSKPFWVLVVVGGVLACYSLLVTVAFIIFWVRSKRSSSRAKRSGSGATNFSLLKQAGDVEENPGPHMAKPLSQEESTLIERATATINSIPISEDYSVASAALSSDGRIFTGVNVYHFTGGPCAELVVLGTAAAAAAGNLTCIVAIGNENRGILSPCGRCRQVLLDLHPGIKAIVKDSDGQPTAVGIRELLPSGYVWEG

SEQ ID NO: 1545 - protein, 30 aa, synthetic construct; identical to SEQ ID NO: 1393

SEQ ID NO: 1546 - protein, 30 aa, synthetic construct; identical to SEQ ID NO: 1393

SEQ ID NO: 1547 - protein, 30 aa, synthetic construct
QSFGLLDPKLSYLLDGILFIYGVILTALFL

SEQ ID NO: 1548 - protein, 30 aa, synthetic construct; identical to SEQ ID NO: 1547

SEQ ID NO: 1549 - protein, 36 aa, synthetic construct
RDQRLPPDAHKPPGGGSFRTPIQEEQADAHSTLAKI

SEQ ID NO: 1550 - protein, 36 aa, synthetic construct; identical to SEQ ID NO: 1549

SEQ ID NO: 1551 - protein, 66 aa, synthetic construct
QSFGLLDPKLCYLLDGILFIYGVILTALFLRDQRLPPDAHKPPGGGSFRTPIQEEQADAHSTLAKI

SEQ ID NO: 1552 - protein, 66 aa, synthetic construct; identical to SEQ ID NO: 1551

SEQ ID NO: 1553 - protein, 66 aa, synthetic construct
QSFGLLDPKLSYLLDGILFIYGVILTALFLRDQRLPPDAHKPPGGGSFRTPIQEEQADAHSTLAKI

SEQ ID NO: 1554 - protein, 66 aa, synthetic construct; identical to SEQ ID NO: 1553

SEQ ID NO: 1555 - protein, 115 aa, synthetic construct
MGGLEPCSRLLLLPLLLAVSGLRPVQAGSQAQSDCSCSTVSPGVLAGIVMGDLVLTVLIALAVYFLGRLVPRGRGAAEAATRKQRITETESPYQELQGQRSDVYSDLNTQRPYYK

SEQ ID NO: 1556 - protein, 86 aa, synthetic construct
QAQSDCSCSTVSPGVLAGIVMGDLVLTVLIALAVYFLGRLVPRGRGAAEAATRKQRITETESPYQELQGQRSDVYSDLNTQRPYYK

SEQ ID NO: 1557 - protein, 115 aa, synthetic construct
MGGLEPCSRLLLLPLLLAVSGLRPVQAGTQAQSDCSCSTVSPGVLAGIVMGDLVLTVLIALAVYFLGRLVPRGRGAAEAATRKQRITETESPYQELQGQRSDVYSDLNTQRPYYK

SEQ ID NO: 1558 - protein, 86 aa, synthetic construct; identical to SEQ ID NO: 1556

SEQ ID NO: 1559 - protein, 115 aa, synthetic construct
MGGLEPCSRLLLLPLLLAVSGLRPVQAGSQAQSDCSSSTVSPGVLAGIVMGDLVLTVLIALAVYFLGRLVPRGRGAAEAATRKQRITETESPYQELQGQRSDVYSDLNTQRPYYK

SEQ ID NO: 1560 - protein, 86 aa, synthetic construct
QAQSDCSSSTVSPGVLAGIVMGDLVLTVLIALAVYFLGRLVPRGRGAAEAATRKQRITETESPYQELQGQRSDVYSDLNTQRPYYK

SEQ ID NO: 1561 - protein, 115 aa, synthetic construct
MGGLEPCSRLLLLPLLLAVSGLRPVQAGTQAQSDCSSSTVSPGVLAGIVMGDLVLTVLIALAVYFLGRLVPRGRGAAEAATRKQRITETESPYQELQGQRSDVYSDLNTQRPYYK

SEQ ID NO: 1562 - protein, 86 aa, synthetic construct; identical to SEQ ID NO: 1560

SEQ ID NO: 1563 - protein, 183 aa, synthetic construct
LWVSQPPEIRTLEGSSAFLPCSFNASQGRLAIGSVTWFRDEVVPGKEVRNGTPEFRGRLAPLASSRFLHDHQAELHIRDVRGHDASIYVCRVEVLGLGVGTGNGTRLVVEKEHPQLGAGTVLLLRAGFYAVSFLSVAVGSTVYYQGKCLTWKGPRRQLPAVVPAPLPPPCGSSAHLLPPVPGG

SEQ ID NO: 1564 - protein, 76 aa, synthetic construct
VVEKEHPQLGAGTVLLLRAGFYAVSFLSVAVGSTVYYQGKCLTWKGPRRQLPAVVPAPLPPPCGSSAHLLPPVPGG

SEQ ID NO: 1565 - protein, 108 aa, synthetic construct
LWVSQPPEIRTLEGSSAFLPCSFNASQGRLAIGSVTWFRDEVVPGKEVRNGTPEFRGRLAPLASSRFLHDHQAELHIRDVRGHDASIYVCRVEVLGLGVGTGNGTRLV

SEQ ID NO: 1566 - protein, 9 aa, synthetic construct
VEKEHPQLG

SEQ ID NO: 1567 - protein, 21 aa, synthetic construct
AGTVLLLRAGFYAVSFLSVAV

SEQ ID NO: 1568 - protein, 44 aa, synthetic construct
GQHRVLSGQVPDLEGTKATACCGACSFASSMWKLCPSAATCSRR

SEQ ID NO: 1569 - protein, 183 aa, synthetic construct; identical to SEQ ID NO: 1563

SEQ ID NO: 1570 - protein, 75 aa, synthetic construct
VEKEHPQLGAGTVLLLRAGFYAVSFLSVAVGSTVYYQGKCLTWKGPRRQLPAVVPAPLPPPCGSSAHLLPPVPGG

SEQ ID NO: 1571 - protein, 108 aa, synthetic construct; identical to SEQ ID NO: 1565

SEQ ID NO: 1572 - protein, 9 aa, synthetic construct
VEKEHPQLG

SEQ ID NO: 1573 - protein, 21 aa, synthetic construct
AGTVLLLRAGFYAVSFLSVAV

SEQ ID NO: 1574 - protein, 45 aa, synthetic construct
GSTVYYQGKCLTWKGPRRQLPAVVPAPLPPPCGSSAHLLPPVPGG

SEQ ID NO: 1575 - protein, 286 aa, synthetic construct
MAWRALHPLLLLLLLFPGSQAGTSGEFGSLEQSKAQVLQSVAGQTLTVRCQYPPTGSLYEKKGWCKEASALVCIRLVTSSKPRTMAWTSRFTIWDDPDAGFFTVTMTDLREEDSGHYWCRIYRPSDNSVSKSVRFYLVVSPASASTQTSWTPRDLVSSQTQTQSCVPPTAGARQAPESPSTIPVPSQPQNSTLRPGPAAPIALVPVFCGLLVAKSLVLSALLVWWGDIWWKTMMELRSLDTQKATCHLQQVTDLPWTSVSSPVEREILYHTVARTKISDDDDEHTL

SEQ ID NO: 1576 - protein, 255 aa, synthetic construct
QSKAQVLQSVAGQTLTVRCQYPPTGSLYEKKGWCKEASALVCIRLVTSSKPRTMAWTSRFTIWDDPDAGFFTVTMTDLREEDSGHYWCRIYRPSDNSVSKSVRFYLVVSPASASTQTSWTPRDLVSSQTQTQSCVPPTAGARQAPESPSTIPVPSQPQNSTLRPGPAAPIALVPVFCGLLVAKSLVLSALLVWWGDIWWKTMMELRSLDTQKATCHLQQVTDLPWTSVSSPVEREILYHTVARTKISDDDDEHTL

SEQ ID NO: 1577 - protein, 156 aa, synthetic construct
KSVRFYLVVSPASASTQTSWTPRDLVSSQTQTQSCVPPTAGARQAPESPSTIPVPSQPQNSTLRPGPAAPIALVPVFCGLLVAKSLVLSALLVWWGDIWWKTMMELRSLDTQKATCHLQQVTDLPWTSVSSPVEREILYHTVARTKISDDDDEHTL

SEQ ID NO: 1578 - protein, 99 aa, synthetic construct
QSKAQVLQSVAGQTLTVRCQYPPTGSLYEKKGWCKEASALVCIRLVTSSKPRTMAWTSRFTIWDDPDAGFFTVTMTDLREEDSGHYWCRIYRPSDNSVS

SEQ ID NO: 1579 - protein, 72 aa, synthetic construct
KSVRFYLVVSPASASTQTSWTPRDLVSSQTQTQSCVPPTAGARQAPESPSTIPVPSQPQNSTLRPGPAAPIA

SEQ ID NO: 1580 - protein, 21 aa, synthetic construct
LVPVFCGLLVAKSLVLSALLV

SEQ ID NO: 1581 - protein, 63 aa, synthetic construct
WWGDIWWKTMMELRSLDTQKATCHLQQVTDLPWTSVSSPVEREILYHTVARTKISDDDDEHTL

SEQ ID NO: 1582 - protein, 285 aa, synthetic construct
MAWRALHPLLLLLLLFPGSQAGSSFEGSTRQSKAQVLQSVAGQTLTVRCQYPPTGSLYEKKGWCKEASALVCIRLVTSSKPRTMAWTSRFTIWDDPDAGFFTVTMTDLREEDSGHYWCRIYRPSDNSVSKSVRFYLVVSPASASTQTSWTPRDLVSSQTQTQSCVPPTAGARQAPESPSTIPVPSQPQNSTLRPGPAAPIALVPVFCGLLVAKSLVLSALLVWWGDIWWKTMMELRSLDTQKATCHLQQVTDLPWTSVSSPVEREILYHTVARTKISDDDDEHTL

SEQ ID NO: 1583 - protein, 255 aa, synthetic construct; identical to SEQ ID NO: 1576

SEQ ID NO: 1584 - protein, 156 aa, synthetic construct; identical to SEQ ID NO: 1577

SEQ ID NO: 1585 - protein, 99 aa, synthetic construct; identical to SEQ ID NO: 1578

SEQ ID NO: 1586 - protein, 72 aa, synthetic construct; identical to SEQ ID NO: 1579

SEQ ID NO: 1587 - protein, 21 aa, synthetic construct
LVPVFCGLLVAKSLVLSALLV

SEQ ID NO: 1588 - protein, 63 aa, synthetic construct; identical to SEQ ID NO: 1581

SEQ ID NO: 1589 - protein, 283 aa, synthetic construct
QQQTLPKPFIWAEPHFMVPKEKQVTICCQGNYGAVEYQLHFEGSLFAVDRPKPPERINKVQFYIPDMNSRMAGQYSCIYRVGELWSEPSNLLDLVVTEMYDTPTLSVHPGPEVISGEKVTFYCRLDTATSMFLLLKEGRSSHVQRGYGKVQAEFPLGPVTTAHRGTYRCFGSYNNHAWSFPSEPVKLLVTGDIENTSLAPEDPTFPADTWGTYLLTTETGLQKDHALWDHTAQNLLRMGLAFLVLVALVWFLVEDWLSRKRTRERASRASTWEGRRRLNTQTL

SEQ ID NO: 1590 - protein, 186 aa, synthetic construct
EMYDTPTLSVHPGPEVISGEKVTFYCRLDTATSMFLLLKEGRSSHVQRGYGKVQAEFPLGPVTTAHRGTYRCFGSYNNHAWSFPSEPVKLLVTGDIENTSLAPEDPTFPADTWGTYLLTTETGLQKDHALWDHTAQNLLRMGLAFLVLVALVWFLVEDWLSRKRTRERASRASTWEGRRRLNTQTL

SEQ ID NO: 1591 - protein, 176 aa, synthetic construct
HPGPEVISGEKVTFYCRLDTATSMFLLLKEGRSSHVQRGYGKVQAEFPLGPVTTAHRGTYRCFGSYNNHAWSFPSEPVKLLVTGDIENTSLAPEDPTFPADTWGTYLLTTETGLQKDHALWDHTAQNLLRMGLAFLVLVALVWFLVEDWLSRKRTRERASRASTWEGRRRLNTQTL

SEQ ID NO: 1592 - protein, 93 aa, synthetic construct
GDIENTSLAPEDPTFPADTWGTYLLTTETGLQKDHALWDHTAQNLLRMGLAFLVLVALVWFLVEDWLSRKRTRERASRASTWEGRRRLNTQTL

SEQ ID NO: 1593 - protein, 97 aa, synthetic construct
QQQTLPKPFIWAEPHFMVPKEKQVTICCQGNYGAVEYQLHFEGSLFAVDRPKPPERINKVQFYIPDMNSRMAGQYSCIYRVGELWSEPSNLLDLVVT

SEQ ID NO: 1594 - protein, 10 aa, synthetic construct
EMYDTPTLSV

SEQ ID NO: 1595 - protein, 83 aa, synthetic construct
HPGPEVISGEKVTFYCRLDTATSMFLLLKEGRSSHVQRGYGKVQAEFPLGPVTTAHRGTYRCFGSYNNHAWSFPSEPVKLLVT

SEQ ID NO: 1596 - protein, 47 aa, synthetic construct
GDIENTSLAPEDPTFPADTWGTYLLTTETGLQKDHALWDHTAQNLLR

SEQ ID NO: 1597 - protein, 21 aa, synthetic construct
MGLAFLVLVALVWFLVEDWLS

SEQ ID NO: 1598 - protein, 25 aa, synthetic construct
RKRTRERASRASTWEGRRRLNTQTL

SEQ ID NO: 1599 - protein, 283 aa, synthetic construct; identical to SEQ ID NO: 1589

SEQ ID NO: 1600 - protein, 186 aa, synthetic construct; identical to SEQ ID NO: 1590

SEQ ID NO: 1601 - protein, 177 aa, synthetic construct
VHPGPEVISGEKVTFYCRLDTATSMFLLLKEGRSSHVQRGYGKVQAEFPLGPVTTAHRGTYRCFGSYNNHAWSFPSEPVKLLVTGDIENTSLAPEDPTFPADTWGTYLLTTETGLQKDHALWDHTAQNLLRMGLAFLVLVALVWFLVEDWLSRKRTRERASRASTWEGRRRLNTQTL

SEQ ID NO: 1602 - protein, 93 aa, synthetic construct; identical to SEQ ID NO: 1592

SEQ ID NO: 1603 - protein, 97 aa, synthetic construct; identical to SEQ ID NO: 1593

SEQ ID NO: 1604 - protein, 10 aa, synthetic construct
EMYDTPTLSV

SEQ ID NO: 1605 - protein, 83 aa, synthetic construct; identical to SEQ ID NO: 1595

SEQ ID NO: 1606 - protein, 47 aa, synthetic construct; identical to SEQ ID NO: 1596

SEQ ID NO: 1607 - protein, 21 aa, synthetic construct
MGLAFLVLVALVWFLVEDWLS

SEQ ID NO: 1608 - protein, 25 aa, synthetic construct
RKRTRERASRASTWEGRRRLNTQTL

SEQ ID NO: 1609 - protein, 238 aa, synthetic construct
GMRTEDLPKAVVFLEPQWYRVLEKDSVTLKCQGAYSPEDNSTQWFHNESLISSQASSYFIDAATVDDSGEYRCQTNLSTLSDPVQLEVHIGWLLLQAPRWVFKEEDPIHLRCHSWKNTALHKVTYLQNGKGRKYFHHNSDFYIPKATLKDSGSYFCRGLVGSKNVSSETVNITITQGLAVSTISSFFPPGYQVSFCLVMVLLFAVDTGLYFSVKTNIRSSTRDWKDHKFKWRKDPQDK

SEQ ID NO: 1610 - protein, 238 aa, synthetic construct; identical to SEQ ID NO: 1609

SEQ ID NO: 1611 - protein, 238 aa, synthetic construct; identical to SEQ ID NO: 1446

SEQ ID NO: 1612 - protein, 89 aa, synthetic construct
MIPAVVLLLLLLVEQAAALGSLGEPQLCYILDAILFLYGIVLTLLYCRLKIQVRKAAITSYEKSDGVYTGLSTRNQETYETLKHEKPPQ

SEQ ID NO: 1613 - protein, 68 aa, synthetic construct
LGEPQLCYILDAILFLYGIVLTLLYCRLKIQVRKAAITSYEKSDGVYTGLSTRNQETYETLKHEKPPQ

SEQ ID NO: 1614 - protein, 89 aa, synthetic construct
MIPAVVLLLLLLVEQAAALGTLGEPQLCYILDAILFLYGIVLTLLYCRLKIQVRKAAITSYEKSDGVYTGLSTRNQETYETLKHEKPPQ

SEQ ID NO: 1615 - protein, 68 aa, synthetic construct; identical to SEQ ID NO: 1613

SEQ ID NO: 1616 - protein, 89 aa, synthetic construct
MIPAVVLLLLLLVEQAAALGSLGEPQLSYILDAILFLYGIVLTLLYCRLKIQVRKAAITSYEKSDGVYTGLSTRNQETYETLKHEKPPQ

SEQ ID NO: 1617 - protein, 68 aa, synthetic construct
LGEPQLSYILDAILFLYGIVLTLLYCRLKIQVRKAAITSYEKSDGVYTGLSTRNQETYETLKHEKPPQ

SEQ ID NO: 1618 - protein, 89 aa, synthetic construct
MIPAVVLLLLLLVEQAAALGTLGEPQLSYILDAILFLYGIVLTLLYCRLKIQVRKAAITSYEKSDGVYTGLSTRNQETYETLKHEKPPQ

SEQ ID NO: 1619 - protein, 68 aa, synthetic construct; identical to SEQ ID NO: 1617

SEQ ID NO: 1620 - protein, 150 aa, synthetic construct
QSFGLLDPKLSYLLDGILFIYGVILTALFLWRRKRKEKQSETSPKEFLTIYEDVKDLKTRRNHEQEQTFPGGGSTIYSMIQSQSSAPTSQEPAYTLYSLIQPSRKSGSRKRNHSPSFNSTIYEVIGKSQPKAQNPARLSRKELENFDVYS

SEQ ID NO: 1621 - protein, 120 aa, synthetic construct
WRRKRKEKQSETSPKEFLTIYEDVKDLKTRRNHEQEQTFPGGGSTIYSMIQSQSSAPTSQEPAYTLYSLIQPSRKSGSRKRNHSPSFNSTIYEVIGKSQPKAQNPARLSRKELENFDVYS

SEQ ID NO: 1622 - protein, 152 aa, synthetic construct
QSFGLLDPKLSYLLDGILFIYGVILTALFLWRRKRKEKQSETSPKEFLTIYEDVKDLKTRRNHEQEQTFPGGGSTIYSMIQSQSSAPTSQEPAYTLYSLIQPSRKSGSRKRNHSPSFNSTIYEVIGKSQPKAQNPARLSRKELENFDVYSSR

SEQ ID NO: 1623 - protein, 120 aa, synthetic construct; identical to SEQ ID NO: 1621

SEQ ID NO: 1624 - protein, 199 aa, synthetic construct
AKPTTTPAPRPPTPAPTIASQPLSLRPEACRPAAGGAVHTRGLDFACDSNLFVASWIAVMIIFRIGMAVAIFCCFFFPSWRRKRKEKQSETSPKEFLTIYEDVKDLKTRRNHEQEQTFPGGGSTIYSMIQSQSSAPTSQEPAYTLYSLIQPSRKSGSRKRNHSPSFNSTIYEVIGKSQPKAQNPARLSRKELENFDVYS

SEQ ID NO: 1625 - protein, 48 aa, synthetic construct
AKPTTTPAPRPPTPAPTIASQPLSLRPEACRPAAGGAVHTRGLDFACD

SEQ ID NO: 1626 - protein, 31 aa, synthetic construct
SNLFVASWIAVMIIFRIGMAVAIFCCFFFPS

SEQ ID NO: 1627 - protein, 120 aa, synthetic construct; identical to SEQ ID NO: 1621

SEQ ID NO: 1628 - protein, 199 aa, synthetic construct; identical to SEQ ID NO: 1624

SEQ ID NO: 1629 - protein, 48 aa, synthetic construct; identical to SEQ ID NO: 1625

SEQ ID NO: 1630 - protein, 31 aa, synthetic construct; identical to SEQ ID NO: 1626

SEQ ID NO: 1631 - protein, 120 aa, synthetic construct; identical to SEQ ID NO: 1621

SEQ ID NO: 1632 - protein, 199 aa, synthetic construct
AKPTTTPAPRPPTPAPTIASQPLSLRPEAARPAAGGAVHTRGLDFACDSNLFVASWIAVMIIFRIGMAVAIFCCFFFPSWRRKRKEKQSETSPKEFLTIYEDVKDLKTRRNHEQEQTFPGGGSTIYSMIQSQSSAPTSQEPAYTLYSLIQPSRKSGSRKRNHSPSFNSTIYEVIGKSQPKAQNPARLSRKELENFDVYS

SEQ ID NO: 1633 - protein, 48 aa, synthetic construct
AKPTTTPAPRPPTPAPTIASQPLSLRPEAARPAAGGAVHTRGLDFACD

SEQ ID NO: 1634 - protein, 199 aa, synthetic construct; identical to SEQ ID NO: 1632

SEQ ID NO: 1635 - protein, 48 aa, synthetic construct; identical to SEQ ID NO: 1633

SEQ ID NO: 1636 - protein, 89 aa, synthetic construct
GMRTEDLPKAVVFLEPQWYRVLEKDSVTLKCQGAYSPEDNSTQWFHNESLISSQASSYFIDAATVDDSGEYRCQTNLSTLSDPVQLEVH

SEQ ID NO: 1637 - protein, 84 aa, synthetic construct
IGWLLLQAPRWVFKEEDPIHLRCHSWKNTALHKVTYLQNGKGRKYFHHNSDFYIPKATLKDSGSYFCRGLVGSKNVSSETVNIT

SEQ ID NO: 1638 - protein, 14 aa, synthetic construct
IGWLLLQAPRWVFK

SEQ ID NO: 1639 - protein, 70 aa, synthetic construct
EEDPIHLRCHSWKNTALHKVTYLQNGKGRKYFHHNSDFYIPKATLKDSGSYFCRGLVGSKNVSSETVNIT

SEQ ID NO: 1640 - protein, 17 aa, synthetic construct
ITQGLAVSTISSFFPPG

SEQ ID NO: 1641 - protein, 23 aa, synthetic construct
YQVSFCLVMVLLFAVDTGLYFSV

SEQ ID NO: 1642 - protein, 25 aa, synthetic construct
KTNIRSSTRDWKDHKFKWRKDPQDK

SEQ ID NO: 1643 - protein, 238 aa, synthetic construct; identical to SEQ ID NO: 1609

SEQ ID NO: 1644 - protein, 149 aa, synthetic construct
IGWLLLQAPRWVFKEEDPIHLRCHSWKNTALHKVTYLQNGKGRKYFHHNSDFYIPKATLKDSGSYFCRGLVGSKNVSSETVNITITQGLAVSTISSFFPPGYQVSFCLVMVLLFAVDTGLYFSVKTNIRSSTRDWKDHKFKWRKDPQDK

SEQ ID NO: 1645 - protein, 65 aa, synthetic construct
ITQGLAVSTISSFFPPGYQVSFCLVMVLLFAVDTGLYFSVKTNIRSSTRDWKDHKFKWRKDPQDK

SEQ ID NO: 1646 - protein, 89 aa, synthetic construct; identical to SEQ ID NO: 1636

SEQ ID NO: 1647 - protein, 84 aa, synthetic construct; identical to SEQ ID NO: 1637

SEQ ID NO: 1648 - protein, 14 aa, synthetic construct
IGWLLLQAPRWVFK

SEQ ID NO: 1649 - protein, 70 aa, synthetic construct; identical to SEQ ID NO: 1639

SEQ ID NO: 1650 - protein, 17 aa, synthetic construct
ITQGLAVPTISSFFPPG

SEQ ID NO: 1651 - protein, 23 aa, synthetic construct
YQVSFCLVMVLLFAVDTGLYFSV

SEQ ID NO: 1652 - protein, 25 aa, synthetic construct
KTNIRSSTRDWKDHKFKWRKDPQDK

SEQ ID NO: 1653 - protein, 238 aa, synthetic construct; identical to SEQ ID NO: 1446

SEQ ID NO: 1654 - protein, 149 aa, synthetic construct
IGWLLLQAPRWVFKEEDPIHLRCHSWKNTALHKVTYLQNGKGRKYFHHNSDFYIPKATLKDSGSYFCRGLVGSKNVSSETVNITITQGLAVPTISSFFPPGYQVSFCLVMVLLFAVDTGLYFSVKTNIRSSTRDWKDHKFKWRKDPQDK

SEQ ID NO: 1655 - protein, 65 aa, synthetic construct
ITQGLAVPTISSFFPPGYQVSFCLVMVLLFAVDTGLYFSVKTNIRSSTRDWKDHKFKWRKDPQDK

SEQ ID NO: 1656 - protein, 89 aa, synthetic construct; identical to SEQ ID NO: 1636

SEQ ID NO: 1657 - protein, 84 aa, synthetic construct; identical to SEQ ID NO: 1637

SEQ ID NO: 1658 - protein, 14 aa, synthetic construct
IGWLLLQAPRWVFK

SEQ ID NO: 1659 - protein, 70 aa, synthetic construct; identical to SEQ ID NO: 1639

SEQ ID NO: 1660 - protein, 17 aa, synthetic construct
ITQGLAVSTISSFFPPG

SEQ ID NO: 1661 - protein, 23 aa, synthetic construct
YQVSFCLVMVLLFAVDTGLYFSV

SEQ ID NO: 1662 - protein, 25 aa, synthetic construct
KTNIRSSTRDWKDHKFKWRKDPQDK

SEQ ID NO: 1663 - protein, 238 aa, synthetic construct; identical to SEQ ID NO: 1609

SEQ ID NO: 1664 - protein, 149 aa, synthetic construct; identical to SEQ ID NO: 1644

SEQ ID NO: 1665 - protein, 65 aa, synthetic construct; identical to SEQ ID NO: 1645

SEQ ID NO: 1666 - protein, 97 aa, synthetic construct
VAEGKTDNQYTLFVAGGTVLLLLFVISITTIIVIFLNRRRRRERRDLFTESWDTQKAPNNYRSPISTGQPTNQSMDDTREDIYVNYPTFSRRPKTRV

SEQ ID NO: 1667 - protein, 15 aa, synthetic construct
VAEGKTDNQYTLFVA

SEQ ID NO: 1668 - protein, 21 aa, synthetic construct
GGTVLLLLFVISITTIIVIFL

SEQ ID NO: 1669 - protein, 61 aa, synthetic construct
NRRRRRERRDLFTESWDTQKAPNNYRSPISTGQPTNQSMDDTREDIYVNYPTFSRRPKTRV

SEQ ID NO: 1670 - protein, 97 aa, synthetic construct; identical to SEQ ID NO: 1666

SEQ ID NO: 1671 - protein, 15 aa, synthetic construct
VAEGKTDNQYTLFVA

SEQ ID NO: 1672 - protein, 21 aa, synthetic construct
GGTVLLLLFVISITTIIVIFL

SEQ ID NO: 1673 - protein, 61 aa, synthetic construct; identical to SEQ ID NO: 1669

SEQ ID NO: 1674 - protein, 336 aa, synthetic construct
MDYPTLLLALLHVYRALCEEVLWHTSVPFAENMSLECVYPSMGILTQVEWFKIGTQQDSIAIFSPTHGMVIRKPYAERVYFLNSTMASNNMTLFFRNASEDDVGYYSCSLYTYPQGTWQKVIQVVQSDSFEAAVPSNSHIVSEPGKNVTLTCQPQMTWPVQAVRWEKIQPRQIDLLTYCNLVHGRNFTSKFPRQIVSNCSHGRWSVIVIPDVTVSDSGLYRCYLQASAGENETFVMRLTVAEGKTDNQYTLFVAGGTVLLLLFVISITTIIVIFLNRRRRRERRDLFTESWDTQKAPNNYRSPISTGQPTNQSMDDTREDIYVNYPTFSRRPKTRV

SEQ ID NO: 1675 - protein, 318 aa, synthetic construct
EEVLWHTSVPFAENMSLECVYPSMGILTQVEWFKIGTQQDSIAIFSPTHGMVIRKPYAERVYFLNSTMASNNMTLFFRNASEDDVGYYSCSLYTYPQGTWQKVIQVVQSDSFEAAVPSNSHIVSEPGKNVTLTCQPQMTWPVQAVRWEKIQPRQIDLLTYCNLVHGRNFTSKFPRQIVSNCSHGRWSVIVIPDVTVSDSGLYRCYLQASAGENETFVMRLTVAEGKTDNQYTLFVAGGTVLLLLFVISITTIIVIFLNRRRRRERRDLFTESWDTQKAPNNYRSPISTGQPTNQSMDDTREDIYVNYPTFSRRPKTRV

SEQ ID NO: 1676 - protein, 336 aa, synthetic construct; identical to SEQ ID NO: 1674

SEQ ID NO: 1677 - protein, 318 aa, synthetic construct; identical to SEQ ID NO: 1675

SEQ ID NO: 1678 - protein, 318 aa, synthetic construct
AALGKDTIPWLGHLLVGLSGAFGFIILVYLLINCRNTGPWLKKVLKCNTPDPSKFFSQLSSEHGGDVQKWLSSPFPSSSFSPGGLAPEISPLEVLERDKVTQLLLQQDKVPEPASLSSNHSLTSCFTNQGYFFFHLPDALEIEACQVYFTYDPYSEEDPDEGVAGAPTGSSPQPLQPLSGEDDAYCTFPSRDDLLLFSPSLLGGPSPPSTAPGGSGAGEERMPPSLQERVPRDWDPQPLGPPTPGVPDLVDFQPPPELVLREAGEEVPDAGPREGVSFPWSRPPGQGEFRALNARLPLNTDAYLSLQELQGQDPTHLV

SEQ ID NO: 1679 - protein, 116 aa, synthetic construct
NPFLFALEAVVISVGSMGLIISLLCVYFWLERTMPRIPTLKNLEDLVTEYHGNFSAWSGVSKGLAESLQPDYSERLCLVSEIPPKGGALGEGPGASPCNQHSPYWAPPCYTLKPET

SEQ ID NO: 1680 - protein, 108 aa, synthetic construct; identical to SEQ ID NO: 1565

SEQ ID NO: 1681 - protein, 108 aa, synthetic construct; identical to SEQ ID NO: 1565

SEQ ID NO: 1682 - protein, 99 aa, synthetic construct; identical to SEQ ID NO: 1578

SEQ ID NO: 1683 - protein, 63 aa, synthetic construct; identical to SEQ ID NO: 1581

SEQ ID NO: 1684 - protein, 97 aa, synthetic construct; identical to SEQ ID NO: 1593

SEQ ID NO: 1685 - protein, 83 aa, synthetic construct; identical to SEQ ID NO: 1595

SEQ ID NO: 1686 - protein, 190 aa, synthetic construct
QQQTLPKPFIWAEPHFMVPKEKQVTICCQGNYGAVEYQLHFEGSLFAVDRPKPPERINKVQFYIPDMNSRMAGQYSCIYRVGELWSEPSNLLDLVVTEMYDTPTLSVHPGPEVISGEKVTFYCRLDTATSMFLLLKEGRSSHVQRGYGKVQAEFPLGPVTTAHRGTYRCFGSYNNHAWSFPSEPVKLLVT

SEQ ID NO: 1687 - protein, 97 aa, synthetic construct; identical to SEQ ID NO: 1593

SEQ ID NO: 1688 - protein, 83 aa, synthetic construct; identical to SEQ ID NO: 1595

SEQ ID NO: 1689 - protein, 190 aa, synthetic construct; identical to SEQ ID NO: 1686

SEQ ID NO: 1690 - protein, 89 aa, synthetic construct; identical to SEQ ID NO: 1636

SEQ ID NO: 1691 - protein, 84 aa, synthetic construct; identical to SEQ ID NO: 1637

SEQ ID NO: 1692 - protein, 70 aa, synthetic construct; identical to SEQ ID NO: 1639

SEQ ID NO: 1693 - protein, 173 aa, synthetic construct
GMRTEDLPKAVVFLEPQWYRVLEKDSVTLKCQGAYSPEDNSTQWFHNESLISSQASSYFIDAATVDDSGEYRCQTNLSTLSDPVQLEVHIGWLLLQAPRWVFKEEDPIHLRCHSWKNTALHKVTYLQNGKGRKYFHHNSDFYIPKATLKDSGSYFCRGLVGSKNVSSETVNIT

SEQ ID NO: 1694 - protein, 89 aa, synthetic construct; identical to SEQ ID NO: 1636

SEQ ID NO: 1695 - protein, 84 aa, synthetic construct; identical to SEQ ID NO: 1637

SEQ ID NO: 1696 - protein, 14 aa, synthetic construct
IGWLLLQAPRWVFK

SEQ ID NO: 1697 - protein, 70 aa, synthetic construct; identical to SEQ ID NO: 1639

SEQ ID NO: 1698 - protein, 173 aa, synthetic construct; identical to SEQ ID NO: 1693

SEQ ID NO: 1699 - protein, 89 aa, synthetic construct; identical to SEQ ID NO: 1636

SEQ ID NO: 1700 - protein, 84 aa, synthetic construct; identical to SEQ ID NO: 1637

SEQ ID NO: 1701 - protein, 14 aa, synthetic construct
IGWLLLQAPRWVFK

SEQ ID NO: 1702 - protein, 70 aa, synthetic construct; identical to SEQ ID NO: 1639

SEQ ID NO: 1703 - protein, 173 aa, synthetic construct; identical to SEQ ID NO: 1693

SEQ ID NO: 1704 - protein, 5 aa, synthetic construct
LGEPQ

SEQ ID NO: 1705 - protein, 5 aa, synthetic construct
LGEPQ

SEQ ID NO: 1706 - protein, 30 aa, synthetic construct; identical to SEQ ID NO: 1393

SEQ ID NO: 1707 - protein, 30 aa, synthetic construct; identical to SEQ ID NO: 1393

SEQ ID NO: 1708 - protein, 30 aa, synthetic construct; identical to SEQ ID NO: 1547

SEQ ID NO: 1709 - protein, 30 aa, synthetic construct; identical to SEQ ID NO: 1547

SEQ ID NO: 1710 - protein, 26 aa, synthetic construct
LGEPQLCYILDAILFLYGIVLTLLYC

SEQ ID NO: 1711 - protein, 26 aa, synthetic construct
LGEPQLCYILDAILFLYGIVLTLLYC

SEQ ID NO: 1712 - protein, 26 aa, synthetic construct
LGEPQLSYILDAILFLYGIVLTLLYC

SEQ ID NO: 1713 - protein, 26 aa, synthetic construct
LGEPQLSYILDAILFLYGIVLTLLYC

SEQ ID NO: 1714 - protein, 21 aa, synthetic construct
AGTVLLLRAGFYAVSFLSVAV

SEQ ID NO: 1715 - protein, 21 aa, synthetic construct
AGTVLLLRAGFYAVSFLSVAV

SEQ ID NO: 1716 - protein, 21 aa, synthetic construct
LVPVFCGLLVAKSLVLSALLV

SEQ ID NO: 1717 - protein, 21 aa, synthetic construct
LVPVFCGLLVAKSLVLSALLV

SEQ ID NO: 1718 - protein, 21 aa, synthetic construct
MGLAFLVLVALVWFLVEDWLS

SEQ ID NO: 1719 - protein, 21 aa, synthetic construct
MGLAFLVLVALVWFLVEDWLS

SEQ ID NO: 1720 - protein, 31 aa, synthetic construct; identical to SEQ ID NO: 1626

SEQ ID NO: 1721 - protein, 31 aa, synthetic construct; identical to SEQ ID NO: 1626

SEQ ID NO: 1722 - protein, 23 aa, synthetic construct
YQVSFCLVMVLLFAVDTGLYFSV

SEQ ID NO: 1723 - protein, 23 aa, synthetic construct
YQVSFCLVMVLLFAVDTGLYFSV

SEQ ID NO: 1724 - protein, 23 aa, synthetic construct
YQVSFCLVMVLLFAVDTGLYFSV

SEQ ID NO: 1725 - protein, 21 aa, synthetic construct
GGTVLLLLFVISITTIIVIFL

SEQ ID NO: 1726 - protein, 21 aa, synthetic construct
LSYILDAILFLYGIVLTLLYC

SEQ ID NO: 1727 - protein, 21 aa, synthetic construct
LCYILDAILFLYGIVLTLLYC

SEQ ID NO: 1728 - protein, 20 aa, synthetic construct
CYLLDGILFIYGVILTALFL

SEQ ID NO: 1729 - protein, 9 aa, synthetic construct
VEKEHPQLG

SEQ ID NO: 1730 - protein, 9 aa, synthetic construct
VEKEHPQLG

SEQ ID NO: 1731 - protein, 72 aa, synthetic construct; identical to SEQ ID NO: 1579

SEQ ID NO: 1732 - protein, 72 aa, synthetic construct; identical to SEQ ID NO: 1579

SEQ ID NO: 1733 - protein, 47 aa, synthetic construct; identical to SEQ ID NO: 1596

SEQ ID NO: 1734 - protein, 47 aa, synthetic construct; identical to SEQ ID NO: 1596

SEQ ID NO: 1735 - protein, 48 aa, synthetic construct; identical to SEQ ID NO: 1625

SEQ ID NO: 1736 - protein, 48 aa, synthetic construct; identical to SEQ ID NO: 1625

SEQ ID NO: 1737 - protein, 48 aa, synthetic construct; identical to SEQ ID NO: 1633

SEQ ID NO: 1738 - protein, 48 aa, synthetic construct; identical to SEQ ID NO: 1633

SEQ ID NO: 1739 - protein, 17 aa, synthetic construct
ITQGLAVSTISSFFPPG

SEQ ID NO: 1740 - protein, 17 aa, synthetic construct
ITQGLAVPTISSFFPPG

SEQ ID NO: 1741 - protein, 17 aa, synthetic construct
ITQGLAVSTISSFFPPG

SEQ ID NO: 1742 - protein, 15 aa, synthetic construct
VAEGKTDNQYTLFVA

SEQ ID NO: 1743 - protein, 10 aa, synthetic construct
QSFGLLDPKL

SEQ ID NO: 1744 - protein, 44 aa, synthetic construct; identical to SEQ ID NO: 1568

SEQ ID NO: 1745 - protein, 45 aa, synthetic construct; identical to SEQ ID NO: 1574

SEQ ID NO: 1746 - protein, 63 aa, synthetic construct; identical to SEQ ID NO: 1581

SEQ ID NO: 1747 - protein, 63 aa, synthetic construct; identical to SEQ ID NO: 1581

SEQ ID NO: 1748 - protein, 25 aa, synthetic construct
RKRTRERASRASTWEGRRRLNTQTL

SEQ ID NO: 1749 - protein, 25 aa, synthetic construct
RKRTRERASRASTWEGRRRLNTQTL

SEQ ID NO: 1750 - protein, 25 aa, synthetic construct
KTNIRSSTRDWKDHKFKWRKDPQDK

SEQ ID NO: 1751 - protein, 25 aa, synthetic construct
KTNIRSSTRDWKDHKFKWRKDPQDK

SEQ ID NO: 1752 - protein, 25 aa, synthetic construct
KTNIRSSTRDWKDHKFKWRKDPQDK

SEQ ID NO: 1753 - protein, 61 aa, synthetic construct; identical to SEQ ID NO: 1669

SEQ ID NO: 1754 - protein, 42 aa, synthetic construct
RLKIQVRKAAITSYEKSDGVYTGLSTRNQETYETLKHEKPPQ

SEQ ID NO: 1755 - protein, 42 aa, synthetic construct; identical to SEQ ID NO: 1754

SEQ ID NO: 1756 - protein, 113 aa, synthetic construct; identical to SEQ ID NO: 1400

SEQ ID NO: 1757 - protein, 113 aa, synthetic construct; identical to SEQ ID NO: 1400

SEQ ID NO: 1758 - protein, 113 aa, synthetic construct; identical to SEQ ID NO: 1400

SEQ ID NO: 1759 - protein, 36 aa, synthetic construct; identical to SEQ ID NO: 1549

SEQ ID NO: 1760 - protein, 36 aa, synthetic construct; identical to SEQ ID NO: 1549

SEQ ID NO: 1761 - protein, 120 aa, synthetic construct; identical to SEQ ID NO: 1621

SEQ ID NO: 1762 - protein, 120 aa, synthetic construct; identical to SEQ ID NO: 1621

SEQ ID NO: 1763 - protein, 41 aa, synthetic construct; identical to SEQ ID NO: 1396

SEQ ID NO: 1764 - protein, 42 aa, synthetic construct; identical to SEQ ID NO: 1397

SEQ ID NO: 1765 - protein, 41 aa, synthetic construct; identical to SEQ ID NO: 1396

SEQ ID NO: 1766 - protein, 42 aa, synthetic construct; identical to SEQ ID NO: 1397

SEQ ID NO: 1767 - protein, 232 aa, synthetic construct
LQDPCSNCPAGTFCDNNRNQICSPCPPNSFSSAGGQRTCDICRQCKGVFRTRKECSSTSNAECDCTPGFHCLGAGCSMCEQDCKQGQELTKKGCKDCCFGTFNDQKRGICRPWTNCSLDGKSVLVNGTKERDVVCGPSPADLSPGASSVTPPAPAREPGHSPQIISFFLALTSTALLFLLFFLTLRFSVVKRGRKKLLYIFKQPFMRPVQTTQEEDGCSCRFPEEEEGGCEL

SEQ ID NO: 1768 - protein, 232 aa, synthetic construct; identical to SEQ ID NO: 1767

SEQ ID NO: 1769 - protein, 202 aa, synthetic construct
NKILVKQSPMLVAYDNAVNLSCKYSYNLFSREFRASLHKGLDSAVEVCVVYGNYSQQLQVYSKTGFNCDGKLGNESVTFYLQNLYVNQTDIYFCKIEVMYPPPYLDNEKSNGTIIHVKGKHLCPSPLFPGPSKPFWVLVVVGGVLACYSLLVTVAFIIFWVRSKRSRLLHSDYMNMTPRRPGPTRKHYQPYAPPRDFAAYRS

SEQ ID NO: 1770 - protein, 202 aa, synthetic construct; identical to SEQ ID NO: 1769

SEQ ID NO: 1771 - protein, 249 aa, synthetic construct
LHCVGDTYPSNDRCCHECRPGNGMVSRCSRSQNTVCRPCGPGFYNDVVSSKPCKPCTWCNLRSGSERKQLCTATQDTVCRCRAGTQPLDSYKPGVDCAPCPPGHFSPGDNQACKPWTNCTLAGKHTLQPASNSSDAICEDRDPPATQPQETQGPPARPITVQPTEAWPRTSQGPSTRPVEVPGGRAVAAILGLGLVLGLLGPLAILLALYLLRRDQRLPPDAHKPPGGGSFRTPIQEEQADAHSTLAKI

SEQ ID NO: 1772 - protein, 249 aa, synthetic construct; identical to SEQ ID NO: 1771

SEQ ID NO: 1773 - protein, 346 aa, synthetic construct
KGCQGSADHVVSISGVPLQLQPNSIQTKVDSIAWKKLLPSQNGFHHILKWENGSLPSNTSNDRFSFIVKNLSLLIKAAQQQDSGLYCLEVTSISGKVQTATFQVFVFDKVEKPRLQGQGKILDRGRCQVALSCLVSRDGNVSYAWYRGSKLIQTAGNLTYLDEEVDINGTHTYTCNVSNPVSWESHTLNLTQDCQNAHQEFRFWPFLVIIVILSALFLGTLACFCVWRRKRKEKQSETSPKEFLTIYEDVKDLKTRRNHEQEQTFPGGGSTIYSMIQSQSSAPTSQEPAYTLYSLIQPSRKSGSRKRNHSPSFNSTIYEVIGKSQPKAQNPARLSRKELENFDVYS

SEQ ID NO: 1774 - protein, 346 aa, synthetic construct; identical to SEQ ID NO: 1773

SEQ ID NO: 1775 - protein, 268 aa, synthetic construct
TPAAPPKAVLKLEPQWINVLQEDSVTLTCRGTHSPESDSIQWFHNGNLIPTHTQPSYRFKANNNDSGEYTCQTGQTSLSDPVHLTVLSEWLVLQTPHLEFQEGETIVLRCHSWKDKPLVKVTFFQNGKSKKFSRSDPNFSIPQANHSHSGDYHCTGNIGYTLYSSKPVTITVQAPSSSPMGIIVAVVTGIAVAAIVAAVVALIYCRKKRISALPGYPECREMGETLPEKPANPTNPDEADKVGAENTITYSLLMHPDALEEPDDQNRI

SEQ ID NO: 1776 - protein, 268 aa, synthetic construct; identical to SEQ ID NO: 1775

SEQ ID NO: 1777 - protein, 360 aa, synthetic construct
QVVDTTKAVITLQPPWVSVFQEETVTLHCEVLHLPGSSSTQWFLNGTATQTSTPSYRITSASVNDSGEYRCQRGLSGRSDPIQLEIHRGWLLLQVSSRVFTEGEPLALRCHAWKDKLVYNVLYYRNGKAFKFFHWNSNLTILKTNISHNGTYHCSGMGKHRYTSAGISVTVKELFPAPVLNASVTSPLLEGNLVTLSCETKLLLQRPGLQLYFSFYMGSKTLRGRNTSSEYQILTARREDSGLYWCEAATEDGNVLKRSPELELQVLGLQLPTPVWFHVLFYLAVGIMFLVNTVLWVTIRKELKRKKKWDLEISLDSGHEKKVISSLQEDRHLEEELKCQEQKEEQLQEGVHRKEPQGAT

SEQ ID NO: 1778 - protein, 360 aa, synthetic construct; identical to SEQ ID NO: 1777

SEQ ID NO: 1779 - protein, 147 aa, synthetic construct
NIYDAFVIYSSQDEDWVRNELVKNLEEGVPPFQLCLHYRDFIPGVAIAANIIHEGFHKSRKVIVVVSQHFIQSRWCIFEYEIAQTWQFLSSRAGIIFIVLQKVEKTLLRQQVELYRLLSRNTYLEWEDSVLGRHIFWRRLRKALLDG

SEQ ID NO: 1780 - protein, 7 aa, synthetic construct
PPCPPCP

SEQ ID NO: 1781 - protein, 225 aa, synthetic construct
MYRMQLLSCIALSLALVTNSAPTSSSTKKTQLQLEHLLLDLQMILNGINNYKNPKLTAMLTKKFYMPKKATELKHLQCLEEELKPLEEVLNLAQSKNFHLRPRDLISNINVIVLELKGSETTFMCEYADETATIVEFLNRWITFCASIISTLTKIEVMYPPPYLDNEKSNGTIIHVKGKHLCPSPLFPGPSKPFWVLVVVGGVLACYSLLVTVAFIIFWVRSKRS

SEQ ID NO: 1782 - protein, 225 aa, synthetic construct
MYRMQLLSCIALSLALVTNSAPTSSSTKKTQLQLEHLLLDLQMILNGINNYKNPKLTEMLTAKFYMPKKATELKHLQCLEEELKPLEEVLNLAQSKNFHLRPRDLISNINVIVLELKGSETTFMCEYADETATIVEFLNRWITFCQSIISTLTKIEVMYPPPYLDNEKSNGTIIHVKGKHLCPSPLFPGPSKPFWVLVVVGGVLACYSLLVTVAFIIFWVRSKRS

SEQ ID NO: 1783 - protein, 225 aa, synthetic construct
MYRMQLLSCIALSLALVTNSAPTSSSTKKTQLQLEHLLLDLQMILNGINNYKNPKLTEMLTAKFYMPKKATELKHLQCLEEELKPLEEVLNLAQSKNFHLRPRDLISNINVAVLELKGSETTFMCEYADETATIVEFLNRWITFCQSIISTLTKIEVMYPPPYLDNEKSNGTIIHVKGKHLCPSPLFPGPSKPFWVLVVVGGVLACYSLLVTVAFIIFWVRSKRS

SEQ ID NO: 1784 - protein, 225 aa, synthetic construct
MYRMQLLSCIALSLALVTNSAPASSSTKKTQLQLEHLLLDLQMILNGINNYKNPKLTRMLTAKFAMPKKATELKHLQCLEEELKPLEEVLNGAQSKNFHLRPRDLISNINVIVLELKGSETTFMCEYADETATIVEFLNRWITFGQSIISTLTKIEVMYPPPYLDNEKSNGTIIHVKGKHLCPSPLFPGPSKPFWVLVVVGGVLACYSLLVTVAFIIFWVRSKRS

SEQ ID NO: 1785 - protein, 206 aa, synthetic construct
MYRMQLLSCIALSLALVTNSNWVNVISDLKKIEDLIQSMHIDATLYTESDVHPSCKVTAMKCFLLELQVISLESGDASIHDTVKNLIILANNSLSSNGNVTESGCKECEELEEKNIKEFLQSFVHIVQMFINTSKIEVMYPPPYLDNEKSNGTIIHVKGKHLCPSPLFPGPSKPFWVLVVVGGVLACYSLLVTVAFIIFWVRSKRS

SEQ ID NO: 1786 - protein, 206 aa, synthetic construct
MYRMQLLSCIALSLALVTNSNWVNVISSLKKIEDLIQSMHIDATLYTESDVHPSCKVTAMKCFLLELQVISLESGDASIHDTVENLIILANNSLSSNGNVTESGCKECEELEEKNIKEFLQSFVHIVQMFINTSKIEVMYPPPYLDNEKSNGTIIHVKGKHLCPSPLFPGPSKPFWVLVVVGGVLACYSLLVTVAFIIFWVRSKRS

SEQ ID NO: 1787 - protein, 206 aa, synthetic construct
MYRMQLLSCIALSLALVTNSNWVNVISDLKKIEDLIQSMHIDATLYTESDVHPSCKVTAMKCFLLELQVISLESGDASIHDTVENLIIRANNSLSSNGNVTESGCKECEELEEKNIKEFLQSFVHIVQMFINTSKIEVMYPPPYLDNEKSNGTIIHVKGKHLCPSPLFPGPSKPFWVLVVVGGVLACYSLLVTVAFIIFWVRSKRS

SEQ ID NO: 1788 - protein, 153 aa, synthetic construct
MYRMQLLSCIALSLALVTNSAPTSSSTKKTQLQLEHLLLDLQMILNGINNYKNPKLTRMLTFKFYMPKKATELKHLQCLEEELKPLEEVLNLAQSKNFHLRPRDLISNINVIVLELKGSETTFMCEYADETATIVEFLNRWITFCQSIISTLT

SEQ ID NO: 1789 - protein, 153 aa, synthetic construct
MYRMQLLSCIALSLALVTNSAPTSSSTKKTQLQLEHLLLDLQMILNGINNYKNPKLTAMLTKKFYMPKKATELKHLQCLEEELKPLEEVLNLAQSKNFHLRPRDLISNINVIVLELKGSETTFMCEYADETATIVEFLNRWITFCASIISTLT

SEQ ID NO: 1790 - protein, 153 aa, synthetic construct
MYRMQLLSCIALSLALVTNSAPTSSSTKKTQLQLEHLLLDLQMILNGINNYKNPKLTEMLTAKFYMPKKATELKHLQCLEEELKPLEEVLNLAQSKNFHLRPRDLISNINVIVLELKGSETTFMCEYADETATIVEFLNRWITFCQSIISTLT

SEQ ID NO: 1791 - protein, 153 aa, synthetic construct
MYRMQLLSCIALSLALVTNSAPTSSSTKKTQLQLEHLLLDLQMILNGINNYKNPKLTEMLTAKFYMPKKATELKHLQCLEEELKPLEEVLNLAQSKNFHLRPRDLISNINVAVLELKGSETTFMCEYADETATIVEFLNRWITFCQSIISTLT

SEQ ID NO: 1792 - protein, 153 aa, synthetic construct
MYRMQLLSCIALSLALVTNSAPASSSTKKTQLQLEHLLLDLQMILNGINNYKNPKLTRMLTAKFAMPKKATELKHLQCLEEELKPLEEVLNGAQSKNFHLRPRDLISNINVIVLELKGSETTFMCEYADETATIVEFLNRWITFGQSIISTLT

SEQ ID NO: 1793 - protein, 162 aa, synthetic construct
MRISKPHLRSISIQCYLCLLLNSHFLTEAGIHVFILGCFSAGLPKTEANWVNVISDLKKIEDLIQSMHIDATLYTESDVHPSCKVTAMKCFLLELQVISLESGDASIHDTVENLIILANNSLSSNGNVTESGCKECEELEEKNIKEFLQSFVHIVQMFINTS

SEQ ID NO: 1794 - protein, 134 aa, synthetic construct
MYRMQLLSCIALSLALVTNSNWVNVISDLKKIEDLIQSMHIDATLYTESDVHPSCKVTAMKCFLLELQVISLESGDASIHDTVKNLIILANNSLSSNGNVTESGCKECEELEEKNIKEFLQSFVHIVQMFINTS

SEQ ID NO: 1795 - protein, 134 aa, synthetic construct
MYRMQLLSCIALSLALVTNSNWVNVISSLKKIEDLIQSMHIDATLYTESDVHPSCKVTAMKCFLLELQVISLESGDASIHDTVENLIILANNSLSSNGNVTESGCKECEELEEKNIKEFLQSFVHIVQMFINTS

SEQ ID NO: 1796 - protein, 134 aa, synthetic construct
MYRMQLLSCIALSLALVTNSNWVNVISDLKKIEDLIQSMHIDATLYTESDVHPSCKVTAMKCFLLELQVISLESGDASIHDTVENLIIRANNSLSSNGNVTESGCKECEELEEKNIKEFLQSFVHIVQMFINTS

SEQ ID NO: 1797 - protein, 178 aa, synthetic construct
MALPVTALLLPLALLLHAARPYFGKLESKLSVIRNLNDQVLFIDQGNRPLFEDMTDSDCRDNAPRTIFIISMYKDSQPRGMAVTISVKCEKISTLSCENKIISFKEMNPPDNIKDTKSDIIFFQRSVPGHDNKMQFESSSYEGYFLACEKERDLFKLILKKEDELGDRSIMFTVQNED

SEQ ID NO: 1798 - protein, 233 aa, synthetic construct
MYRMQLLSCIALSLALVTNSAPTSSSTKKTQLQLEHLLLDLQMILNGINNYKNPKLTRMLTFKFYMPKKATELKHLQCLEEELKPLEEVLNLAQSKNFHLRPRDLISNINVIVLELKGSETTFMCEYADETATIVEFLNRWITFCQSIISTLTHMLQMAGQCSQNEYFDSLLHACIPCQLRCSSNTPPLTCQRYCNASVTNSVKGTNAILWTCLGLSLIISLAVFVLMFLLRK

SEQ ID NO: 1799 - protein, 233 aa, synthetic construct
MYRMQLLSCIALSLALVTNSAPTSSSTKKTQLQLEHLLLDLQMILNGINNYKNPKLTAMLTKKFYMPKKATELKHLQCLEEELKPLEEVLNLAQSKNFHLRPRDLISNINVIVLELKGSETTFMCEYADETATIVEFLNRWITFCASIISTLTHMLQMAGQCSQNEYFDSLLHACIPCQLRCSSNTPPLTCQRYCNASVTNSVKGTNAILWTCLGLSLIISLAVFVLMFLLRK

SEQ ID NO: 1800 - protein, 233 aa, synthetic construct
MYRMQLLSCIALSLALVTNSAPTSSSTKKTQLQLEHLLLDLQMILNGINNYKNPKLTEMLTAKFYMPKKATELKHLQCLEEELKPLEEVLNLAQSKNFHLRPRDLISNINVIVLELKGSETTFMCEYADETATIVEFLNRWITFCQSIISTLTHMLQMAGQCSQNEYFDSLLHACIPCQLRCSSNTPPLTCQRYCNASVTNSVKGTNAILWTCLGLSLIISLAVFVLMFLLRK

SEQ ID NO: 1801 - protein, 233 aa, synthetic construct
MYRMQLLSCIALSLALVTNSAPTSSSTKKTQLQLEHLLLDLQMILNGINNYKNPKLTEMLTAKFYMPKKATELKHLQCLEEELKPLEEVLNLAQSKNFHLRPRDLISNINVAVLELKGSETTFMCEYADETATIVEFLNRWITFCQSIISTLTHMLQMAGQCSQNEYFDSLLHACIPCQLRCSSNTPPLTCQRYCNASVTNSVKGTNAILWTCLGLSLIISLAVFVLMFLLRK

SEQ ID NO: 1802 - protein, 233 aa, synthetic construct
MYRMQLLSCIALSLALVTNSAPASSSTKKTQLQLEHLLLDLQMILNGINNYKNPKLTRMLTAKFAMPKKATELKHLQCLEEELKPLEEVLNGAQSKNFHLRPRDLISNINVIVLELKGSETTFMCEYADETATIVEFLNRWITFGQSIISTLTHMLQMAGQCSQNEYFDSLLHACIPCQLRCSSNTPPLTCQRYCNASVTNSVKGTNAILWTCLGLSLIISLAVFVLMFLLRK

SEQ ID NO: 1803 - protein, 242 aa, synthetic construct
MRISKPHLRSISIQCYLCLLLNSHFLTEAGIHVFILGCFSAGLPKTEANWVNVISDLKKIEDLIQSMHIDATLYTESDVHPSCKVTAMKCFLLELQVISLESGDASIHDTVENLIILANNSLSSNGNVTESGCKECEELEEKNIKEFLQSFVHIVQMFINTSHMLQMAGQCSQNEYFDSLLHACIPCQLRCSSNTPPLTCQRYCNASVTNSVKGTNAILWTCLGLSLIISLAVFVLMFLLRK

SEQ ID NO: 1804 - protein, 242 aa, synthetic construct
MRISKPHLRSISIQCYLCLLLNSHFLTEAGIHVFILGCFSAGLPKTEANWVNVISDLKKIEDLIQSMHIDATLYTESDVHPSCKVTAMKCFLLELQVISLESGDASIHDTVKNLIILANNSLSSNGNVTESGCKECEELEEKNIKEFLQSFVHIVQMFINTSHMLQMAGQCSQNEYFDSLLHACIPCQLRCSSNTPPLTCQRYCNASVTNSVKGTNAILWTCLGLSLIISLAVFVLMFLLRK

SEQ ID NO: 1805 - protein, 547 aa, synthetic construct
MYRMQLLSCIALSLALVTNSAPTSSSTKKTQLQLEHLLLDLQMILNGINNYKNPKLTRMLTFKFYMPKKATELKHLQCLEEELKPLEEVLNLAQSKNFHLRPRDLISNINVIVLELKGSETTFMCEYADETATIVEFLNRWITFCQSIISTLTHMFPQDRPFEDTCHGNPSHYYDKAVRRCCYRCPMGLFPTQQCPQRPTDCRKQCEPDYYLDEADRCTACVTCSRDDLVEKTPCAWNSSRVCECRPGMFCSTSAVNSCARCFFHSVCPAGMIVKFPGTAQKNTVCEPASPGVSPACASPENCKEPSSGTIPQAKPTPVSPATSSASTMPVRGGTRLAQEAASKLTRAPDSPSSVGRPSSDPGLSPTQPCPEGSGDCRKQCEPDYYLDEAGRCTACVSCSRDDLVEKTPCAWNSSRTCECRPGMICATSATNSCARCVPYPICAAETVTKPQDMAEKDTTFEAPPLGTQPDCNPTPENGEAPASTSPTQSLLVDSQASKTLPIPTSAPVALSSTGKPVLDAGPVLFWVILVLVVVVGSSAFLLCHRR

SEQ ID NO: 1806 - protein, 9 aa, synthetic construct
GGGGGGGGG

SEQ ID NO: 1807 - protein, 223 aa, synthetic construct
QSFGLLDPKLCYLLDGILFIYGVILTALFLRVRFSRSADAPAYQQGQNQLYNELNLGRREEYDVLDRRRGRDPEMGGKPQRRRNPQEGLYNELQRDRMAEAYSEIGMRGERRRGKGHDGLYQGLSTATRDTYDALHMQALPPREFGGSGFNVLMVHRRSHTGERPFQCNQCGASFTQRGNLLRHIRLHTGERPFRCHLCNYACQRRDALTASAEARHIRAEMG

SEQ ID NO: 1808 - protein, 222 aa, synthetic construct
QSFGLLDPKLCYLLDGILFIYGVILTALFLRVRFSRSADAPAYQQGQNQLYNELNLGRREEYDVLDRRRGRDPEMGGRPQRRRNPQEGLYNELQRDRMAEAYSEIGMRGERRRGRGHDGLYQGLSTATRDTYDALHMQALPPRGPGGSFNVLMVHRRSHTGERPFQCNQCGASFTQRGNLLRHIRLHTGERPFRCHLCNYACQRRDALTASAEARHIRAEMG

SEQ ID NO: 1809 - protein, 143 aa, synthetic construct
QSFGLLDPKLCYLLDGILFIYGVILTALFLRVRFSRSADAPAYQQGQNQLYNELNLGRREEYDVLDRRRGRDPEMGGKPQRRRNPQEGLYNELQRDRMAEAYSEIGMRGERRRGKGHDGLYQGLSTATRDTYDALHMQALPPR

SEQ ID NO: 1810 - protein, 143 aa, synthetic construct
QSFGLLDPKLCYLLDGILFIYGVILTALFLRVRFSRSADAPAYQQGQNQLYNELNLGRREEYDVLDRRRGRDPEMGGRPQRRRNPQEGLYNELQRDRMAEAYSEIGMRGERRRGRGHDGLYQGLSTATRDTYDALHMQALPPR

SEQ ID NO: 1811 - protein, 78 aa, synthetic construct
GGSGFNVLMVHRRSHTGERPFQCNQCGASFTQRGNLLRHIRLHTGERPFRCHLCNYACQRRDALTASAEARHIRAEMG

SEQ ID NO: 1812 - protein, 77 aa, synthetic construct
GGSFNVLMVHRRSHTGERPFQCNQCGASFTQRGNLLRHIRLHTGERPFRCHLCNYACQRRDALTASAEARHIRAEMG

SEQ ID NO: 1813 - protein, 77 aa, synthetic construct; identical to SEQ ID NO: 1812

SEQ ID NO: 1814 - protein, 109 aa, synthetic construct
GGGVQVETISPGDGRTFPKRGQTCVVHYTGMLEDGKKVDSSRDRNKPFKFMLGKQEVIRGWEEGVAQMSVGQRAKLTISPDYAYGATGHPGIIPPHATLVFDVELLKLG

SEQ ID NO: 1815 - protein, 148 aa, synthetic construct
LGEPQLCYILDAILFLYGIVLTLLYCGGSGFNVLMVHRRSHTGERPFQCNQCGASFTQRGNLLRHIRLHTGERPFRCHLCNYACQRRDALTASAEARHIRAEMGSGRLKIQVRKAAITSYEKSDGVYTGLSTRNQETYETLKHEKPPQ

SEQ ID NO: 1816 - protein, 145 aa, synthetic construct
LGEPQLCYILDAILFLYGIVLTLLYCGGSFNVLMVHRRSHTGERPFQCNQCGASFTQRGNLLRHIRLHTGERPFRCHLCNYACQRRDALTASAEARHIRAEMGRLKIQVRKAAITSYEKSDGVYTGLSTRNQETYETLKHEKPPQ

SEQ ID NO: 1817 - protein, 222 aa, synthetic construct
QSFGLLDPKLCYLLDGILFIYGVILTALFLRVRFSRSADAPAYQQGQNQLYNELNLGRREEYDVLDRRRGRDPEMGGKPQRRRNPQEGLYNELQRDRMAEAYSEIGMRGERRRGKGHDGLYQGLSTATRDTYDALHMQALPPREFGGSFNVLMVHRRSHTGERPFQCNQCGASFTQRGNLLRHIRLHTGERPFRCHLCNYACQRRDALTASAEARHIRAEMG

SEQ ID NO: 1818 - protein, 254 aa, synthetic construct
QSFGLLDPKLCYLLDGILFIYGVILTALFLRVRFSRSADAPAYQQGQNQLYNELNLGRREEYDVLDRRRGRDPEMGGRPQRRRNPQEGLYNELQRDRMAEAYSEIGMRGERRRGRGHDGLYQGLSTATRDTYDALHMQALPPRGPGGGVQVETISPGDGRTFPKRGQTCVVHYTGMLEDGKKVDSSRDRNKPFKFMLGKQEVIRGWEEGVAQMSVGQRAKLTISPDYAYGATGHPGIIPPHATLVFDVELLKLG

SEQ ID NO: 1819 - protein, 9 aa, synthetic construct
GGGGGGGGG

SEQ ID NO: 1820 - protein, 112 aa, synthetic construct
RVKFSRSADAPAYQQGQNQLYNELNLGRREEYDVLDKRRGRDPEMGGKPRRKNPQEGLYNELQKDKMAEAYSEIGMKGERRRGKGHDGLYQGLSTATKDTYDALHMQALPPR

SEQ ID NO: 1821 - protein, 112 aa, synthetic construct; identical to SEQ ID NO: 1820

SEQ ID NO: 1822 - protein, 238 aa, synthetic construct
IQNPDPAVYQLRDSKSSDKSVCLFTDFDSQTNVSQSKDSDVYITDKTVLDMRSMDFKSNSAVAWSNKSDFACANAFNNSIIPEDTFFPSPESSCGTQSFGLLDPKLCYLLDGILFIYGVILTALFLRVKFSRSADAPAYQQGQNQLYNELNLGRREEYDVLDKRRGRDPEMGGKPRRKNPQEGLYNELQKDKMAEAYSEIGMKGERRRGKGHDGLYQGLSTATKDTYDALHMQALPPR

SEQ ID NO: 1823 - protein, 275 aa, synthetic construct
EDLKNVFPPEVAVFEPSEAEISHTQKATLVCLATGFYPDHVELSWWVNGKEVHSGVSTDPQPLKEQPALNDSRYCLSSRLRVSATFWQNPRNHFRCQVQFYGLSENDEWTQDRAKPVTQIVSAEAWGRADCGSQSFGLLDPKLCYLLDGILFIYGVILTALFLRVKFSRSADAPAYQQGQNQLYNELNLGRREEYDVLDKRRGRDPEMGGKPRRKNPQEGLYNELQKDKMAEAYSEIGMKGERRRGKGHDGLYQGLSTATKDTYDALHMQALPPR

SEQ ID NO: 1824 - protein, 142 aa, synthetic construct
QSFGLLDPKLCYLLDGILFIYGVILTALFLRVKFSRSADAPAYQQGQNQLYNELNLGRREEYDVLDKRRGRDPEMGGKPRRKNPQEGLYNELQKDKMAEAYSEIGMKGERRRGKGHDGLYQGLSTATKDTYDALHMQALPPR

SEQ ID NO: 1825 - protein, 142 aa, synthetic construct; identical to SEQ ID NO: 1824

SEQ ID NO: 1826 - protein, 112 aa, synthetic construct; identical to SEQ ID NO: 1820

SEQ ID NO: 1827 - protein, 142 aa, synthetic construct; identical to SEQ ID NO: 1824

SEQ ID NO: 1828 - protein, 183 aa, synthetic construct
QSFGLLDPKLCYLLDGILFIYGVILTALFLRSKRSRLLHSDYMNMTPRRPGPTRKHYQPYAPPRDFAAYRSRVKFSRSADAPAYQQGQNQLYNELNLGRREEYDVLDKRRGRDPEMGGKPRRKNPQEGLYNELQKDKMAEAYSEIGMKGERRRGKGHDGLYQGLSTATKDTYDALHMQALPPR

SEQ ID NO: 1829 - protein, 184 aa, synthetic construct
QSFGLLDPKLCYLLDGILFIYGVILTALFLKRGRKKLLYIFKQPFMRPVQTTQEEDGCSCRFPEEEEGGCELRVKFSRSADAPAYQQGQNQLYNELNLGRREEYDVLDKRRGRDPEMGGKPRRKNPQEGLYNELQKDKMAEAYSEIGMKGERRRGKGHDGLYQGLSTATKDTYDALHMQALPPR

SEQ ID NO: 1830 - protein, 183 aa, synthetic construct; identical to SEQ ID NO: 1828

SEQ ID NO: 1831 - protein, 183 aa, synthetic construct; identical to SEQ ID NO: 1828

SEQ ID NO: 1832 - protein, 330 aa, synthetic construct
QSFGLLDPKLCYLLDGILFIYGVILTALFLHRRACRKRIRQKLHLCYPVQTSQPKLELVDSRPRRSSTQLRSGASVTEPVAEERGLMSQPLMETCHSVGAAYLESLPLQDASPAGGPSSPRDLPEPRVSTEHTNNKIEKIYIMKADTVIVGTVKAELPEGRGLAGPAEPELEEELEADHTPHYPEQETEPPLGSCSDVMLSVEEEGKEDPLPTAASGKRVKFSRSADAPAYQQGQNQLYNELNLGRREEYDVLDKRRGRDPEMGGKPRRKNPQEGLYNELQKDKMAEAYSEIGMKGERRRGKGHDGLYQGLSTATKDTYDALHMQALPPR

SEQ ID NO: 1833 - protein, 330 aa, synthetic construct; identical to SEQ ID NO: 1832

SEQ ID NO: 1834 - protein, 161 aa, synthetic construct
QSFGLLDPKLCYLLDGILFIYGVILTALFLHLCCRRRRARLRFMKQFYKRVKFSRSADAPAYQQGQNQLYNELNLGRREEYDVLDKRRGRDPEMGGKPRRKNPQEGLYNELQKDKMAEAYSEIGMKGERRRGKGHDGLYQGLSTATKDTYDALHMQALPPR

SEQ ID NO: 1835 - protein, 174 aa, synthetic construct
QSFGLLDPKLCYLLDGILFIYGVILTALFLLYCNHRNRRRVCKCPRPVVKSGDKPSLSARYVRVKFSRSADAPAYQQGQNQLYNELNLGRREEYDVLDKRRGRDPEMGGKPRRKNPQEGLYNELQKDKMAEAYSEIGMKGERRRGKGHDGLYQGLSTATKDTYDALHMQALPPR

SEQ ID NO: 1836 - protein, 182 aa, synthetic construct
QSFGLLDPKLCYLLDGILFIYGVILTALFLCVRCRHRRRQAERMSQIKRLLSEKKTCQCPHRFQKTCSPIRVKFSRSADAPAYQQGQNQLYNELNLGRREEYDVLDKRRGRDPEMGGKPRRKNPQEGLYNELQKDKMAEAYSEIGMKGERRRGKGHDGLYQGLSTATKDTYDALHMQALPPR

SEQ ID NO: 1837 - protein, 182 aa, synthetic construct; identical to SEQ ID NO: 1836

SEQ ID NO: 1838 - protein, 222 aa, synthetic construct
QSFGLLDPKLCYLLDGILFIYGVILTALFLRVRFSRSADAPAYQQGQNQLYNELNLGRREEYDVLDRRRGRDPEMGGKPRRRNPQEGLYNELQRDRMAEAYSEIGMRGERRRGKGHDGLYQGLSTATRDTYDALHMQALPPREFGGSGFNVLMVHRRSHTGERPFQCNQCGASFTQRGNLLRHIRLHTGERPFRCHLCNYACQRRDALTASAEARHIRAEMG

SEQ ID NO: 1839 - protein, 221 aa, synthetic construct
QSFGLLDPKLCYLLDGILFIYGVILTALFLRVRFSRSADAPAYQQGQNQLYNELNLGRREEYDVLDRRRGRDPEMGGRPRRRNPQEGLYNELQRDRMAEAYSEIGMRGERRRGRGHDGLYQGLSTATRDTYDALHMQALPPRGPGGSFNVLMVHRRSHTGERPFQCNQCGASFTQRGNLLRHIRLHTGERPFRCHLCNYACQRRDALTASAEARHIRAEMG

SEQ ID NO: 1840 - protein, 142 aa, synthetic construct
QSFGLLDPKLCYLLDGILFIYGVILTALFLRVRFSRSADAPAYQQGQNQLYNELNLGRREEYDVLDRRRGRDPEMGGKPRRRNPQEGLYNELQRDRMAEAYSEIGMRGERRRGKGHDGLYQGLSTATRDTYDALHMQALPPR

SEQ ID NO: 1841 - protein, 142 aa, synthetic construct
QSFGLLDPKLCYLLDGILFIYGVILTALFLRVRFSRSADAPAYQQGQNQLYNELNLGRREEYDVLDRRRGRDPEMGGRPRRRNPQEGLYNELQRDRMAEAYSEIGMRGERRRGRGHDGLYQGLSTATRDTYDALHMQALPPR

SEQ ID NO: 1842 - protein, 221 aa, synthetic construct
QSFGLLDPKLCYLLDGILFIYGVILTALFLRVRFSRSADAPAYQQGQNQLYNELNLGRREEYDVLDRRRGRDPEMGGKPRRRNPQEGLYNELQRDRMAEAYSEIGMRGERRRGKGHDGLYQGLSTATRDTYDALHMQALPPREFGGSFNVLMVHRRSHTGERPFQCNQCGASFTQRGNLLRHIRLHTGERPFRCHLCNYACQRRDALTASAEARHIRAEMG

SEQ ID NO: 1843 - protein, 253 aa, synthetic construct
QSFGLLDPKLCYLLDGILFIYGVILTALFLRVRFSRSADAPAYQQGQNQLYNELNLGRREEYDVLDRRRGRDPEMGGRPRRRNPQEGLYNELQRDRMAEAYSEIGMRGERRRGRGHDGLYQGLSTATRDTYDALHMQALPPRGPGGGVQVETISPGDGRTFPKRGQTCVVHYTGMLEDGKKVDSSRDRNKPFKFMLGKQEVIRGWEEGVAQMSVGQRAKLTISPDYAYGATGHPGIIPPHATLVFDVELLKLG

SEQ ID NO: 1844 - protein, 1384 aa, synthetic construct
MALPVTALLLPLALLLHAARPDIQMTQSPSSLSASVGDRVTITCKASDHINNWLAWYQQKPGQAPKLLIYGATTLETGVPSRFSGSGSGTDYTLTISSLQPEDFATYYCQQSWNTPWTFGQGTKLEIKRLEDLKNVFPPEVAVFEPSEAEISHTQKATLVCLATGFYPDHVELSWWVNGKEVHSGVSTDPQPLKEQPALNDSRYCLSSRLRVSATFWQNPRNHFRCQVQFYGLSENDEWTQDRAKPVTQIVSAEAWGRADCGSQSFGLLDPKLCYLLDGILFIYGVILTALFLRVKFSRSADAPAYQQGQNQLYNELNLGRREEYDVLDKRRGRDPEMGGKPRRKNPQEGLYNELQKDKMAEAYSEIGMKGERRRGKGHDGLYQGLSTATKDTYDALHMQALPPRRAKRSGSGATNFSLLKQAGDVEENPGPTSMDWIWRILFLVGAATGAHSFEQVQLQQPGAELVKPGASVKMSCKASGYAFSSYWINWMKQKPGQGLEWIGQIYPGDGDTNYNGKFKGRATLTADTSSSTAYMQLSSLTSEDSAVYFCARSITTVVGCAMDYWGQGTSVTVSSTRIQNPDPAVYQLRDSKSSDKSVCLFTDFDSQTNVSQSKDSDVYITDKTVLDMRSMDFKSNSAVAWSNKSDFACANAFNNSIIPEDTFFPSPESSCGTITQGLAVSTISSFFPPGYQVSFCLVMVLLFAVDTGLYFSVKTNIRSSTRDWKDHKFKWRKDPQDKRAKRSGSGATNFSLLKQAGDVEENPGPSRGHMCHQQLVISWFSLVFLASPLVAIWELKKDVYVVELDWYPDAPGEMVVLTCDTPEEDGITWTLDQSSEVLGSGKTLTIQVKEFGDAGQYTCHKGGEVLSHSLLLLHKKEDGIWSTDILKDQKEPKNKTFLRCEAKNYSGRFTCWWLTTISTDLTFSVKSSRGSSDPQGVTCGAATLSAERVRGDNKEYEYSVECQEDSACPAAEESLPIEVMVDAVHKLKYENYTSSFFIRDIIKPDPPKNLQLKPLKNSRQVEVSWEYPDTWSTPHSYFSLTFCVQVQGKSKREKKDRVFTDKTSATVICRKNASISVRAQDRYYSSSWSEWASVPCSGGGGSGGGGSGGGGSRNLPVATPDPGMFPCLHHSQNLLRAVSNMLQKARQTLEFYPCTSEEIDHEDITKDKTSTVEACLPLELTKNESCLNSRETSFITNGSCLASRKTSFMMALCLSSIYEDLKMYQVEFKTMNAKLLMDPKRQIFLDQNMLAVIDELMQALNFNSETVPQKSSLEEPDFYKTKIKLCILLHAFRIRAVTIDRVMSYLNASGSKIEVMYPPPYLDNEKSNGTIIHVKGKHLCPSPLFPGPSKPFWVLVVVGGVLACYSLLVTVAFIIFWVRSKRS

SEQ ID NO: 1845 - protein, 542 aa, synthetic construct
MCHQQLVISWFSLVFLASPLVAIWELKKDVYVVELDWYPDAPGEMVVLTCDTPEEDGITWTLDQSSEVLGSGKTLTIQVKEFGDAGQYTCHKGGEVLSHSLLLLHKKEDGIWSTDILKDQKEPKNKTFLRCEAKNYSGRFTCWWLTTISTDLTFSVKSSRGSSDPQGVTCGAATLSAERVRGDNKEYEYSVECQEDSACPAAEESLPIEVMVDAVHKLKYENYTSSFFIRDIIKPDPPKNLQLKPLKNSRQVEVSWEYPDTWSTPHSYFSLTFCVQVQGKSKREKKDRVFTDKTSATVICRKNASISVRAQDRYYSSSWSEWASVPCSGGGGSGGGGSGGGGSRNLPVATPDPGMFPCLHHSQNLLRAVSNMLQKARQTLEFYPCTSEEIDHEDITKDKTSTVEACLPLELTKNESCLNSRETSFITNGSCLASRKTSFMMALCLSSIYEDLKMYQVEFKTMNAKLLMDPKRQIFLDQNMLAVIDELMQALNFNSETVPQKSSLEEPDFYKTKIKLCILLHAFRIRAVTIDRVMSYLNASGS

SEQ ID NO: 1846 - protein, 614 aa, synthetic construct
MCHQQLVISWFSLVFLASPLVAIWELKKDVYVVELDWYPDAPGEMVVLTCDTPEEDGITWTLDQSSEVLGSGKTLTIQVKEFGDAGQYTCHKGGEVLSHSLLLLHKKEDGIWSTDILKDQKEPKNKTFLRCEAKNYSGRFTCWWLTTISTDLTFSVKSSRGSSDPQGVTCGAATLSAERVRGDNKEYEYSVECQEDSACPAAEESLPIEVMVDAVHKLKYENYTSSFFIRDIIKPDPPKNLQLKPLKNSRQVEVSWEYPDTWSTPHSYFSLTFCVQVQGKSKREKKDRVFTDKTSATVICRKNASISVRAQDRYYSSSWSEWASVPCSGGGGSGGGGSGGGGSRNLPVATPDPGMFPCLHHSQNLLRAVSNMLQKARQTLEFYPCTSEEIDHEDITKDKTSTVEACLPLELTKNESCLNSRETSFITNGSCLASRKTSFMMALCLSSIYEDLKMYQVEFKTMNAKLLMDPKRQIFLDQNMLAVIDELMQALNFNSETVPQKSSLEEPDFYKTKIKLCILLHAFRIRAVTIDRVMSYLNASGSKIEVMYPPPYLDNEKSNGTIIHVKGKHLCPSPLFPGPSKPFWVLVVVGGVLACYSLLVTVAFIIFWVRSKRS

SEQ ID NO: 1847 - protein, 142 aa, synthetic construct
IQNPDPAVYQLRDSKSSDKSVCLFTDFDSQTNVSQSKDSDVYITDKCVLDMRSMDFKSNSAVAWSNKSDFACANAFNNSIIPEDTFFPSPESSCGFTSESYQQGVLSATILYEILLGKATLYAVLVSALVLMAMVKRKDSRG

SEQ ID NO: 1848 - protein, 145 aa, synthetic construct
IQNPDPAVYQLRDSKSSDKSVCLFTDFDSQTNVSQSKDSDVYITDKCVLDMRSMDFKSNSAVAWSNKSDFACANAFNNSIIPEDTFFPSPESSCDVKLVEKSFETDTNLNFQILYEILLGKATLYAVLVSALVLMAMVKRKDSRG

SEQ ID NO: 1849 - protein, 160 aa, synthetic construct
IQNPDPAVYQLRDSKSSDKSVCLFTDFDSQTNVSQSKDSDVYITDKCVLDMRSMDFKSNSAVAWSNKSDFACANAFNNSIIPEDTFFPSPESSDSTDHVKPKETENTKQPSKSCHKPKAIVHTEKVNMMSLTVLGLRMLFAKTVAVNFLLTAKLFFLLTA

SEQ ID NO: 1850 - protein, 157 aa, synthetic construct
IQNPDPAVYQLRDSKSSDKSVCLFTDFDSQTNVSQSKDSDVYITDKCVLDMRSMDFKSNSAVAWSNKSDFACANAFNNSIIPEDTFFPSPESSDSTDHVKPKETENTKQPSKSCHKPKAIVHTEKVNMMSLTVLGLRMLFAKTVAVNFLLTAKLFFL

SEQ ID NO: 1851 - protein, 173 aa, synthetic construct
GQPKANPTVTLFPPSSEELQANKATLVCLISDFYPGAVTVAWKADGSPVKAGVETTKPSKQSNNKYAASSYLSLTPEQWKSHRSYSCQVTHEGSTVEKTVAPTECSPIKTDVITMDPKDNCSKDANDTLLLQLTNTSAYYMYLLLLLKSVVYFAIITCCLLRRTAFCCNGEKS

SEQ ID NO: 1852 - protein, 174 aa, synthetic construct
GQPKANPTVTLFPPSSEELQANKATLVCLISDFYPGAVTVAWKADGSPVKAGVETTKPSKQSNNKYAASSYLSLTPEQWKSHRSYSCQVTHEGSTVEKTVAPTECSEVKTDSTDHVKPKETENTKQPSKSCHKPKAIVHTEKVNMMSLTVLGLRMLFAKTVAVNFLLTAKLFFL

SEQ ID NO: 1853 - protein, 159 aa, synthetic construct
GQPKANPTVTLFPPSSEELQANKATLVCLISDFYPGAVTVAWKADGSPVKAGVETTKPSKQSNNKYAASSYLSLTPEQWKSHRSYSCQVTHEGSTVEKTVAPTECSGRADCGFTSESYQQGVLSATILYEILLGKATLYAVLVSALVLMAMVKRKDSRG

SEQ ID NO: 1854 - protein, 166 aa, synthetic construct
GQPKANPTVTLFPPSSEELQANKATLVCLISDFYPGAVTVAWKADGSPVKAGVETTKPSKQSNNKYAASSYLSLTPEQWKSHRSYSCQVTHEGSTVEKTVAPTECSIPEDTFFPSPESSCDVKLVEKSFETDTNLNFQNLSVIGFRILLLKVAGFNLLMTLRLWSS

SEQ ID NO: 1855 - protein, 176 aa, synthetic construct
DLKNVFPPEVAVFEPSEAEISHTQKATLVCLATGFYPDHVELSWWVNGKEVHSGVCTDPQPLKEQPALNDSRYCLSSRLRVSATFWQNPRNHFRCQVQFYGLSENDEWTQDRAKPVTQIVSAEAWGRADCDVKLVEKSFETDTNLNFQNLSVIGFRILLLKVAGFNLLMTLRLWSS

SEQ ID NO: 1856 - protein, 173 aa, synthetic construct
DLKNVFPPEVAVFEPSEAEISHTQKATLVCLATGFYPDHVELSWWVNGKEVHSGVCTDPQPLKEQPALNDSRYCLSSRLRVSATFWQNPRNHFRCQVQFYGLSENDEWTQDRAKPVTQIVSAEAWGRADCGFTSESYQQGVLSATNLSVIGFRILLLKVAGFNLLMTLRLWSS

SEQ ID NO: 1857 - protein, 262 aa, synthetic construct
DLKNVFPPEVAVFEPSEAEISHTQKATLVCLATGFYPDHVELSWWVNGKEVHSGVCTDPQPLKEQPALNDSRYCLSSRLRVSATFWQNPRNHFRCQVQFYGLSENDEWTQDRAKPVTQIVSAEAWGRADDVIKIHWQEKKSNTILGSQEGNTMKTNDTYMKFSWLTVPEKSLDKEHRCIVRHENNKNGVDQEIIFPPIKTDVITMDPKDNCSKDANDTLLLQLTNTSAYYMYLLLLLKSVVYFAIITCCLLMAMVKRKDSRG

SEQ ID NO: 1858 - protein, 174 aa, synthetic construct
EDLKNVFPPEVAVFEPSEAEISHTQKATLVCLATGFYPDHVELSWWVNGKEVHSGVCTDPQPLKEQPALNDSRYCLSSRLRVSATFWQNPRNHFRCQVQFYGLSENDEWTQDRAKPVTQIVSAEAWGRADCGFTSESYQQGVLSATNLSVIGFRILLLKVAGFNLLMTLRLWSS

SEQ ID NO: 1859 - protein, 170 aa, synthetic construct
ASTKGPSVFPLAPSSKSTSGGTAALGCLVKDYFPEPVTVSWNSGALTSGVHTFPAVLQSSGLYSLSSVVTVPSSSLGTQTYICNVNHKPSNTKVDKRVEPKSCPIKTDVITMDPKDNCSKDANDTLLLQLTNTSAYYMYLLLLLKSVVYFAIITCCLLRRTAFCCNGEKS

SEQ ID NO: 1860 - protein, 94 aa, synthetic construct; identical to SEQ ID NO: 1483

SEQ ID NO: 1861 - protein, 94 aa, synthetic construct
IQNPDPAVYQLRDSKSSDKSVCLFTDFDSQTNVSQSKDSDVYITDKCVLDMRSMDFKSNSAVAWSNKSDFACANAFNNSIIPEDTFFPSSDVPC

SEQ ID NO: 1862 - protein, 94 aa, synthetic construct
IQNPDPAVYQLRDSKSSDKSVCLFTDFDSQTNVSQSKDSDVYITDKCVLDMRSMDFKSNSAVAWSNKSDFACANAFNNSIIPEDTFFPSPESSC

SEQ ID NO: 1863 - protein, 132 aa, synthetic construct
EDLKNVFPPEVAVFEPSEAEISHTQKATLVCLATGFYPDHVELSWWVNGKEVHSGVSTDPQPLKEQPALNDSRYCLSSRLRVSATFWQNPRNHFRCQVQFYGLSENDEWTQDRAKPVTQIVSAEAWGRADCG

SEQ ID NO: 1864 - protein, 131 aa, synthetic construct
EDLKNVFPPEVAVFEPSKAEIAHTQKATLVCLATGFYPDHVELSWWVNGKEVHSGVCTDPQPLKEQPALNDSRYCLSSRLRVSATFWQNPRNHFRCQVQFYGLSENDEWTQDRAKPVTQIVSAEAWGRADC

SEQ ID NO: 1865 - protein, 131 aa, synthetic construct
EDLKNVFPPEVAVFEPSEAEISHTQKATLVCLATGFYPDHVELSWWVNGKEVHSGVCTDPQPLKEQPALNDSRYCLSSRLRVSATFWQNPRNHFRCQVQFYGLSENDEWTQDRAKPVTQIVSAEAWGRADC

SEQ ID NO: 1866 - protein, 177 aa, synthetic construct
EDLKNVFPPEVAVFEPSEAEISHTQKATLVCLATGFYPDHVELSWWVNGKEVHSGVCTDPQPLKEQPALNDSRYCLSSRLRVSATFWQNPRNHFRCQVQFYGLSENDEWTQDRAKPVTQIVSAEAWGRADCDVKLVEKSFETDTNLNFQNLSVIGFRILLLKVAGFNLLMTLRLWSS

SEQ ID NO: 1867 - protein, 142 aa, synthetic construct; identical to SEQ ID NO: 1847

SEQ ID NO: 1868 - protein, 174 aa, synthetic construct; identical to SEQ ID NO: 1858

SEQ ID NO: 1869 - protein, 145 aa, synthetic construct; identical to SEQ ID NO: 1848

SEQ ID NO: 1870 - protein, 160 aa, synthetic construct; identical to SEQ ID NO: 1849

SEQ ID NO: 1871 - protein, 263 aa, synthetic construct
EDLKNVFPPEVAVFEPSEAEISHTQKATLVCLATGFYPDHVELSWWVNGKEVHSGVCTDPQPLKEQPALNDSRYCLSSRLRVSATFWQNPRNHFRCQVQFYGLSENDEWTQDRAKPVTQIVSAEAWGRADDVIKIHWQEKKSNTILGSQEGNTMKTNDTYMKFSWLTVPEKSLDKEHRCIVRHENNKNGVDQEIIFPPIKTDVITMDPKDNCSKDANDTLLLQLTNTSAYYMYLLLLLKSVVYFAIITCCLLMAMVKRKDSRG

SEQ ID NO: 1872 - protein, 177 aa, synthetic construct
EDLKNVFPPEVAVFEPSEAEISHTQKATLVCLATGFYPDHVELSWWVNGKEVHSGVSTDPQPLKEQPALNDSRYCLSSRLRVSATFWQNPRNHFRCQVQFYGLSENDEWTQDRAKPVTQIVSAEAWGRADCDVKLVEKSFETDTNLNFQNLSVIGFRILLLKVAGFNLLMTLRLWSS

SEQ ID NO: 1873 - protein, 142 aa, synthetic construct
IQNPDPAVYQLRDSKSSDKSVCLFTDFDSQTNVSQSKDSDVYITDKTVLDMRSMDFKSNSAVAWSNKSDFACANAFNNSIIPEDTFFPSPESSCGFTSESYQQGVLSATILYEILLGKATLYAVLVSALVLMAMVKRKDSRG

SEQ ID NO: 1874 - protein, 174 aa, synthetic construct
EDLKNVFPPEVAVFEPSEAEISHTQKATLVCLATGFYPDHVELSWWVNGKEVHSGVSTDPQPLKEQPALNDSRYCLSSRLRVSATFWQNPRNHFRCQVQFYGLSENDEWTQDRAKPVTQIVSAEAWGRADCGFTSESYQQGVLSATNLSVIGFRILLLKVAGFNLLMTLRLWSS

SEQ ID NO: 1875 - protein, 145 aa, synthetic construct
IQNPDPAVYQLRDSKSSDKSVCLFTDFDSQTNVSQSKDSDVYITDKTVLDMRSMDFKSNSAVAWSNKSDFACANAFNNSIIPEDTFFPSPESSCDVKLVEKSFETDTNLNFQILYEILLGKATLYAVLVSALVLMAMVKRKDSRG

SEQ ID NO: 1876 - protein, 160 aa, synthetic construct
IQNPDPAVYQLRDSKSSDKSVCLFTDFDSQTNVSQSKDSDVYITDKTVLDMRSMDFKSNSAVAWSNKSDFACANAFNNSIIPEDTFFPSPESSDSTDHVKPKETENTKQPSKSCHKPKAIVHTEKVNMMSLTVLGLRMLFAKTVAVNFLLTAKLFFLLTA

SEQ ID NO: 1877 - protein, 263 aa, synthetic construct
EDLKNVFPPEVAVFEPSEAEISHTQKATLVCLATGFYPDHVELSWWVNGKEVHSGVSTDPQPLKEQPALNDSRYCLSSRLRVSATFWQNPRNHFRCQVQFYGLSENDEWTQDRAKPVTQIVSAEAWGRADDVIKIHWQEKKSNTILGSQEGNTMKTNDTYMKFSWLTVPEKSLDKEHRCIVRHENNKNGVDQEIIFPPIKTDVITMDPKDNCSKDANDTLLLQLTNTSAYYMYLLLLLKSVVYFAIITCCLLMAMVKRKDSRG

SEQ ID NO: 1878 - protein, 157 aa, synthetic construct; identical to SEQ ID NO: 1850

SEQ ID NO: 1879 - protein, 264 aa, synthetic construct
EDLKNVFPPEVAVFEPSEAEISHTQKATLVCLATGFYPDHVELSWWVNGKEVHSGVCTDPQPLKEQPALNDSRYCLSSRLRVSATFWQNPRNHFRCQVQFYGLSENDEWTQDRAKPVTQIVSAEAWGRADDVIKIHWQEKKSNTILGSQEGNTMKTNDTYMKFSWLTVPEKSLDKEHRCIVRHENNKNGVDQEIIFPPIKTDVITMDPKDNCSKDANDTLLLQLTNTSAYYMYLLLLLKSVVYFAIITCCLLRRTAFCCNGEKS

SEQ ID NO: 1880 - protein, 157 aa, synthetic construct
IQNPDPAVYQLRDSKSSDKSVCLFTDFDSQTNVSQSKDSDVYITDKTVLDMRSMDFKSNSAVAWSNKSDFACANAFNNSIIPEDTFFPSPESSDSTDHVKPKETENTKQPSKSCHKPKAIVHTEKVNMMSLTVLGLRMLFAKTVAVNFLLTAKLFFL

SEQ ID NO: 1881 - protein, 264 aa, synthetic construct
EDLKNVFPPEVAVFEPSEAEISHTQKATLVCLATGFYPDHVELSWWVNGKEVHSGVSTDPQPLKEQPALNDSRYCLSSRLRVSATFWQNPRNHFRCQVQFYGLSENDEWTQDRAKPVTQIVSAEAWGRADDVIKIHWQEKKSNTILGSQEGNTMKTNDTYMKFSWLTVPEKSLDKEHRCIVRHENNKNGVDQEIIFPPIKTDVITMDPKDNCSKDANDTLLLQLTNTSAYYMYLLLLLKSVVYFAIITCCLLRRTAFCCNGEKS

SEQ ID NO: 1882 - protein, 166 aa, synthetic construct
GQPKANPTVTLFPPSSEELQANKATLVCLISDFYPGAVTVAWKADGSPVKAGVETTKPSKQSNNKYAASSYLSLTPEQWKSHRSYSCQVTHEGSTVEKTVAPTECSIPEDTFFPSPESSCDVKLVEKSFETDTNLNFQNLLVIVLRILLLKVAGFNLLMTLRLWSS

SEQ ID NO: 1883 - protein, 176 aa, synthetic construct
DLKNVFPPEVAVFEPSEAEISHTQKATLVCLATGFYPDHVELSWWVNGKEVHSGVCTDPQPLKEQPALNDSRYCLSSRLRVSATFWQNPRNHFRCQVQFYGLSENDEWTQDRAKPVTQIVSAEAWGRADCDVKLVEKSFETDTNLNFQNLLVIVLRILLLKVAGFNLLMTLRLWSS

SEQ ID NO: 1884 - protein, 173 aa, synthetic construct
DLKNVFPPEVAVFEPSEAEISHTQKATLVCLATGFYPDHVELSWWVNGKEVHSGVCTDPQPLKEQPALNDSRYCLSSRLRVSATFWQNPRNHFRCQVQFYGLSENDEWTQDRAKPVTQIVSAEAWGRADCGFTSESYQQGVLSATNLLVIVLRILLLKVAGFNLLMTLRLWSS

SEQ ID NO: 1885 - protein, 133 aa, synthetic construct
IQNPDPAVYQLRDSKSSDKSVCLFTDFDSQTNVSQSKDSDVYITDKTVLDMRSMDFKSNSAVAWSNKSDFACANAFNNSIGRADCGFTSESYQQGVLSATILYEILLGKATLYAVLVSALVLMAMVKRKDSRG

SEQ ID NO: 1886 - protein, 131 aa, synthetic construct
IQNPDPAVYQLRDSKSSDKSVCLFTDFDSQTNVSQSKDSDVYITDKTVLDMRSMDFKSNSAVAWSNKSDFACANAFNNSIADCGFTSESYQQGVLSATILYEILLGKATLYAVLVSALVLMAMVKRKDSRG

SEQ ID NO: 1887 - protein, 141 aa, synthetic construct
IQNPDPAVYQLRDSKSSDKSVCLFTDFDSQTNVSQSKDSDVYITDKTVLDMRSMDFKSNSAVAWSNKSDFACANAFNNSIQIVSAEAWGRADCGFTSESYQQGVLSATILYEILLGKATLYAVLVSALVLMAMVKRKDSRG

SEQ ID NO: 1888 - protein, 149 aa, synthetic construct
IQNPDPAVYQLRDSKSSDKSVCLFTDFDSQTNVSQSKDSDVYITDKTVLDMRSMDFKSNSAVAWSNKSDFACANAFNNSIFPPIKTDVITMDPKDNCSKDANDTLLLQLTNTSAYYMYLLLLLKSVVYFAIITCCLLRRTAFCCNGEKS

SEQ ID NO: 1889 - protein, 147 aa, synthetic construct
IQNPDPAVYQLRDSKSSDKSVCLFTDFDSQTNVSQSKDSDVYITDKTVLDMRSMDFKSNSAVAWSNKSDFACANAFNNSIPIKTDVITMDPKDNCSKDANDTLLLQLTNTSAYYMYLLLLLKSVVYFAIITCCLLRRTAFCCNGEKS

SEQ ID NO: 1890 - protein, 139 aa, synthetic construct
IQNPDPAVYQLRDSKSSDKSVCLFTDFDSQTNVSQSKDSDVYITDKTVLDMRSMDFKSNSAVAWSNKSDFACANAFNNSIMDPKDNCSKDANDTLLLQLTNTSAYYMYLLLLLKSVVYFAIITCCLLRRTAFCCNGEKS

SEQ ID NO: 1891 - protein, 147 aa, synthetic construct; identical to SEQ ID NO: 1889

SEQ ID NO: 1892 - protein, 133 aa, synthetic construct
IQNPDPAVYQLRDSKSSDKSVCLFTDFDSQTNVSQSKDSDVYITDKTVLDMRSMDFKSNSAVAWSNKSDFACANAFNNSICSKDANDTLLLQLTNTSAYYMYLLLLLKSVVYFAIITCCLLRRTAFCCNGEKS

SEQ ID NO: 1893 - protein, 148 aa, synthetic construct
IQNPDPAVYQLRDSKSSDKSVCLFTDFDSQTNVSQSKDSDVYITDKTVLDMRSMDFKSNSAVAWSNKSDFACANAFNNSIEVKTDSTDHVKPKETENTKQPSKSCHKPKAIVHTEKVNMMSLTVLGLRMLFAKTVAVNFLLTAKLFFL

SEQ ID NO: 1894 - protein, 141 aa, synthetic construct
IQNPDPAVYQLRDSKSSDKSVCLFTDFDSQTNVSQSKDSDVYITDKTVLDMRSMDFKSNSAVAWSNKSDFACANAFNNSIDHVKPKETENTKQPSKSCHKPKAIVHTEKVNMMSLTVLGLRMLFAKTVAVNFLLTAKLFFL

SEQ ID NO: 1895 - protein, 143 aa, synthetic construct
IQNPDPAVYQLRDSKSSDKSVCLFTDFDSQTNVSQSKDSDVYITDKTVLDMRSMDFKSNSAVAWSNKSDFACANAFNNSIIPEDTFFPSPGRADCGFTSESYQQGVLSATILYEILLGKATLYAVLVSALVLMAMVKRKDSRG

SEQ ID NO: 1896 - protein, 141 aa, synthetic construct
IQNPDPAVYQLRDSKSSDKSVCLFTDFDSQTNVSQSKDSDVYITDKTVLDMRSMDFKSNSAVAWSNKSDFACANAFNNSIIPEDTFFPSPADCGFTSESYQQGVLSATILYEILLGKATLYAVLVSALVLMAMVKRKDSRG

SEQ ID NO: 1897 - protein, 151 aa, synthetic construct
IQNPDPAVYQLRDSKSSDKSVCLFTDFDSQTNVSQSKDSDVYITDKTVLDMRSMDFKSNSAVAWSNKSDFACANAFNNSIIPEDTFFPSPQIVSAEAWGRADCGFTSESYQQGVLSATILYEILLGKATLYAVLVSALVLMAMVKRKDSRG

SEQ ID NO: 1898 - protein, 159 aa, synthetic construct
IQNPDPAVYQLRDSKSSDKSVCLFTDFDSQTNVSQSKDSDVYITDKTVLDMRSMDFKSNSAVAWSNKSDFACANAFNNSIIPEDTFFPSPFPPIKTDVITMDPKDNCSKDANDTLLLQLTNTSAYYMYLLLLLKSVVYFAIITCCLLRRTAFCCNGEKS

SEQ ID NO: 1899 - protein, 157 aa, synthetic construct
IQNPDPAVYQLRDSKSSDKSVCLFTDFDSQTNVSQSKDSDVYITDKTVLDMRSMDFKSNSAVAWSNKSDFACANAFNNSIIPEDTFFPSPPIKTDVITMDPKDNCSKDANDTLLLQLTNTSAYYMYLLLLLKSVVYFAIITCCLLRRTAFCCNGEKS

SEQ ID NO: 1900 - protein, 149 aa, synthetic construct
IQNPDPAVYQLRDSKSSDKSVCLFTDFDSQTNVSQSKDSDVYITDKTVLDMRSMDFKSNSAVAWSNKSDFACANAFNNSIIPEDTFFPSPMDPKDNCSKDANDTLLLQLTNTSAYYMYLLLLLKSVVYFAIITCCLLRRTAFCCNGEKS

SEQ ID NO: 1901 - protein, 157 aa, synthetic construct; identical to SEQ ID NO: 1899

SEQ ID NO: 1902 - protein, 143 aa, synthetic construct
IQNPDPAVYQLRDSKSSDKSVCLFTDFDSQTNVSQSKDSDVYITDKTVLDMRSMDFKSNSAVAWSNKSDFACANAFNNSIIPEDTFFPSPCSKDANDTLLLQLTNTSAYYMYLLLLLKSVVYFAIITCCLLRRTAFCCNGEKS

SEQ ID NO: 1903 - protein, 158 aa, synthetic construct
IQNPDPAVYQLRDSKSSDKSVCLFTDFDSQTNVSQSKDSDVYITDKTVLDMRSMDFKSNSAVAWSNKSDFACANAFNNSIIPEDTFFPSPEVKTDSTDHVKPKETENTKQPSKSCHKPKAIVHTEKVNMMSLTVLGLRMLFAKTVAVNFLLTAKLFFL

SEQ ID NO: 1904 - protein, 151 aa, synthetic construct
IQNPDPAVYQLRDSKSSDKSVCLFTDFDSQTNVSQSKDSDVYITDKTVLDMRSMDFKSNSAVAWSNKSDFACANAFNNSIIPEDTFFPSPDHVKPKETENTKQPSKSCHKPKAIVHTEKVNMMSLTVLGLRMLFAKTVAVNFLLTAKLFFL

SEQ ID NO: 1905 - protein, 147 aa, synthetic construct
IQNPDPAVYQLRDSKSSDKSVCLFTDFDSQTNVSQSKDSDVYITDKTVLDMRSMDFKSNSAVAWSNKSDFACANAFNNSIIPEDTFFPSPESSCGRADCGFTSESYQQGVLSATILYEILLGKATLYAVLVSALVLMAMVKRKDSRG

SEQ ID NO: 1906 - protein, 145 aa, synthetic construct
IQNPDPAVYQLRDSKSSDKSVCLFTDFDSQTNVSQSKDSDVYITDKTVLDMRSMDFKSNSAVAWSNKSDFACANAFNNSIIPEDTFFPSPESSCADCGFTSESYQQGVLSATILYEILLGKATLYAVLVSALVLMAMVKRKDSRG

SEQ ID NO: 1907 - protein, 155 aa, synthetic construct
IQNPDPAVYQLRDSKSSDKSVCLFTDFDSQTNVSQSKDSDVYITDKTVLDMRSMDFKSNSAVAWSNKSDFACANAFNNSIIPEDTFFPSPESSCQIVSAEAWGRADCGFTSESYQQGVLSATILYEILLGKATLYAVLVSALVLMAMVKRKDSRG

SEQ ID NO: 1908 - protein, 163 aa, synthetic construct
IQNPDPAVYQLRDSKSSDKSVCLFTDFDSQTNVSQSKDSDVYITDKTVLDMRSMDFKSNSAVAWSNKSDFACANAFNNSIIPEDTFFPSPESSCFPPIKTDVITMDPKDNCSKDANDTLLLQLTNTSAYYMYLLLLLKSVVYFAIITCCLLRRTAFCCNGEKS

SEQ ID NO: 1909 - protein, 161 aa, synthetic construct
IQNPDPAVYQLRDSKSSDKSVCLFTDFDSQTNVSQSKDSDVYITDKTVLDMRSMDFKSNSAVAWSNKSDFACANAFNNSIIPEDTFFPSPESSCPIKTDVITMDPKDNCSKDANDTLLLQLTNTSAYYMYLLLLLKSVVYFAIITCCLLRRTAFCCNGEKS

SEQ ID NO: 1910 - protein, 153 aa, synthetic construct
IQNPDPAVYQLRDSKSSDKSVCLFTDFDSQTNVSQSKDSDVYITDKTVLDMRSMDFKSNSAVAWSNKSDFACANAFNNSIIPEDTFFPSPESSCMDPKDNCSKDANDTLLLQLTNTSAYYMYLLLLLKSVVYFAIITCCLLRRTAFCCNGEKS

SEQ ID NO: 1911 - protein, 161 aa, synthetic construct; identical to SEQ ID NO: 1909

SEQ ID NO: 1912 - protein, 147 aa, synthetic construct
IQNPDPAVYQLRDSKSSDKSVCLFTDFDSQTNVSQSKDSDVYITDKTVLDMRSMDFKSNSAVAWSNKSDFACANAFNNSIIPEDTFFPSPESSCCSKDANDTLLLQLTNTSAYYMYLLLLLKSVVYFAIITCCLLRRTAFCCNGEKS

SEQ ID NO: 1913 - protein, 162 aa, synthetic construct
IQNPDPAVYQLRDSKSSDKSVCLFTDFDSQTNVSQSKDSDVYITDKTVLDMRSMDFKSNSAVAWSNKSDFACANAFNNSIIPEDTFFPSPESSCEVKTDSTDHVKPKETENTKQPSKSCHKPKAIVHTEKVNMMSLTVLGLRMLFAKTVAVNFLLTAKLFFL

SEQ ID NO: 1914 - protein, 155 aa, synthetic construct
IQNPDPAVYQLRDSKSSDKSVCLFTDFDSQTNVSQSKDSDVYITDKTVLDMRSMDFKSNSAVAWSNKSDFACANAFNNSIIPEDTFFPSPESSCDHVKPKETENTKQPSKSCHKPKAIVHTEKVNMMSLTVLGLRMLFAKTVAVNFLLTAKLFFL

SEQ ID NO: 1915 - protein, 134 aa, synthetic construct
IQNPDPAVYQLRDSKSSDKSVCLFTDFDSQTNVSQSKDSDVYITDKTVLDMRSMDFKSNSAVAWSNKSDFACANAFNNSIIGRADCGFTSESYQQGVLSATILYEILLGKATLYAVLVSALVLMAMVKRKDSRG

SEQ ID NO: 1916 - protein, 132 aa, synthetic construct
IQNPDPAVYQLRDSKSSDKSVCLFTDFDSQTNVSQSKDSDVYITDKTVLDMRSMDFKSNSAVAWSNKSDFACANAFNNSIIADCGFTSESYQQGVLSATILYEILLGKATLYAVLVSALVLMAMVKRKDSRG

SEQ ID NO: 1917 - protein, 142 aa, synthetic construct
IQNPDPAVYQLRDSKSSDKSVCLFTDFDSQTNVSQSKDSDVYITDKTVLDMRSMDFKSNSAVAWSNKSDFACANAFNNSIIQIVSAEAWGRADCGFTSESYQQGVLSATILYEILLGKATLYAVLVSALVLMAMVKRKDSRG

SEQ ID NO: 1918 - protein, 150 aa, synthetic construct
IQNPDPAVYQLRDSKSSDKSVCLFTDFDSQTNVSQSKDSDVYITDKTVLDMRSMDFKSNSAVAWSNKSDFACANAFNNSIIFPPIKTDVITMDPKDNCSKDANDTLLLQLTNTSAYYMYLLLLLKSVVYFAIITCCLLRRTAFCCNGEKS

SEQ ID NO: 1919 - protein, 148 aa, synthetic construct
IQNPDPAVYQLRDSKSSDKSVCLFTDFDSQTNVSQSKDSDVYITDKTVLDMRSMDFKSNSAVAWSNKSDFACANAFNNSIIPIKTDVITMDPKDNCSKDANDTLLLQLTNTSAYYMYLLLLLKSVVYFAIITCCLLRRTAFCCNGEKS

SEQ ID NO: 1920 - protein, 140 aa, synthetic construct
IQNPDPAVYQLRDSKSSDKSVCLFTDFDSQTNVSQSKDSDVYITDKTVLDMRSMDFKSNSAVAWSNKSDFACANAFNNSIIMDPKDNCSKDANDTLLLQLTNTSAYYMYLLLLLKSVVYFAIITCCLLRRTAFCCNGEKS

SEQ ID NO: 1921 - protein, 148 aa, synthetic construct; identical to SEQ ID NO: 1919

SEQ ID NO: 1922 - protein, 134 aa, synthetic construct
IQNPDPAVYQLRDSKSSDKSVCLFTDFDSQTNVSQSKDSDVYITDKTVLDMRSMDFKSNSAVAWSNKSDFACANAFNNSIICSKDANDTLLLQLTNTSAYYMYLLLLLKSVVYFAIITCCLLRRTAFCCNGEKS

SEQ ID NO: 1923 - protein, 149 aa, synthetic construct
IQNPDPAVYQLRDSKSSDKSVCLFTDFDSQTNVSQSKDSDVYITDKTVLDMRSMDFKSNSAVAWSNKSDFACANAFNNSIIEVKTDSTDHVKPKETENTKQPSKSCHKPKAIVHTEKVNMMSLTVLGLRMLFAKTVAVNFLLTAKLFFL

SEQ ID NO: 1924 - protein, 142 aa, synthetic construct
IQNPDPAVYQLRDSKSSDKSVCLFTDFDSQTNVSQSKDSDVYITDKTVLDMRSMDFKSNSAVAWSNKSDFACANAFNNSIIDHVKPKETENTKQPSKSCHKPKAIVHTEKVNMMSLTVLGLRMLFAKTVAVNFLLTAKLFFL

SEQ ID NO: 1925 - protein, 147 aa, synthetic construct; identical to SEQ ID NO: 1905

SEQ ID NO: 1926 - protein, 145 aa, synthetic construct; identical to SEQ ID NO: 1906

SEQ ID NO: 1927 - protein, 155 aa, synthetic construct; identical to SEQ ID NO: 1907

SEQ ID NO: 1928 - protein, 163 aa, synthetic construct; identical to SEQ ID NO: 1908

SEQ ID NO: 1929 - protein, 161 aa, synthetic construct; identical to SEQ ID NO: 1909

SEQ ID NO: 1930 - protein, 153 aa, synthetic construct; identical to SEQ ID NO: 1910

SEQ ID NO: 1931 - protein, 161 aa, synthetic construct; identical to SEQ ID NO: 1909

SEQ ID NO: 1932 - protein, 147 aa, synthetic construct; identical to SEQ ID NO: 1912

SEQ ID NO: 1933 - protein, 162 aa, synthetic construct; identical to SEQ ID NO: 1913

SEQ ID NO: 1934 - protein, 155 aa, synthetic construct; identical to SEQ ID NO: 1914

SEQ ID NO: 1935 - protein, 132 aa, synthetic construct
KSSDKSVCLFTDFDSQTNVSQSKDSDVYITDKTVLDMRSMDFKSNSAVAWSNKSDFACANAFNNSIIPEDTFFPSPESSGRADCGFTSESYQQGVLSATILYEILLGKATLYAVLVSALVLMAMVKRKDSRG

SEQ ID NO: 1936 - protein, 130 aa, synthetic construct
KSSDKSVCLFTDFDSQTNVSQSKDSDVYITDKTVLDMRSMDFKSNSAVAWSNKSDFACANAFNNSIIPEDTFFPSPESSADCGFTSESYQQGVLSATILYEILLGKATLYAVLVSALVLMAMVKRKDSRG

SEQ ID NO: 1937 - protein, 140 aa, synthetic construct
KSSDKSVCLFTDFDSQTNVSQSKDSDVYITDKTVLDMRSMDFKSNSAVAWSNKSDFACANAFNNSIIPEDTFFPSPESSQIVSAEAWGRADCGFTSESYQQGVLSATILYEILLGKATLYAVLVSALVLMAMVKRKDSRG

SEQ ID NO: 1938 - protein, 148 aa, synthetic construct
KSSDKSVCLFTDFDSQTNVSQSKDSDVYITDKTVLDMRSMDFKSNSAVAWSNKSDFACANAFNNSIIPEDTFFPSPESSFPPIKTDVITMDPKDNCSKDANDTLLLQLTNTSAYYMYLLLLLKSVVYFAIITCCLLRRTAFCCNGEKS

SEQ ID NO: 1939 - protein, 146 aa, synthetic construct
KSSDKSVCLFTDFDSQTNVSQSKDSDVYITDKTVLDMRSMDFKSNSAVAWSNKSDFACANAFNNSIIPEDTFFPSPESSPIKTDVITMDPKDNCSKDANDTLLLQLTNTSAYYMYLLLLLKSVVYFAIITCCLLRRTAFCCNGEKS

SEQ ID NO: 1940 - protein, 138 aa, synthetic construct
KSSDKSVCLFTDFDSQTNVSQSKDSDVYITDKTVLDMRSMDFKSNSAVAWSNKSDFACANAFNNSIIPEDTFFPSPESSMDPKDNCSKDANDTLLLQLTNTSAYYMYLLLLLKSVVYFAIITCCLLRRTAFCCNGEKS

SEQ ID NO: 1941 - protein, 146 aa, synthetic construct; identical to SEQ ID NO: 1939

SEQ ID NO: 1942 - protein, 132 aa, synthetic construct
KSSDKSVCLFTDFDSQTNVSQSKDSDVYITDKTVLDMRSMDFKSNSAVAWSNKSDFACANAFNNSIIPEDTFFPSPESSCSKDANDTLLLQLTNTSAYYMYLLLLLKSVVYFAIITCCLLRRTAFCCNGEKS

SEQ ID NO: 1943 - protein, 147 aa, synthetic construct
KSSDKSVCLFTDFDSQTNVSQSKDSDVYITDKTVLDMRSMDFKSNSAVAWSNKSDFACANAFNNSIIPEDTFFPSPESSEVKTDSTDHVKPKETENTKQPSKSCHKPKAIVHTEKVNMMSLTVLGLRMLFAKTVAVNFLLTAKLFFL

SEQ ID NO: 1944 - protein, 140 aa, synthetic construct
KSSDKSVCLFTDFDSQTNVSQSKDSDVYITDKTVLDMRSMDFKSNSAVAWSNKSDFACANAFNNSIIPEDTFFPSPESSDHVKPKETENTKQPSKSCHKPKAIVHTEKVNMMSLTVLGLRMLFAKTVAVNFLLTAKLFFL

SEQ ID NO: 1945 - protein, 186 aa, synthetic construct
EDLKNVFPPEVAVFEPSEAEISHTQKATLVCLATGFYPDHVELSWWVNGKEVHSGVSTDPQPLKEQPALNDSRYCLSSRLRVSATFWQNPRNHFRCQVQFYGLSENDEWTQDRAKPVTQIVSAEAWIPEDTFFPSPESSCDVKLVEKSFETDTNLNFQNLSVIGFRILLLKVAGFNLLMTLRLWSS

SEQ ID NO: 1946 - protein, 176 aa, synthetic construct
EDLKNVFPPEVAVFEPSEAEISHTQKATLVCLATGFYPDHVELSWWVNGKEVHSGVSTDPQPLKEQPALNDSRYCLSSRLRVSATFWQNPRNHFRCQVQFYGLSENDEWTQDRAKPVTQIVSAEAWESSCDVKLVEKSFETDTNLNFQNLSVIGFRILLLKVAGFNLLMTLRLWSS

SEQ ID NO: 1947 - protein, 185 aa, synthetic construct
EDLKNVFPPEVAVFEPSEAEISHTQKATLVCLATGFYPDHVELSWWVNGKEVHSGVSTDPQPLKEQPALNDSRYCLSSRLRVSATFWQNPRNHFRCQVQFYGLSENDEWTQDRAKPVTQIVSAEAWPEDTFFPSPESSCDVKLVEKSFETDTNLNFQNLSVIGFRILLLKVAGFNLLMTLRLWSS

SEQ ID NO: 1948 - protein, 195 aa, synthetic construct
EDLKNVFPPEVAVFEPSEAEISHTQKATLVCLATGFYPDHVELSWWVNGKEVHSGVSTDPQPLKEQPALNDSRYCLSSRLRVSATFWQNPRNHFRCQVQFYGLSENDEWTQDRAKPVTQIVSAEAWFPPIKTDVITMDPKDNCSKDANDTLLLQLTNTSAYYMYLLLLLKSVVYFAIITCCLLRRTAFCCNGEKS

SEQ ID NO: 1949 - protein, 193 aa, synthetic construct
EDLKNVFPPEVAVFEPSEAEISHTQKATLVCLATGFYPDHVELSWWVNGKEVHSGVSTDPQPLKEQPALNDSRYCLSSRLRVSATFWQNPRNHFRCQVQFYGLSENDEWTQDRAKPVTQIVSAEAWPIKTDVITMDPKDNCSKDANDTLLLQLTNTSAYYMYLLLLLKSVVYFAIITCCLLRRTAFCCNGEKS

SEQ ID NO: 1950 - protein, 185 aa, synthetic construct
EDLKNVFPPEVAVFEPSEAEISHTQKATLVCLATGFYPDHVELSWWVNGKEVHSGVSTDPQPLKEQPALNDSRYCLSSRLRVSATFWQNPRNHFRCQVQFYGLSENDEWTQDRAKPVTQIVSAEAWMDPKDNCSKDANDTLLLQLTNTSAYYMYLLLLLKSVVYFAIITCCLLRRTAFCCNGEKS

SEQ ID NO: 1951 - protein, 193 aa, synthetic construct; identical to SEQ ID NO: 1949

SEQ ID NO: 1952 - protein, 179 aa, synthetic construct
EDLKNVFPPEVAVFEPSEAEISHTQKATLVCLATGFYPDHVELSWWVNGKEVHSGVSTDPQPLKEQPALNDSRYCLSSRLRVSATFWQNPRNHFRCQVQFYGLSENDEWTQDRAKPVTQIVSAEAWCSKDANDTLLLQLTNTSAYYMYLLLLLKSVVYFAIITCCLLRRTAFCCNGEKS

SEQ ID NO: 1953 - protein, 194 aa, synthetic construct
EDLKNVFPPEVAVFEPSEAEISHTQKATLVCLATGFYPDHVELSWWVNGKEVHSGVSTDPQPLKEQPALNDSRYCLSSRLRVSATFWQNPRNHFRCQVQFYGLSENDEWTQDRAKPVTQIVSAEAWEVKTDSTDHVKPKETENTKQPSKSCHKPKAIVHTEKVNMMSLTVLGLRMLFAKTVAVNFLLTAKLFFL

SEQ ID NO: 1954 - protein, 187 aa, synthetic construct
EDLKNVFPPEVAVFEPSEAEISHTQKATLVCLATGFYPDHVELSWWVNGKEVHSGVSTDPQPLKEQPALNDSRYCLSSRLRVSATFWQNPRNHFRCQVQFYGLSENDEWTQDRAKPVTQIVSAEAWDHVKPKETENTKQPSKSCHKPKAIVHTEKVNMMSLTVLGLRMLFAKTVAVNFLLTAKLFFL

SEQ ID NO: 1955 - protein, 188 aa, synthetic construct
EDLKNVFPPEVAVFEPSEAEISHTQKATLVCLATGFYPDHVELSWWVNGKEVHSGVSTDPQPLKEQPALNDSRYCLSSRLRVSATFWQNPRNHFRCQVQFYGLSENDEWTQDRAKPVTQIVSAEAWGRIPEDTFFPSPESSCDVKLVEKSFETDTNLNFQNLSVIGFRILLLKVAGFNLLMTLRLWSS

SEQ ID NO: 1956 - protein, 178 aa, synthetic construct
EDLKNVFPPEVAVFEPSEAEISHTQKATLVCLATGFYPDHVELSWWVNGKEVHSGVSTDPQPLKEQPALNDSRYCLSSRLRVSATFWQNPRNHFRCQVQFYGLSENDEWTQDRAKPVTQIVSAEAWGRESSCDVKLVEKSFETDTNLNFQNLSVIGFRILLLKVAGFNLLMTLRLWSS

SEQ ID NO: 1957 - protein, 187 aa, synthetic construct
EDLKNVFPPEVAVFEPSEAEISHTQKATLVCLATGFYPDHVELSWWVNGKEVHSGVSTDPQPLKEQPALNDSRYCLSSRLRVSATFWQNPRNHFRCQVQFYGLSENDEWTQDRAKPVTQIVSAEAWGRPEDTFFPSPESSCDVKLVEKSFETDTNLNFQNLSVIGFRILLLKVAGFNLLMTLRLWSS

SEQ ID NO: 1958 - protein, 197 aa, synthetic construct
EDLKNVFPPEVAVFEPSEAEISHTQKATLVCLATGFYPDHVELSWWVNGKEVHSGVSTDPQPLKEQPALNDSRYCLSSRLRVSATFWQNPRNHFRCQVQFYGLSENDEWTQDRAKPVTQIVSAEAWGRFPPIKTDVITMDPKDNCSKDANDTLLLQLTNTSAYYMYLLLLLKSVVYFAIITCCLLRRTAFCCNGEKS

SEQ ID NO: 1959 - protein, 195 aa, synthetic construct
EDLKNVFPPEVAVFEPSEAEISHTQKATLVCLATGFYPDHVELSWWVNGKEVHSGVSTDPQPLKEQPALNDSRYCLSSRLRVSATFWQNPRNHFRCQVQFYGLSENDEWTQDRAKPVTQIVSAEAWGRPIKTDVITMDPKDNCSKDANDTLLLQLTNTSAYYMYLLLLLKSVVYFAIITCCLLRRTAFCCNGEKS

SEQ ID NO: 1960 - protein, 187 aa, synthetic construct
EDLKNVFPPEVAVFEPSEAEISHTQKATLVCLATGFYPDHVELSWWVNGKEVHSGVSTDPQPLKEQPALNDSRYCLSSRLRVSATFWQNPRNHFRCQVQFYGLSENDEWTQDRAKPVTQIVSAEAWGRMDPKDNCSKDANDTLLLQLTNTSAYYMYLLLLLKSVVYFAIITCCLLRRTAFCCNGEKS

SEQ ID NO: 1961 - protein, 195 aa, synthetic construct; identical to SEQ ID NO: 1959

SEQ ID NO: 1962 - protein, 181 aa, synthetic construct
EDLKNVFPPEVAVFEPSEAEISHTQKATLVCLATGFYPDHVELSWWVNGKEVHSGVSTDPQPLKEQPALNDSRYCLSSRLRVSATFWQNPRNHFRCQVQFYGLSENDEWTQDRAKPVTQIVSAEAWGRCSKDANDTLLLQLTNTSAYYMYLLLLLKSVVYFAIITCCLLRRTAFCCNGEKS

SEQ ID NO: 1963 - protein, 196 aa, synthetic construct
EDLKNVFPPEVAVFEPSEAEISHTQKATLVCLATGFYPDHVELSWWVNGKEVHSGVSTDPQPLKEQPALNDSRYCLSSRLRVSATFWQNPRNHFRCQVQFYGLSENDEWTQDRAKPVTQIVSAEAWGREVKTDSTDHVKPKETENTKQPSKSCHKPKAIVHTEKVNMMSLTVLGLRMLFAKTVAVNFLLTAKLFFL

SEQ ID NO: 1964 - protein, 189 aa, synthetic construct
EDLKNVFPPEVAVFEPSEAEISHTQKATLVCLATGFYPDHVELSWWVNGKEVHSGVSTDPQPLKEQPALNDSRYCLSSRLRVSATFWQNPRNHFRCQVQFYGLSENDEWTQDRAKPVTQIVSAEAWGRDHVKPKETENTKQPSKSCHKPKAIVHTEKVNMMSLTVLGLRMLFAKTVAVNFLLTAKLFFL

SEQ ID NO: 1965 - protein, 191 aa, synthetic construct
EDLKNVFPPEVAVFEPSEAEISHTQKATLVCLATGFYPDHVELSWWVNGKEVHSGVSTDPQPLKEQPALNDSRYCLSSRLRVSATFWQNPRNHFRCQVQFYGLSENDEWTQDRAKPVTQIVSAEAWGRADCIPEDTFFPSPESSCDVKLVEKSFETDTNLNFQNLSVIGFRILLLKVAGFNLLMTLRLWSS

SEQ ID NO: 1966 - protein, 181 aa, synthetic construct
EDLKNVFPPEVAVFEPSEAEISHTQKATLVCLATGFYPDHVELSWWVNGKEVHSGVSTDPQPLKEQPALNDSRYCLSSRLRVSATFWQNPRNHFRCQVQFYGLSENDEWTQDRAKPVTQIVSAEAWGRADCESSCDVKLVEKSFETDTNLNFQNLSVIGFRILLLKVAGFNLLMTLRLWSS

SEQ ID NO: 1967 - protein, 190 aa, synthetic construct
EDLKNVFPPEVAVFEPSEAEISHTQKATLVCLATGFYPDHVELSWWVNGKEVHSGVSTDPQPLKEQPALNDSRYCLSSRLRVSATFWQNPRNHFRCQVQFYGLSENDEWTQDRAKPVTQIVSAEAWGRADCPEDTFFPSPESSCDVKLVEKSFETDTNLNFQNLSVIGFRILLLKVAGFNLLMTLRLWSS

SEQ ID NO: 1968 - protein, 200 aa, synthetic construct
EDLKNVFPPEVAVFEPSEAEISHTQKATLVCLATGFYPDHVELSWWVNGKEVHSGVSTDPQPLKEQPALNDSRYCLSSRLRVSATFWQNPRNHFRCQVQFYGLSENDEWTQDRAKPVTQIVSAEAWGRADCFPPIKTDVITMDPKDNCSKDANDTLLLQLTNTSAYYMYLLLLLKSVVYFAIITCCLLRRTAFCCNGEKS

SEQ ID NO: 1969 - protein, 198 aa, synthetic construct
EDLKNVFPPEVAVFEPSEAEISHTQKATLVCLATGFYPDHVELSWWVNGKEVHSGVSTDPQPLKEQPALNDSRYCLSSRLRVSATFWQNPRNHFRCQVQFYGLSENDEWTQDRAKPVTQIVSAEAWGRADCPIKTDVITMDPKDNCSKDANDTLLLQLTNTSAYYMYLLLLLKSVVYFAIITCCLLRRTAFCCNGEKS

SEQ ID NO: 1970 - protein, 190 aa, synthetic construct
EDLKNVFPPEVAVFEPSEAEISHTQKATLVCLATGFYPDHVELSWWVNGKEVHSGVSTDPQPLKEQPALNDSRYCLSSRLRVSATFWQNPRNHFRCQVQFYGLSENDEWTQDRAKPVTQIVSAEAWGRADCMDPKDNCSKDANDTLLLQLTNTSAYYMYLLLLLKSVVYFAIITCCLLRRTAFCCNGEKS

SEQ ID NO: 1971 - protein, 198 aa, synthetic construct; identical to SEQ ID NO: 1969

SEQ ID NO: 1972 - protein, 184 aa, synthetic construct
EDLKNVFPPEVAVFEPSEAEISHTQKATLVCLATGFYPDHVELSWWVNGKEVHSGVSTDPQPLKEQPALNDSRYCLSSRLRVSATFWQNPRNHFRCQVQFYGLSENDEWTQDRAKPVTQIVSAEAWGRADCCSKDANDTLLLQLTNTSAYYMYLLLLLKSVVYFAIITCCLLRRTAFCCNGEKS

SEQ ID NO: 1973 - protein, 199 aa, synthetic construct
EDLKNVFPPEVAVFEPSEAEISHTQKATLVCLATGFYPDHVELSWWVNGKEVHSGVSTDPQPLKEQPALNDSRYCLSSRLRVSATFWQNPRNHFRCQVQFYGLSENDEWTQDRAKPVTQIVSAEAWGRADCEVKTDSTDHVKPKETENTKQPSKSCHKPKAIVHTEKVNMMSLTVLGLRMLFAKTVAVNFLLTAKLFFL

SEQ ID NO: 1974 - protein, 192 aa, synthetic construct
EDLKNVFPPEVAVFEPSEAEISHTQKATLVCLATGFYPDHVELSWWVNGKEVHSGVSTDPQPLKEQPALNDSRYCLSSRLRVSATFWQNPRNHFRCQVQFYGLSENDEWTQDRAKPVTQIVSAEAWGRADCDHVKPKETENTKQPSKSCHKPKAIVHTEKVNMMSLTVLGLRMLFAKTVAVNFLLTAKLFFL

SEQ ID NO: 1975 - protein, 178 aa, synthetic construct
EDLKNVFPPEVAVFEPSEAEISHTQKATLVCLATGFYPDHVELSWWVNGKEVHSGVSTDPQPLKEQPALNDSRYCLSSRLRVSATFWQNPRNHFRCQVQFYGLSENDEWTQDRAKPVTIPEDTFFPSPESSCDVKLVEKSFETDTNLNFQNLSVIGFRILLLKVAGFNLLMTLRLWSS

SEQ ID NO: 1976 - protein, 168 aa, synthetic construct
EDLKNVFPPEVAVFEPSEAEISHTQKATLVCLATGFYPDHVELSWWVNGKEVHSGVSTDPQPLKEQPALNDSRYCLSSRLRVSATFWQNPRNHFRCQVQFYGLSENDEWTQDRAKPVTESSCDVKLVEKSFETDTNLNFQNLSVIGFRILLLKVAGFNLLMTLRLWSS

SEQ ID NO: 1977 - protein, 177 aa, synthetic construct
EDLKNVFPPEVAVFEPSEAEISHTQKATLVCLATGFYPDHVELSWWVNGKEVHSGVSTDPQPLKEQPALNDSRYCLSSRLRVSATFWQNPRNHFRCQVQFYGLSENDEWTQDRAKPVTPEDTFFPSPESSCDVKLVEKSFETDTNLNFQNLSVIGFRILLLKVAGFNLLMTLRLWSS

SEQ ID NO: 1978 - protein, 187 aa, synthetic construct
EDLKNVFPPEVAVFEPSEAEISHTQKATLVCLATGFYPDHVELSWWVNGKEVHSGVSTDPQPLKEQPALNDSRYCLSSRLRVSATFWQNPRNHFRCQVQFYGLSENDEWTQDRAKPVTFPPIKTDVITMDPKDNCSKDANDTLLLQLTNTSAYYMYLLLLLKSVVYFAIITCCLLRRTAFCCNGEKS

SEQ ID NO: 1979 - protein, 185 aa, synthetic construct
EDLKNVFPPEVAVFEPSEAEISHTQKATLVCLATGFYPDHVELSWWVNGKEVHSGVSTDPQPLKEQPALNDSRYCLSSRLRVSATFWQNPRNHFRCQVQFYGLSENDEWTQDRAKPVTPIKTDVITMDPKDNCSKDANDTLLLQLTNTSAYYMYLLLLLKSVVYFAIITCCLLRRTAFCCNGEKS

SEQ ID NO: 1980 - protein, 177 aa, synthetic construct
EDLKNVFPPEVAVFEPSEAEISHTQKATLVCLATGFYPDHVELSWWVNGKEVHSGVSTDPQPLKEQPALNDSRYCLSSRLRVSATFWQNPRNHFRCQVQFYGLSENDEWTQDRAKPVTMDPKDNCSKDANDTLLLQLTNTSAYYMYLLLLLKSVVYFAIITCCLLRRTAFCCNGEKS

SEQ ID NO: 1981 - protein, 185 aa, synthetic construct; identical to SEQ ID NO: 1979

SEQ ID NO: 1982 - protein, 171 aa, synthetic construct
EDLKNVFPPEVAVFEPSEAEISHTQKATLVCLATGFYPDHVELSWWVNGKEVHSGVSTDPQPLKEQPALNDSRYCLSSRLRVSATFWQNPRNHFRCQVQFYGLSENDEWTQDRAKPVTCSKDANDTLLLQLTNTSAYYMYLLLLLKSVVYFAIITCCLLRRTAFCCNGEKS

SEQ ID NO: 1983 - protein, 186 aa, synthetic construct
EDLKNVFPPEVAVFEPSEAEISHTQKATLVCLATGFYPDHVELSWWVNGKEVHSGVSTDPQPLKEQPALNDSRYCLSSRLRVSATFWQNPRNHFRCQVQFYGLSENDEWTQDRAKPVTEVKTDSTDHVKPKETENTKQPSKSCHKPKAIVHTEKVNMMSLTVLGLRMLFAKTVAVNFLLTAKLFFL

SEQ ID NO: 1984 - protein, 179 aa, synthetic construct
EDLKNVFPPEVAVFEPSEAEISHTQKATLVCLATGFYPDHVELSWWVNGKEVHSGVSTDPQPLKEQPALNDSRYCLSSRLRVSATFWQNPRNHFRCQVQFYGLSENDEWTQDRAKPVTDHVKPKETENTKQPSKSCHKPKAIVHTEKVNMMSLTVLGLRMLFAKTVAVNFLLTAKLFFL

SEQ ID NO: 1985 - protein, 186 aa, synthetic construct; identical to SEQ ID NO: 1945

SEQ ID NO: 1986 - protein, 176 aa, synthetic construct; identical to SEQ ID NO: 1946

SEQ ID NO: 1987 - protein, 185 aa, synthetic construct; identical to SEQ ID NO: 1947

SEQ ID NO: 1988 - protein, 195 aa, synthetic construct; identical to SEQ ID NO: 1948

SEQ ID NO: 1989 - protein, 193 aa, synthetic construct; identical to SEQ ID NO: 1949

SEQ ID NO: 1990 - protein, 185 aa, synthetic construct; identical to SEQ ID NO: 1950

SEQ ID NO: 1991 - protein, 193 aa, synthetic construct; identical to SEQ ID NO: 1949

SEQ ID NO: 1992 - protein, 179 aa, synthetic construct; identical to SEQ ID NO: 1952

SEQ ID NO: 1993 - protein, 194 aa, synthetic construct; identical to SEQ ID NO: 1953

SEQ ID NO: 1994 - protein, 187 aa, synthetic construct; identical to SEQ ID NO: 1954

SEQ ID NO: 1995 - protein, 170 aa, synthetic construct
PEVAVFEPSEAEISHTQKATLVCLATGFYPDHVELSWWVNGKEVHSGVSTDPQPLKEQPALNDSRYCLSSRLRVSATFWQNPRNHFRCQVQFYGLSENDEWTQDRAKPVTIPEDTFFPSPESSCDVKLVEKSFETDTNLNFQNLSVIGFRILLLKVAGFNLLMTLRLWSS

SEQ ID NO: 1996 - protein, 160 aa, synthetic construct
PEVAVFEPSEAEISHTQKATLVCLATGFYPDHVELSWWVNGKEVHSGVSTDPQPLKEQPALNDSRYCLSSRLRVSATFWQNPRNHFRCQVQFYGLSENDEWTQDRAKPVTESSCDVKLVEKSFETDTNLNFQNLSVIGFRILLLKVAGFNLLMTLRLWSS

SEQ ID NO: 1997 - protein, 169 aa, synthetic construct
PEVAVFEPSEAEISHTQKATLVCLATGFYPDHVELSWWVNGKEVHSGVSTDPQPLKEQPALNDSRYCLSSRLRVSATFWQNPRNHFRCQVQFYGLSENDEWTQDRAKPVTPEDTFFPSPESSCDVKLVEKSFETDTNLNFQNLSVIGFRILLLKVAGFNLLMTLRLWSS

SEQ ID NO: 1998 - protein, 179 aa, synthetic construct
PEVAVFEPSEAEISHTQKATLVCLATGFYPDHVELSWWVNGKEVHSGVSTDPQPLKEQPALNDSRYCLSSRLRVSATFWQNPRNHFRCQVQFYGLSENDEWTQDRAKPVTFPPIKTDVITMDPKDNCSKDANDTLLLQLTNTSAYYMYLLLLLKSVVYFAIITCCLLRRTAFCCNGEKS

SEQ ID NO: 1999 - protein, 177 aa, synthetic construct
PEVAVFEPSEAEISHTQKATLVCLATGFYPDHVELSWWVNGKEVHSGVSTDPQPLKEQPALNDSRYCLSSRLRVSATFWQNPRNHFRCQVQFYGLSENDEWTQDRAKPVTPIKTDVITMDPKDNCSKDANDTLLLQLTNTSAYYMYLLLLLKSVVYFAIITCCLLRRTAFCCNGEKS

SEQ ID NO: 2000 - protein, 169 aa, synthetic construct
PEVAVFEPSEAEISHTQKATLVCLATGFYPDHVELSWWVNGKEVHSGVSTDPQPLKEQPALNDSRYCLSSRLRVSATFWQNPRNHFRCQVQFYGLSENDEWTQDRAKPVTMDPKDNCSKDANDTLLLQLTNTSAYYMYLLLLLKSVVYFAIITCCLLRRTAFCCNGEKS

SEQ ID NO: 2001 - protein, 177 aa, synthetic construct; identical to SEQ ID NO: 1999

SEQ ID NO: 2002 - protein, 163 aa, synthetic construct
PEVAVFEPSEAEISHTQKATLVCLATGFYPDHVELSWWVNGKEVHSGVSTDPQPLKEQPALNDSRYCLSSRLRVSATFWQNPRNHFRCQVQFYGLSENDEWTQDRAKPVTCSKDANDTLLLQLTNTSAYYMYLLLLLKSVVYFAIITCCLLRRTAFCCNGEKS

SEQ ID NO: 2003 - protein, 178 aa, synthetic construct
PEVAVFEPSEAEISHTQKATLVCLATGFYPDHVELSWWVNGKEVHSGVSTDPQPLKEQPALNDSRYCLSSRLRVSATFWQNPRNHFRCQVQFYGLSENDEWTQDRAKPVTEVKTDSTDHVKPKETENTKQPSKSCHKPKAIVHTEKVNMMSLTVLGLRMLFAKTVAVNFLLTAKLFFL

SEQ ID NO: 2004 - protein, 171 aa, synthetic construct
PEVAVFEPSEAEISHTQKATLVCLATGFYPDHVELSWWVNGKEVHSGVSTDPQPLKEQPALNDSRYCLSSRLRVSATFWQNPRNHFRCQVQFYGLSENDEWTQDRAKPVTDHVKPKETENTKQPSKSCHKPKAIVHTEKVNMMSLTVLGLRMLFAKTVAVNFLLTAKLFFL

SEQ ID NO: 2005 - protein, 164 aa, synthetic construct
DKQLDADVSPKPTIFLPSIAETKLQKAGTYLCLLEKFFPDVIKIHWQEKKSNTILGSQEGNTMKTNDTYMKFSWLTVPEKSLDKEHRCIVRHENNKNGVDQEIIIPEDTFFPSPESSCDVKLVEKSFETDTNLNFQNLSVIGFRILLLKVAGFNLLMTLRLWSS

SEQ ID NO: 2006 - protein, 154 aa, synthetic construct
DKQLDADVSPKPTIFLPSIAETKLQKAGTYLCLLEKFFPDVIKIHWQEKKSNTILGSQEGNTMKTNDTYMKFSWLTVPEKSLDKEHRCIVRHENNKNGVDQEIIESSCDVKLVEKSFETDTNLNFQNLSVIGFRILLLKVAGFNLLMTLRLWSS

SEQ ID NO: 2007 - protein, 163 aa, synthetic construct
DKQLDADVSPKPTIFLPSIAETKLQKAGTYLCLLEKFFPDVIKIHWQEKKSNTILGSQEGNTMKTNDTYMKFSWLTVPEKSLDKEHRCIVRHENNKNGVDQEIIPEDTFFPSPESSCDVKLVEKSFETDTNLNFQNLSVIGFRILLLKVAGFNLLMTLRLWSS

SEQ ID NO: 2008 - protein, 157 aa, synthetic construct
DKQLDADVSPKPTIFLPSIAETKLQKAGTYLCLLEKFFPDVIKIHWQEKKSNTILGSQEGNTMKTNDTYMKFSWLTVPEKSLDKEHRCIVRHENNKNGVDQEIIGRADCGFTSESYQQGVLSATILYEILLGKATLYAVLVSALVLMAMVKRKDSRG

SEQ ID NO: 2009 - protein, 155 aa, synthetic construct
DKQLDADVSPKPTIFLPSIAETKLQKAGTYLCLLEKFFPDVIKIHWQEKKSNTILGSQEGNTMKTNDTYMKFSWLTVPEKSLDKEHRCIVRHENNKNGVDQEIIADCGFTSESYQQGVLSATILYEILLGKATLYAVLVSALVLMAMVKRKDSRG

SEQ ID NO: 2010 - protein, 165 aa, synthetic construct
DKQLDADVSPKPTIFLPSIAETKLQKAGTYLCLLEKFFPDVIKIHWQEKKSNTILGSQEGNTMKTNDTYMKFSWLTVPEKSLDKEHRCIVRHENNKNGVDQEIIQIVSAEAWGRADCGFTSESYQQGVLSATILYEILLGKATLYAVLVSALVLMAMVKRKDSRG

SEQ ID NO: 2011 - protein, 172 aa, synthetic construct
DKQLDADVSPKPTIFLPSIAETKLQKAGTYLCLLEKFFPDVIKIHWQEKKSNTILGSQEGNTMKTNDTYMKFSWLTVPEKSLDKEHRCIVRHENNKNGVDQEIIEVKTDSTDHVKPKETENTKQPSKSCHKPKAIVHTEKVNMMSLTVLGLRMLFAKTVAVNFLLTAKLFFL

SEQ ID NO: 2012 - protein, 165 aa, synthetic construct
DKQLDADVSPKPTIFLPSIAETKLQKAGTYLCLLEKFFPDVIKIHWQEKKSNTILGSQEGNTMKTNDTYMKFSWLTVPEKSLDKEHRCIVRHENNKNGVDQEIIDHVKPKETENTKQPSKSCHKPKAIVHTEKVNMMSLTVLGLRMLFAKTVAVNFLLTAKLFFL

SEQ ID NO: 2013 - protein, 166 aa, synthetic construct
DKQLDADVSPKPTIFLPSIAETKLQKAGTYLCLLEKFFPDVIKIHWQEKKSNTILGSQEGNTMKTNDTYMKFSWLTVPEKSLDKEHRCIVRHENNKNGVDQEIIFPIPEDTFFPSPESSCDVKLVEKSFETDTNLNFQNLSVIGFRILLLKVAGFNLLMTLRLWSS

SEQ ID NO: 2014 - protein, 156 aa, synthetic construct
DKQLDADVSPKPTIFLPSIAETKLQKAGTYLCLLEKFFPDVIKIHWQEKKSNTILGSQEGNTMKTNDTYMKFSWLTVPEKSLDKEHRCIVRHENNKNGVDQEIIFPESSCDVKLVEKSFETDTNLNFQNLSVIGFRILLLKVAGFNLLMTLRLWSS

SEQ ID NO: 2015 - protein, 165 aa, synthetic construct
DKQLDADVSPKPTIFLPSIAETKLQKAGTYLCLLEKFFPDVIKIHWQEKKSNTILGSQEGNTMKTNDTYMKFSWLTVPEKSLDKEHRCIVRHENNKNGVDQEIIFPPEDTFFPSPESSCDVKLVEKSFETDTNLNFQNLSVIGFRILLLKVAGFNLLMTLRLWSS

SEQ ID NO: 2016 - protein, 159 aa, synthetic construct
DKQLDADVSPKPTIFLPSIAETKLQKAGTYLCLLEKFFPDVIKIHWQEKKSNTILGSQEGNTMKTNDTYMKFSWLTVPEKSLDKEHRCIVRHENNKNGVDQEIIFPGRADCGFTSESYQQGVLSATILYEILLGKATLYAVLVSALVLMAMVKRKDSRG

SEQ ID NO: 2017 - protein, 157 aa, synthetic construct
DKQLDADVSPKPTIFLPSIAETKLQKAGTYLCLLEKFFPDVIKIHWQEKKSNTILGSQEGNTMKTNDTYMKFSWLTVPEKSLDKEHRCIVRHENNKNGVDQEIIFPADCGFTSESYQQGVLSATILYEILLGKATLYAVLVSALVLMAMVKRKDSRG

SEQ ID NO: 2018 - protein, 167 aa, synthetic construct
DKQLDADVSPKPTIFLPSIAETKLQKAGTYLCLLEKFFPDVIKIHWQEKKSNTILGSQEGNTMKTNDTYMKFSWLTVPEKSLDKEHRCIVRHENNKNGVDQEIIFPQIVSAEAWGRADCGFTSESYQQGVLSATILYEILLGKATLYAVLVSALVLMAMVKRKDSRG

SEQ ID NO: 2019 - protein, 174 aa, synthetic construct
DKQLDADVSPKPTIFLPSIAETKLQKAGTYLCLLEKFFPDVIKIHWQEKKSNTILGSQEGNTMKTNDTYMKFSWLTVPEKSLDKEHRCIVRHENNKNGVDQEIIFPEVKTDSTDHVKPKETENTKQPSKSCHKPKAIVHTEKVNMMSLTVLGLRMLFAKTVAVNFLLTAKLFFL

SEQ ID NO: 2020 - protein, 167 aa, synthetic construct
DKQLDADVSPKPTIFLPSIAETKLQKAGTYLCLLEKFFPDVIKIHWQEKKSNTILGSQEGNTMKTNDTYMKFSWLTVPEKSLDKEHRCIVRHENNKNGVDQEIIFPDHVKPKETENTKQPSKSCHKPKAIVHTEKVNMMSLTVLGLRMLFAKTVAVNFLLTAKLFFL

SEQ ID NO: 2021 - protein, 174 aa, synthetic construct
DKQLDADVSPKPTIFLPSIAETKLQKAGTYLCLLEKFFPDVIKIHWQEKKSNTILGSQEGNTMKTNDTYMKFSWLTVPEKSLDKEHRCIVRHENNKNGVDQEIIFPPIKTDVITIPEDTFFPSPESSCDVKLVEKSFETDTNLNFQNLSVIGFRILLLKVAGFNLLMTLRLWSS

SEQ ID NO: 2022 - protein, 164 aa, synthetic construct
DKQLDADVSPKPTIFLPSIAETKLQKAGTYLCLLEKFFPDVIKIHWQEKKSNTILGSQEGNTMKTNDTYMKFSWLTVPEKSLDKEHRCIVRHENNKNGVDQEIIFPPIKTDVITESSCDVKLVEKSFETDTNLNFQNLSVIGFRILLLKVAGFNLLMTLRLWSS

SEQ ID NO: 2023 - protein, 173 aa, synthetic construct
DKQLDADVSPKPTIFLPSIAETKLQKAGTYLCLLEKFFPDVIKIHWQEKKSNTILGSQEGNTMKTNDTYMKFSWLTVPEKSLDKEHRCIVRHENNKNGVDQEIIFPPIKTDVITPEDTFFPSPESSCDVKLVEKSFETDTNLNFQNLSVIGFRILLLKVAGFNLLMTLRLWSS

SEQ ID NO: 2024 - protein, 167 aa, synthetic construct
DKQLDADVSPKPTIFLPSIAETKLQKAGTYLCLLEKFFPDVIKIHWQEKKSNTILGSQEGNTMKTNDTYMKFSWLTVPEKSLDKEHRCIVRHENNKNGVDQEIIFPPIKTDVITGRADCGFTSESYQQGVLSATILYEILLGKATLYAVLVSALVLMAMVKRKDSRG

SEQ ID NO: 2025 - protein, 165 aa, synthetic construct
DKQLDADVSPKPTIFLPSIAETKLQKAGTYLCLLEKFFPDVIKIHWQEKKSNTILGSQEGNTMKTNDTYMKFSWLTVPEKSLDKEHRCIVRHENNKNGVDQEIIFPPIKTDVITADCGFTSESYQQGVLSATILYEILLGKATLYAVLVSALVLMAMVKRKDSRG

SEQ ID NO: 2026 - protein, 175 aa, synthetic construct
DKQLDADVSPKPTIFLPSIAETKLQKAGTYLCLLEKFFPDVIKIHWQEKKSNTILGSQEGNTMKTNDTYMKFSWLTVPEKSLDKEHRCIVRHENNKNGVDQEIIFPPIKTDVITQIVSAEAWGRADCGFTSESYQQGVLSATILYEILLGKATLYAVLVSALVLMAMVKRKDSRG

SEQ ID NO: 2027 - protein, 182 aa, synthetic construct
DKQLDADVSPKPTIFLPSIAETKLQKAGTYLCLLEKFFPDVIKIHWQEKKSNTILGSQEGNTMKTNDTYMKFSWLTVPEKSLDKEHRCIVRHENNKNGVDQEIIFPPIKTDVITEVKTDSTDHVKPKETENTKQPSKSCHKPKAIVHTEKVNMMSLTVLGLRMLFAKTVAVNFLLTAKLFFL

SEQ ID NO: 2028 - protein, 175 aa, synthetic construct
DKQLDADVSPKPTIFLPSIAETKLQKAGTYLCLLEKFFPDVIKIHWQEKKSNTILGSQEGNTMKTNDTYMKFSWLTVPEKSLDKEHRCIVRHENNKNGVDQEIIFPPIKTDVITDHVKPKETENTKQPSKSCHKPKAIVHTEKVNMMSLTVLGLRMLFAKTVAVNFLLTAKLFFL

SEQ ID NO: 2029 - protein, 127 aa, synthetic construct
PIKTDVITMDPKDNCSKDANDTLLLQLTNTSAYYMYLLLLLKSVVYFAIITCCLLRRTAFCCNGEKSIPEDTFFPSPESSCDVKLVEKSFETDTNLNFQNLSVIGFRILLLKVAGFNLLMTLRLWSS

SEQ ID NO: 2030 - protein, 117 aa, synthetic construct
PIKTDVITMDPKDNCSKDANDTLLLQLTNTSAYYMYLLLLLKSVVYFAIITCCLLRRTAFCCNGEKSESSCDVKLVEKSFETDTNLNFQNLSVIGFRILLLKVAGFNLLMTLRLWSS

SEQ ID NO: 2031 - protein, 126 aa, synthetic construct
PIKTDVITMDPKDNCSKDANDTLLLQLTNTSAYYMYLLLLLKSVVYFAIITCCLLRRTAFCCNGEKSPEDTFFPSPESSCDVKLVEKSFETDTNLNFQNLSVIGFRILLLKVAGFNLLMTLRLWSS

SEQ ID NO: 2032 - protein, 120 aa, synthetic construct
PIKTDVITMDPKDNCSKDANDTLLLQLTNTSAYYMYLLLLLKSVVYFAIITCCLLRRTAFCCNGEKSGRADCGFTSESYQQGVLSATILYEILLGKATLYAVLVSALVLMAMVKRKDSRG

SEQ ID NO: 2033 - protein, 118 aa, synthetic construct
PIKTDVITMDPKDNCSKDANDTLLLQLTNTSAYYMYLLLLLKSVVYFAIITCCLLRRTAFCCNGEKSADCGFTSESYQQGVLSATILYEILLGKATLYAVLVSALVLMAMVKRKDSRG

SEQ ID NO: 2034 - protein, 128 aa, synthetic construct
PIKTDVITMDPKDNCSKDANDTLLLQLTNTSAYYMYLLLLLKSVVYFAIITCCLLRRTAFCCNGEKSQIVSAEAWGRADCGFTSESYQQGVLSATILYEILLGKATLYAVLVSALVLMAMVKRKDSRG

SEQ ID NO: 2035 - protein, 135 aa, synthetic construct
PIKTDVITMDPKDNCSKDANDTLLLQLTNTSAYYMYLLLLLKSVVYFAIITCCLLRRTAFCCNGEKSEVKTDSTDHVKPKETENTKQPSKSCHKPKAIVHTEKVNMMSLTVLGLRMLFAKTVAVNFLLTAKLFFL

SEQ ID NO: 2036 - protein, 128 aa, synthetic construct
PIKTDVITMDPKDNCSKDANDTLLLQLTNTSAYYMYLLLLLKSVVYFAIITCCLLRRTAFCCNGEKSDHVKPKETENTKQPSKSCHKPKAIVHTEKVNMMSLTVLGLRMLFAKTVAVNFLLTAKLFFL

SEQ ID NO: 2037 - protein, 179 aa, synthetic construct
DKQLDADVSPKPTIFLPSIAETKLQKAGTYLCLLEKFFPDVIKIHWQEKKSNTILGSQEGNTMKTNDTYMKFSWLTVPEKSLDKEHRCIVRHENNKNGVDQEIIFPPIKTDVITMDPKDIPEDTFFPSPESSCDVKLVEKSFETDTNLNFQNLSVIGFRILLLKVAGFNLLMTLRLWSS

SEQ ID NO: 2038 - protein, 169 aa, synthetic construct
DKQLDADVSPKPTIFLPSIAETKLQKAGTYLCLLEKFFPDVIKIHWQEKKSNTILGSQEGNTMKTNDTYMKFSWLTVPEKSLDKEHRCIVRHENNKNGVDQEIIFPPIKTDVITMDPKDESSCDVKLVEKSFETDTNLNFQNLSVIGFRILLLKVAGFNLLMTLRLWSS

SEQ ID NO: 2039 - protein, 178 aa, synthetic construct
DKQLDADVSPKPTIFLPSIAETKLQKAGTYLCLLEKFFPDVIKIHWQEKKSNTILGSQEGNTMKTNDTYMKFSWLTVPEKSLDKEHRCIVRHENNKNGVDQEIIFPPIKTDVITMDPKDPEDTFFPSPESSCDVKLVEKSFETDTNLNFQNLSVIGFRILLLKVAGFNLLMTLRLWSS

SEQ ID NO: 2040 - protein, 172 aa, synthetic construct
DKQLDADVSPKPTIFLPSIAETKLQKAGTYLCLLEKFFPDVIKIHWQEKKSNTILGSQEGNTMKTNDTYMKFSWLTVPEKSLDKEHRCIVRHENNKNGVDQEIIFPPIKTDVITMDPKDGRADCGFTSESYQQGVLSATILYEILLGKATLYAVLVSALVLMAMVKRKDSRG

SEQ ID NO: 2041 - protein, 170 aa, synthetic construct
DKQLDADVSPKPTIFLPSIAETKLQKAGTYLCLLEKFFPDVIKIHWQEKKSNTILGSQEGNTMKTNDTYMKFSWLTVPEKSLDKEHRCIVRHENNKNGVDQEIIFPPIKTDVITMDPKDADCGFTSESYQQGVLSATILYEILLGKATLYAVLVSALVLMAMVKRKDSRG

SEQ ID NO: 2042 - protein, 180 aa, synthetic construct
DKQLDADVSPKPTIFLPSIAETKLQKAGTYLCLLEKFFPDVIKIHWQEKKSNTILGSQEGNTMKTNDTYMKFSWLTVPEKSLDKEHRCIVRHENNKNGVDQEIIFPPIKTDVITMDPKDQIVSAEAWGRADCGFTSESYQQGVLSATILYEILLGKATLYAVLVSALVLMAMVKRKDSRG

SEQ ID NO: 2043 - protein, 187 aa, synthetic construct
DKQLDADVSPKPTIFLPSIAETKLQKAGTYLCLLEKFFPDVIKIHWQEKKSNTILGSQEGNTMKTNDTYMKFSWLTVPEKSLDKEHRCIVRHENNKNGVDQEIIFPPIKTDVITMDPKDEVKTDSTDHVKPKETENTKQPSKSCHKPKAIVHTEKVNMMSLTVLGLRMLFAKTVAVNFLLTAKLFFL

SEQ ID NO: 2044 - protein, 180 aa, synthetic construct
DKQLDADVSPKPTIFLPSIAETKLQKAGTYLCLLEKFFPDVIKIHWQEKKSNTILGSQEGNTMKTNDTYMKFSWLTVPEKSLDKEHRCIVRHENNKNGVDQEIIFPPIKTDVITMDPKDDHVKPKETENTKQPSKSCHKPKAIVHTEKVNMMSLTVLGLRMLFAKTVAVNFLLTAKLFFL

SEQ ID NO: 2045 - protein, 174 aa, synthetic construct; identical to SEQ ID NO: 2021

SEQ ID NO: 2046 - protein, 164 aa, synthetic construct; identical to SEQ ID NO: 2022

SEQ ID NO: 2047 - protein, 173 aa, synthetic construct; identical to SEQ ID NO: 2023

SEQ ID NO: 2048 - protein, 167 aa, synthetic construct; identical to SEQ ID NO: 2024

SEQ ID NO: 2049 - protein, 165 aa, synthetic construct; identical to SEQ ID NO: 2025

SEQ ID NO: 2050 - protein, 175 aa, synthetic construct; identical to SEQ ID NO: 2026

SEQ ID NO: 2051 - protein, 182 aa, synthetic construct; identical to SEQ ID NO: 2027

SEQ ID NO: 2052 - protein, 175 aa, synthetic construct; identical to SEQ ID NO: 2028

SEQ ID NO: 2053 - protein, 155 aa, synthetic construct
PKPTIFLPSIAETKLQKAGTYLCLLEKFFPDVIKIHWQEKKSNTILGSQEGNTMKTNDTYMKFSWLTVPEKSLDKEHRCIVRHENNKNGVDQEIIIPEDTFFPSPESSCDVKLVEKSFETDTNLNFQNLSVIGFRILLLKVAGFNLLMTLRLWSS

SEQ ID NO: 2054 - protein, 145 aa, synthetic construct
PKPTIFLPSIAETKLQKAGTYLCLLEKFFPDVIKIHWQEKKSNTILGSQEGNTMKTNDTYMKFSWLTVPEKSLDKEHRCIVRHENNKNGVDQEIIESSCDVKLVEKSFETDTNLNFQNLSVIGFRILLLKVAGFNLLMTLRLWSS

SEQ ID NO: 2055 - protein, 154 aa, synthetic construct
PKPTIFLPSIAETKLQKAGTYLCLLEKFFPDVIKIHWQEKKSNTILGSQEGNTMKTNDTYMKFSWLTVPEKSLDKEHRCIVRHENNKNGVDQEIIPEDTFFPSPESSCDVKLVEKSFETDTNLNFQNLSVIGFRILLLKVAGFNLLMTLRLWSS

SEQ ID NO: 2056 - protein, 148 aa, synthetic construct
PKPTIFLPSIAETKLQKAGTYLCLLEKFFPDVIKIHWQEKKSNTILGSQEGNTMKTNDTYMKFSWLTVPEKSLDKEHRCIVRHENNKNGVDQEIIGRADCGFTSESYQQGVLSATILYEILLGKATLYAVLVSALVLMAMVKRKDSRG

SEQ ID NO: 2057 - protein, 146 aa, synthetic construct
PKPTIFLPSIAETKLQKAGTYLCLLEKFFPDVIKIHWQEKKSNTILGSQEGNTMKTNDTYMKFSWLTVPEKSLDKEHRCIVRHENNKNGVDQEIIADCGFTSESYQQGVLSATILYEILLGKATLYAVLVSALVLMAMVKRKDSRG

SEQ ID NO: 2058 - protein, 156 aa, synthetic construct
PKPTIFLPSIAETKLQKAGTYLCLLEKFFPDVIKIHWQEKKSNTILGSQEGNTMKTNDTYMKFSWLTVPEKSLDKEHRCIVRHENNKNGVDQEIIQIVSAEAWGRADCGFTSESYQQGVLSATILYEILLGKATLYAVLVSALVLMAMVKRKDSRG

SEQ ID NO: 2059 - protein, 164 aa, synthetic construct
PKPTIFLPSIAETKLQKAGTYLCLLEKFFPDVIKIHWQEKKSNTILGSQEGNTMKTNDTYMKFSWLTVPEKSLDKEHRCIVRHENNKNGVDQEIIFPPIKTDVITMDPKDNCSKDANDTLLLQLTNTSAYYMYLLLLLKSVVYFAIITCCLLRRTAFCCNGEKS

SEQ ID NO: 2060 - protein, 162 aa, synthetic construct
PKPTIFLPSIAETKLQKAGTYLCLLEKFFPDVIKIHWQEKKSNTILGSQEGNTMKTNDTYMKFSWLTVPEKSLDKEHRCIVRHENNKNGVDQEIIPIKTDVITMDPKDNCSKDANDTLLLQLTNTSAYYMYLLLLLKSVVYFAIITCCLLRRTAFCCNGEKS

SEQ ID NO: 2061 - protein, 154 aa, synthetic construct
PKPTIFLPSIAETKLQKAGTYLCLLEKFFPDVIKIHWQEKKSNTILGSQEGNTMKTNDTYMKFSWLTVPEKSLDKEHRCIVRHENNKNGVDQEIIMDPKDNCSKDANDTLLLQLTNTSAYYMYLLLLLKSVVYFAIITCCLLRRTAFCCNGEKS

SEQ ID NO: 2062 - protein, 162 aa, synthetic construct; identical to SEQ ID NO: 2060

SEQ ID NO: 2063 - protein, 148 aa, synthetic construct
PKPTIFLPSIAETKLQKAGTYLCLLEKFFPDVIKIHWQEKKSNTILGSQEGNTMKTNDTYMKFSWLTVPEKSLDKEHRCIVRHENNKNGVDQEIICSKDANDTLLLQLTNTSAYYMYLLLLLKSVVYFAIITCCLLRRTAFCCNGEKS

SEQ ID NO: 2064 - protein, 163 aa, synthetic construct
PKPTIFLPSIAETKLQKAGTYLCLLEKFFPDVIKIHWQEKKSNTILGSQEGNTMKTNDTYMKFSWLTVPEKSLDKEHRCIVRHENNKNGVDQEIIEVKTDSTDHVKPKETENTKQPSKSCHKPKAIVHTEKVNMMSLTVLGLRMLFAKTVAVNFLLTAKLFFL

SEQ ID NO: 2065 - protein, 156 aa, synthetic construct
PKPTIFLPSIAETKLQKAGTYLCLLEKFFPDVIKIHWQEKKSNTILGSQEGNTMKTNDTYMKFSWLTVPEKSLDKEHRCIVRHENNKNGVDQEIIDHVKPKETENTKQPSKSCHKPKAIVHTEKVNMMSLTVLGLRMLFAKTVAVNFLLTAKLFFL

SEQ ID NO: 2066 - protein, 145 aa, synthetic construct
SQPHTKPSVFVMKNGTNVACLVKEFYPKDIRINLVSSKKITEFDPAIVISPSGKYNAVKLGKYEDSNSVTCSVQHDNKTVHSTDFIPEDTFFPSPESSCDVKLVEKSFETDTNLNFQNLSVIGFRILLLKVAGFNLLMTLRLWSS

SEQ ID NO: 2067 - protein, 135 aa, synthetic construct
SQPHTKPSVFVMKNGTNVACLVKEFYPKDIRINLVSSKKITEFDPAIVISPSGKYNAVKLGKYEDSNSVTCSVQHDNKTVHSTDFESSCDVKLVEKSFETDTNLNFQNLSVIGFRILLLKVAGFNLLMTLRLWSS

SEQ ID NO: 2068 - protein, 144 aa, synthetic construct
SQPHTKPSVFVMKNGTNVACLVKEFYPKDIRINLVSSKKITEFDPAIVISPSGKYNAVKLGKYEDSNSVTCSVQHDNKTVHSTDFPEDTFFPSPESSCDVKLVEKSFETDTNLNFQNLSVIGFRILLLKVAGFNLLMTLRLWSS

SEQ ID NO: 2069 - protein, 138 aa, synthetic construct
SQPHTKPSVFVMKNGTNVACLVKEFYPKDIRINLVSSKKITEFDPAIVISPSGKYNAVKLGKYEDSNSVTCSVQHDNKTVHSTDFGRADCGFTSESYQQGVLSATILYEILLGKATLYAVLVSALVLMAMVKRKDSRG

SEQ ID NO: 2070 - protein, 136 aa, synthetic construct
SQPHTKPSVFVMKNGTNVACLVKEFYPKDIRINLVSSKKITEFDPAIVISPSGKYNAVKLGKYEDSNSVTCSVQHDNKTVHSTDFADCGFTSESYQQGVLSATILYEILLGKATLYAVLVSALVLMAMVKRKDSRG

SEQ ID NO: 2071 - protein, 146 aa, synthetic construct
SQPHTKPSVFVMKNGTNVACLVKEFYPKDIRINLVSSKKITEFDPAIVISPSGKYNAVKLGKYEDSNSVTCSVQHDNKTVHSTDFQIVSAEAWGRADCGFTSESYQQGVLSATILYEILLGKATLYAVLVSALVLMAMVKRKDSRG

SEQ ID NO: 2072 - protein, 154 aa, synthetic construct
SQPHTKPSVFVMKNGTNVACLVKEFYPKDIRINLVSSKKITEFDPAIVISPSGKYNAVKLGKYEDSNSVTCSVQHDNKTVHSTDFFPPIKTDVITMDPKDNCSKDANDTLLLQLTNTSAYYMYLLLLLKSVVYFAIITCCLLRRTAFCCNGEKS

SEQ ID NO: 2073 - protein, 152 aa, synthetic construct
SQPHTKPSVFVMKNGTNVACLVKEFYPKDIRINLVSSKKITEFDPAIVISPSGKYNAVKLGKYEDSNSVTCSVQHDNKTVHSTDFPIKTDVITMDPKDNCSKDANDTLLLQLTNTSAYYMYLLLLLKSVVYFAIITCCLLRRTAFCCNGEKS

SEQ ID NO: 2074 - protein, 144 aa, synthetic construct
SQPHTKPSVFVMKNGTNVACLVKEFYPKDIRINLVSSKKITEFDPAIVISPSGKYNAVKLGKYEDSNSVTCSVQHDNKTVHSTDFMDPKDNCSKDANDTLLLQLTNTSAYYMYLLLLLKSVVYFAIITCCLLRRTAFCCNGEKS

SEQ ID NO: 2075 - protein, 153 aa, synthetic construct; identical to SEQ ID NO: 1390

SEQ ID NO: 2076 - protein, 146 aa, synthetic construct
SQPHTKPSVFVMKNGTNVACLVKEFYPKDIRINLVSSKKITEFDPAIVISPSGKYNAVKLGKYEDSNSVTCSVQHDNKTVHSTDFDHVKPKETENTKQPSKSCHKPKAIVHTEKVNMMSLTVLGLRMLFAKTVAVNFLLTAKLFFL

SEQ ID NO: 2077 - protein, 152 aa, synthetic construct
SQPHTKPSVFVMKNGTNVACLVKEFYPKDIRINLVSSKKITEFDPAIVISPSGKYNAVKLGKYEDSNSVTCSVQHDNKTVHSTDFEVKTDSTIPEDTFFPSPESSCDVKLVEKSFETDTNLNFQNLSVIGFRILLLKVAGFNLLMTLRLWSS

SEQ ID NO: 2078 - protein, 142 aa, synthetic construct
SQPHTKPSVFVMKNGTNVACLVKEFYPKDIRINLVSSKKITEFDPAIVISPSGKYNAVKLGKYEDSNSVTCSVQHDNKTVHSTDFEVKTDSTESSCDVKLVEKSFETDTNLNFQNLSVIGFRILLLKVAGFNLLMTLRLWSS

SEQ ID NO: 2079 - protein, 151 aa, synthetic construct
SQPHTKPSVFVMKNGTNVACLVKEFYPKDIRINLVSSKKITEFDPAIVISPSGKYNAVKLGKYEDSNSVTCSVQHDNKTVHSTDFEVKTDSTPEDTFFPSPESSCDVKLVEKSFETDTNLNFQNLSVIGFRILLLKVAGFNLLMTLRLWSS

SEQ ID NO: 2080 - protein, 145 aa, synthetic construct
SQPHTKPSVFVMKNGTNVACLVKEFYPKDIRINLVSSKKITEFDPAIVISPSGKYNAVKLGKYEDSNSVTCSVQHDNKTVHSTDFEVKTDSTGRADCGFTSESYQQGVLSATILYEILLGKATLYAVLVSALVLMAMVKRKDSRG

SEQ ID NO: 2081 - protein, 143 aa, synthetic construct
SQPHTKPSVFVMKNGTNVACLVKEFYPKDIRINLVSSKKITEFDPAIVISPSGKYNAVKLGKYEDSNSVTCSVQHDNKTVHSTDFEVKTDSTADCGFTSESYQQGVLSATILYEILLGKATLYAVLVSALVLMAMVKRKDSRG

SEQ ID NO: 2082 - protein, 153 aa, synthetic construct
SQPHTKPSVFVMKNGTNVACLVKEFYPKDIRINLVSSKKITEFDPAIVISPSGKYNAVKLGKYEDSNSVTCSVQHDNKTVHSTDFEVKTDSTQIVSAEAWGRADCGFTSESYQQGVLSATILYEILLGKATLYAVLVSALVLMAMVKRKDSRG

SEQ ID NO: 2083 - protein, 161 aa, synthetic construct
SQPHTKPSVFVMKNGTNVACLVKEFYPKDIRINLVSSKKITEFDPAIVISPSGKYNAVKLGKYEDSNSVTCSVQHDNKTVHSTDFEVKTDSTFPPIKTDVITMDPKDNCSKDANDTLLLQLTNTSAYYMYLLLLLKSVVYFAIITCCLLRRTAFCCNGEKS

SEQ ID NO: 2084 - protein, 159 aa, synthetic construct
SQPHTKPSVFVMKNGTNVACLVKEFYPKDIRINLVSSKKITEFDPAIVISPSGKYNAVKLGKYEDSNSVTCSVQHDNKTVHSTDFEVKTDSTPIKTDVITMDPKDNCSKDANDTLLLQLTNTSAYYMYLLLLLKSVVYFAIITCCLLRRTAFCCNGEKS

SEQ ID NO: 2085 - protein, 151 aa, synthetic construct
SQPHTKPSVFVMKNGTNVACLVKEFYPKDIRINLVSSKKITEFDPAIVISPSGKYNAVKLGKYEDSNSVTCSVQHDNKTVHSTDFEVKTDSTMDPKDNCSKDANDTLLLQLTNTSAYYMYLLLLLKSVVYFAIITCCLLRRTAFCCNGEKS

SEQ ID NO: 2086 - protein, 159 aa, synthetic construct; identical to SEQ ID NO: 2084

SEQ ID NO: 2087 - protein, 145 aa, synthetic construct
SQPHTKPSVFVMKNGTNVACLVKEFYPKDIRINLVSSKKITEFDPAIVISPSGKYNAVKLGKYEDSNSVTCSVQHDNKTVHSTDFEVKTDSTCSKDANDTLLLQLTNTSAYYMYLLLLLKSVVYFAIITCCLLRRTAFCCNGEKS

SEQ ID NO: 2088 - protein, 145 aa, synthetic construct; identical to SEQ ID NO: 2066

SEQ ID NO: 2089 - protein, 135 aa, synthetic construct; identical to SEQ ID NO: 2067

SEQ ID NO: 2090 - protein, 144 aa, synthetic construct; identical to SEQ ID NO: 2068

SEQ ID NO: 2091 - protein, 138 aa, synthetic construct; identical to SEQ ID NO: 2069

SEQ ID NO: 2092 - protein, 136 aa, synthetic construct; identical to SEQ ID NO: 2070

SEQ ID NO: 2093 - protein, 146 aa, synthetic construct; identical to SEQ ID NO: 2071

SEQ ID NO: 2094 - protein, 154 aa, synthetic construct; identical to SEQ ID NO: 2072

SEQ ID NO: 2095 - protein, 152 aa, synthetic construct; identical to SEQ ID NO: 2073

SEQ ID NO: 2096 - protein, 144 aa, synthetic construct; identical to SEQ ID NO: 2074

SEQ ID NO: 2097 - protein, 152 aa, synthetic construct; identical to SEQ ID NO: 2073

SEQ ID NO: 2098 - protein, 138 aa, synthetic construct
SQPHTKPSVFVMKNGTNVACLVKEFYPKDIRINLVSSKKITEFDPAIVISPSGKYNAVKLGKYEDSNSVTCSVQHDNKTVHSTDFCSKDANDTLLLQLTNTSAYYMYLLLLLKSVVYFAIITCCLLRRTAFCCNGEKS

SEQ ID NO: 2099 - protein, 152 aa, synthetic construct; identical to SEQ ID NO: 2077

SEQ ID NO: 2100 - protein, 142 aa, synthetic construct; identical to SEQ ID NO: 2078

SEQ ID NO: 2101 - protein, 151 aa, synthetic construct; identical to SEQ ID NO: 2079

SEQ ID NO: 2102 - protein, 145 aa, synthetic construct; identical to SEQ ID NO: 2080

SEQ ID NO: 2103 - protein, 143 aa, synthetic construct; identical to SEQ ID NO: 2081

SEQ ID NO: 2104 - protein, 153 aa, synthetic construct; identical to SEQ ID NO: 2082

SEQ ID NO: 2105 - protein, 161 aa, synthetic construct; identical to SEQ ID NO: 2083

SEQ ID NO: 2106 - protein, 159 aa, synthetic construct; identical to SEQ ID NO: 2084

SEQ ID NO: 2107 - protein, 151 aa, synthetic construct; identical to SEQ ID NO: 2085

SEQ ID NO: 2108 - protein, 159 aa, synthetic construct; identical to SEQ ID NO: 2084

SEQ ID NO: 2109 - protein, 145 aa, synthetic construct; identical to SEQ ID NO: 2087

SEQ ID NO: 2110 - protein, 118 aa, synthetic construct
EDLKNVFPPEVAVFEPSEAEISHTQKATLVCLATGFYPDHVELSWWVNGKEVHSGVSTDPQPLKEQPALNDSRYCLSSRLRVSATFWQNPRNHFRCQVQFYGLSENDEWTQDRAKPVT

SEQ ID NO: 2111 - protein, 61 aa, synthetic construct
QIVSAEAWGRADCGFTSESYQQGVLSATILYEILLGKATLYAVLVSALVLMAMVKRKDSRG

SEQ ID NO: 2112 - protein, 106 aa, synthetic construct; identical to SEQ ID NO: 1478

SEQ ID NO: 2113 - protein, 119 aa, synthetic construct
DKQLDADVSPKPTIFLPSIAETKLQKAGTYLCLLEKFFPDVIKIHWQEKKSNTILGSQEGNTMKTNDTYMKFSWLTVPEKSLDKEHRCIVRHENNKNGVDQEIIFPPIKTDVITMDPKD

SEQ ID NO: 2114 - protein, 67 aa, synthetic construct; identical to SEQ ID NO: 1415

SEQ ID NO: 2115 - protein, 53 aa, synthetic construct
CSKDANDTLLLQLTNTSAYYMYLLLLLKSVVYFAIITCCLLRRTAFCCNGEKS

SEQ ID NO: 2116 - protein, 85 aa, synthetic construct; identical to SEQ ID NO: 1480

SEQ ID NO: 2117 - protein, 68 aa, synthetic construct; identical to SEQ ID NO: 1418

SEQ ID NO: 2118 - protein, 117 aa, synthetic construct
IQNPDPAVYQLRDSKSSDKSVCLFTDFDSQTNVSQSKDSDVYITDKCVLDMRSMDFKSNSAVAWSNKSDFACANAFNNSIIPEDTFFPSPESSCDVKLVEKSFETDTNLNFQNLSVI

SEQ ID NO: 2119 - protein, 116 aa, synthetic construct
IQNPDPAVYQLRDSKSSDKSVCLFTDFDSQTNVSQSKDSDVYITDKCVLDMRSMDFKSNSAVAWSNKSDFACANAFNNSIIPEDTFFPSPESSCDVKLVEKSFETDTNLNFQNLSV

SEQ ID NO: 2120 - protein, 115 aa, synthetic construct
IQNPDPAVYQLRDSKSSDKSVCLFTDFDSQTNVSQSKDSDVYITDKCVLDMRSMDFKSNSAVAWSNKSDFACANAFNNSIIPEDTFFPSPESSCDVKLVEKSFETDTNLNFQNLS

SEQ ID NO: 2121 - protein, 23 aa, synthetic construct
GFRILLLKVAGFNLLMTLRLWSS

SEQ ID NO: 2122 - protein, 24 aa, synthetic construct
IGFRILLLKVAGFNLLMTLRLWSS

SEQ ID NO: 2123 - protein, 25 aa, synthetic construct
VIGFRILLLKVAGFNLLMTLRLWSS

SEQ ID NO: 2124 - protein, 130 aa, synthetic construct
SQPHTKPSVFVMKNGTNVACLVKEFYPKDIRINLVSSKKITEFDPAIVISPSGKYNAVKLGKYEDSNSVTCSVQHDNKTVHSTDFEVKTDSTDHVKPKETENTKQPSKSCHKPKAIVHTEKVNMMSLTVL

SEQ ID NO: 2125 - protein, 129 aa, synthetic construct
SQPHTKPSVFVMKNGTNVACLVKEFYPKDIRINLVSSKKITEFDPAIVISPSGKYNAVKLGKYEDSNSVTCSVQHDNKTVHSTDFEVKTDSTDHVKPKETENTKQPSKSCHKPKAIVHTEKVNMMSLTV

SEQ ID NO: 2126 - protein, 128 aa, synthetic construct
SQPHTKPSVFVMKNGTNVACLVKEFYPKDIRINLVSSKKITEFDPAIVISPSGKYNAVKLGKYEDSNSVTCSVQHDNKTVHSTDFEVKTDSTDHVKPKETENTKQPSKSCHKPKAIVHTEKVNMMSLT

SEQ ID NO: 2127 - protein, 23 aa, synthetic construct
GLRMLFAKTVAVNFLLTAKLFFL

SEQ ID NO: 2128 - protein, 24 aa, synthetic construct
LGLRMLFAKTVAVNFLLTAKLFFL

SEQ ID NO: 2129 - protein, 25 aa, synthetic construct
VLGLRMLFAKTVAVNFLLTAKLFFL

SEQ ID NO: 2130 - protein, 149 aa, synthetic construct
EDLKNVFPPEVAVFEPSEAEISHTQKATLVCLATGFYPDHVELSWWVNGKEVHSGVCTDPQPLKEQPALNDSRYCLSSRLRVSATFWQNPRNHFRCQVQFYGLSENDEWTQDRAKPVTQIVSAEAWGRADCGFTSESYQQGVLSATILY

SEQ ID NO: 2131 - protein, 145 aa, synthetic construct
EDLKNVFPPEVAVFEPSEAEISHTQKATLVCLATGFYPDHVELSWWVNGKEVHSGVCTDPQPLKEQPALNDSRYCLSSRLRVSATFWQNPRNHFRCQVQFYGLSENDEWTQDRAKPVTQIVSAEAWGRADCGFTSESYQQGVLSA

SEQ ID NO: 2132 - protein, 30 aa, synthetic construct
EILLGKATLYAVLVSALVLMAMVKRKDSRG

SEQ ID NO: 2133 - protein, 34 aa, synthetic construct
TILYEILLGKATLYAVLVSALVLMAMVKRKDSRG

SEQ ID NO: 2134 - protein, 142 aa, synthetic construct
DKQLDADVSPKPTIFLPSIAETKLQKAGTYLCLLEKFFPDVIKIHWQEKKSNTILGSQEGNTMKTNDTYMKFSWLTVPEKSLDKEHRCIVRHENNKNGVDQEIIFPPIKTDVITMDPKDNCSKDANDTLLLQLTNTSAYYMY

SEQ ID NO: 2135 - protein, 138 aa, synthetic construct
DKQLDADVSPKPTIFLPSIAETKLQKAGTYLCLLEKFFPDVIKIHWQEKKSNTILGSQEGNTMKTNDTYMKFSWLTVPEKSLDKEHRCIVRHENNKNGVDQEIIFPPIKTDVITMDPKDNCSKDANDTLLLQLTNTSA

SEQ ID NO: 2136 - protein, 31 aa, synthetic construct
LLLLLKSVVYFAIITCCLLRRTAFCCNGEKS

SEQ ID NO: 2137 - protein, 35 aa, synthetic construct
YYMYLLLLLKSVVYFAIITCCLLRRTAFCCNGEKS

SEQ ID NO: 2138 - protein, 166 aa, synthetic construct; identical to SEQ ID NO: 1882

SEQ ID NO: 2139 - protein, 176 aa, synthetic construct; identical to SEQ ID NO: 1883

SEQ ID NO: 2140 - protein, 173 aa, synthetic construct; identical to SEQ ID NO: 1884

SEQ ID NO: 2141 - protein, 181 aa, synthetic construct
LEDLKHVFPPEVAVFEPSDAEIWHTQKATLVCLATGFYPDHVELSWWVNGKEVHSGVSTDPQPLKEQPALNDSRYCLSSRLRVSATFWQNPRNHFRCQVQFYGLSENDEWTQDRAKPVTQIVSAEAWGRADCGFTSESYQQGVLSAYYMYLLLLLKSVVYFAIITCCLLRRTAFCCNGEKS

SEQ ID NO: 2142 - protein, 181 aa, synthetic construct
LEDLKHVFPPEVAVFEPSDAEIWHTQKATLVCLATGFYPDHVELSWWVNGKEVHSGVSTDPQPLKEQPALNDSRYCLSSRLRVSATFWQNPRNHFRCQVQFYGLSENDEWTQDRAKPVTQIVSAEAWGRADCGFTSESYQQGVLSATILYLLLLLKSVVYFAIITCCLLRRTAFCCNGEKS

SEQ ID NO: 2143 - protein, 182 aa, synthetic construct; identical to SEQ ID NO: 2027

SEQ ID NO: 2144 - protein, 174 aa, synthetic construct; identical to SEQ ID NO: 2019

SEQ ID NO: 2145 - protein, 187 aa, synthetic construct; identical to SEQ ID NO: 2043

SEQ ID NO: 2146 - protein, 152 aa, synthetic construct; identical to SEQ ID NO: 2073

SEQ ID NO: 2147 - protein, 138 aa, synthetic construct; identical to SEQ ID NO: 2098

SEQ ID NO: 2148 - protein, 160 aa, synthetic construct
GQPKANPTVTLFPPSSEELQANKATLVCLISDFYPGAVTVAWKADGSPVKAGVETTKPSKQSNNKYAASSYLSLTPEQWKSHRSYSCQVTHEGSTVEKTVAPTECSGRADCGFTSESYQQGVLSATILYLLLLLKSVVYFAIITCCLLRRTAFCCNGEKS

SEQ ID NO: 2149 - protein, 160 aa, synthetic construct
GQPKANPTVTLFPPSSEELQANKATLVCLISDFYPGAVTVAWKADGSPVKAGVETTKPSKQSNNKYAASSYLSLTPEQWKSHRSYSCQVTHEGSTVEKTVAPTECSGRADCGFTSESYQQGVLSAYYMYLLLLLKSVVYFAIITCCLLRRTAFCCNGEKS

SEQ ID NO: 2150 - protein, 160 aa, synthetic construct
GQPKANPTVTLFPPSSEELQANKATLVCLISDFYPGAVTVAWKADGSPVKAGVETTKPSKQSNNKYAASSYLSLTPEQWKSHRSYSCQVTHEGSTVEKTVAPTECSGRADCGFTSESYQQGVLSAYYTYLLLLLKSVIYLAIISFSLLRRTSVCGNEKKS

SEQ ID NO: 2151 - protein, 159 aa, synthetic construct
GQPKANPTVTLFPPSSEELQANKATLVCLISDFYPGAVTVAWKADGSPVKAGVETTKPSKQSNNKYAASSYLSLTPEQWKSHRSYSCQVTHEGSTVEKTVAPTECSGRADCGFTSESYQQGVLSAYYMYLLLLLKSVVYFAIITCCLLMAMVKRKDSRG

SEQ ID NO: 2152 - protein, 160 aa, synthetic construct
GQPKANPTVTLFPPSSEELQANKATLVCLISDFYPGAVTVAWKADGSPVKAGVETTKPSKQSNNKYAASSYLSLTPEQWKSHRSYSCQVTHEGSTVEKTVAPTECSGRADCGFTSESYQQGVLSATILYLLLLLKSVVYLAIISFSLLRRTAFCCNGEKS

SEQ ID NO: 2153 - protein, 54 aa, synthetic construct
GRADCGFTSESYQQGVLSATILYLLLLLKSVVYFAIITCCLLRRTAFCCNGEKS

SEQ ID NO: 2154 - protein, 54 aa, synthetic construct
GRADCGFTSESYQQGVLSAYYMYLLLLLKSVVYFAIITCCLLRRTAFCCNGEKS

SEQ ID NO: 2155 - protein, 54 aa, synthetic construct
GRADCGFTSESYQQGVLSAYYTYLLLLLKSVIYLAIISFSLLRRTSVCGNEKKS

SEQ ID NO: 2156 - protein, 53 aa, synthetic construct
GRADCGFTSESYQQGVLSAYYMYLLLLLKSVVYFAIITCCLLMAMVKRKDSRG

SEQ ID NO: 2157 - protein, 54 aa, synthetic construct
GRADCGFTSESYQQGVLSATILYLLLLLKSVVYLAIISFSLLRRTAFCCNGEKS

SEQ ID NO: 2158 - protein, 163 aa, synthetic construct
ASTKGPSVFPLAPSSKSTSGGTAALGCLVKDYFPEPVTVSWNSGALTSGVHTFPAVLQSSGLYSLSSVVTVPSSSLGTQTYICNVNHKPSNTKVDKRVEPKSCIPEDTFFPSPESSCDVKLVEKSFETDTNLNFQNLSVIGLRMLFAKTVAVNFLLTAKLFFL

SEQ ID NO: 2159 - protein, 163 aa, synthetic construct
ASTKGPSVFPLAPSSKSTSGGTAALGCLVKDYFPEPVTVSWNSGALTSGVHTFPAVLQSSGLYSLSSVVTVPSSSLGTQTYICNVNHKPSNTKVDKRVEPKSCIPEDTFFPSPESSCDVKLVEKSFETDTNLNFQNLSVLGLRMLFAKTVAVNFLLTAKLFFL

SEQ ID NO: 2160 - protein, 163 aa, synthetic construct
ASTKGPSVFPLAPSSKSTSGGTAALGCLVKDYFPEPVTVSWNSGALTSGVHTFPAVLQSSGLYSLSSVVTVPSSSLGTQTYICNVNHKPSNTKVDKRVEPKSCIPEDTFFPSPESSCDVKLVEKSFETDTNLNFQNLTVLGLRMLFAKTVAVNFLLTAKLFFL

SEQ ID NO: 2161 - protein, 163 aa, synthetic construct; identical to SEQ ID NO: 2160

SEQ ID NO: 2162 - protein, 165 aa, synthetic construct
ASTKGPSVFPLAPSSKSTSGGTAALGCLVKDYFPEPVTVSWNSGALTSGVHTFPAVLQSSGLYSLSSVVTVPSSSLGTQTYICNVNHKPSNTKVDKRVEPKSCIFKETNATYPSSDVPCDATLTEKSFETDMNLNFQNLTVLGLRMLFAKTVAVNFLLTAKLFFL

SEQ ID NO: 2163 - protein, 60 aa, synthetic construct
IPEDTFFPSPESSCDVKLVEKSFETDTNLNFQNLSVIGLRMLFAKTVAVNFLLTAKLFFL

SEQ ID NO: 2164 - protein, 60 aa, synthetic construct
IPEDTFFPSPESSCDVKLVEKSFETDTNLNFQNLSVLGLRMLFAKTVAVNFLLTAKLFFL

SEQ ID NO: 2165 - protein, 60 aa, synthetic construct
IPEDTFFPSPESSCDVKLVEKSFETDTNLNFQNLTVLGLRMLFAKTVAVNFLLTAKLFFL

SEQ ID NO: 2166 - protein, 60 aa, synthetic construct; identical to SEQ ID NO: 2165

SEQ ID NO: 2167 - protein, 62 aa, synthetic construct
IFKETNATYPSSDVPCDATLTEKSFETDMNLNFQNLTVLGLRMLFAKTVAVNFLLTAKLFFL

SEQ ID NO: 2168 - protein, 172 aa, synthetic construct
GQPKANPTVTLFPPSSEELQANKATLVCLISDFYPGAVTVAWKADGSPVKAGVETTKPSKQSNNKYAASSYLSLTPEQWKSHRSYSCQVTHEGSTVEKTVAPTECSPIKTDVITMDPKDNCSKDANDTLLLQLTNTSAYYMYEILLGKATLYAVLVSALVLMAMVKRKDSRG

SEQ ID NO: 2169 - protein, 172 aa, synthetic construct
GQPKANPTVTLFPPSSEELQANKATLVCLISDFYPGAVTVAWKADGSPVKAGVETTKPSKQSNNKYAASSYLSLTPEQWKSHRSYSCQVTHEGSTVEKTVAPTECSPIKTDVITMDPKDNCSKDANDTLLLQLTNTSATILYEILLGKATLYAVLVSALVLMAMVKRKDSRG

SEQ ID NO: 2170 - protein, 173 aa, synthetic construct
GQPKANPTVTLFPPSSEELQANKATLVCLISDFYPGAVTVAWKADGSPVKAGVETTKPSKQSNNKYAASSYLSLTPEQWKSHRSYSCQVTHEGSTVEKTVAPTECSPIKTDVITMDPKDNCSKDANDTLLLQLTNTSAYYTYLLLLLKSVIYLAIISFSLLRRTSVCGNEKKS

SEQ ID NO: 2171 - protein, 172 aa, synthetic construct
GQPKANPTVTLFPPSSEELQANKATLVCLISDFYPGAVTVAWKADGSPVKAGVETTKPSKQSNNKYAASSYLSLTPEQWKSHRSYSCQVTHEGSTVEKTVAPTECSSIKKVAVSTKPTTCWQDKNDVLQLQFTITSAYYTYLLLLLKSVIYLAIISFSLLRRTSVCGNEKKS

SEQ ID NO: 2172 - protein, 180 aa, synthetic construct
EDLKNVFPPEVAVFEPSEAEISHTQKATLVCLATGFYPDHVELSWWVNGKEVHSGVCTDPQPLKEQPALNDSRYCLSSRLRVSATFWQNPRNHFRCQVQFYGLSENDEWTQDRAKPVTQIVSAEAWGRADCGFTSESYQQGVLSAYYMYLLLLLKSVVYFAIITCCLLRRTAFCCNGEKS

SEQ ID NO: 2173 - protein, 113 aa, synthetic construct
DDIQLTQSPSSLSASVGDRVTITCKASQSVDYEGDSFLNWYQQKPGKAPKLLIYAASNLESGVPSRFSGSGSGTDFTLTISSLQPEDFATYYCQQSNEDPLTFGQGTKVEIKR

SEQ ID NO: 2174 - protein, 112 aa, synthetic construct; identical to SEQ ID NO: 776

SEQ ID NO: 2175 - protein, 113 aa, synthetic construct
DDIQLTQSPSSLSASVGDRVTITCKASQSVDYDGDSFLNWYQQKPGKAPKLLIYAASNLESGVPSRFSGSGSGTDFTLTISSLQPEDFATYYCQQSNEDPLTFGQGTKVEIKR

SEQ ID NO: 2176 - protein, 112 aa, synthetic construct; identical to SEQ ID NO: 774

SEQ ID NO: 2177 - protein, 111 aa, synthetic construct; identical to SEQ ID NO: 778

SEQ ID NO: 2178 - protein, 111 aa, synthetic construct; identical to SEQ ID NO: 780

SEQ ID NO: 2179 - protein, 117 aa, synthetic construct [sequence omitted]

SEQ ID NO: 2180 - protein, 117 aa, synthetic construct; identical to SEQ ID NO: 900

SEQ ID NO: 2181 - protein, 118 aa, synthetic construct
EEVQLVESGGGLVQPGGSLRLSCAASGYTFSSYWIEWVRQAPGKGLEWIGEILPGGGDTNYNEIFKGRATFSADTSKNTAYLQMNSLRAEDTAVYYCTRRVPIRLDYWGQGTLVTVSS

SEQ ID NO: 2182 - protein, 118 aa, synthetic construct
EEVQLVESGGGLVQPGGSLRLSCAASGYTFTSYWIEWVRQAPGKGLEWIGEILPGGGDTNYNEIFKGRATFSADTSKNTAYLQMNSLRAEDTAVYYCTRRVPIRLDYWGQGTLVTVSS

SEQ ID NO: 2183 - protein, 113 aa, synthetic construct
DIVMTQTPLTLSVTIGQPASISCKSSQSLLDSDGKTYLNWLLQRPGQSPERLIYLVSKLDSGVPDRFTGSGSGTDFTLKISRVEAEDLGVYCCWQGTHFPYTFGGGTKVEIKG

SEQ ID NO: 2184 - protein, 113 aa, synthetic construct; identical to SEQ ID NO: 916

SEQ ID NO: 2185 - protein, 276 aa, synthetic construct; identical to SEQ ID NO: 1380

SEQ ID NO: 2186 - protein, 277 aa, synthetic construct
LEDLKNVFPPEVAVFEPSEAEISHTQKATLVCLATGFYPDHVELSWWVNGKEVHSGVSTDPQPLKEQPALNDSRYCLSSRLRVSATFWQNPRNHFRCQVQFYGLSENDEWTQDRAKPVTQIVSAEAWGRADCGSQSFGLLDPKLCYLLDGILFIYGVILTALFLRVKFSRSADAPAYQQGQNQLYNELNLGRREEYDVLDKRRGRDPEMGGKPQRRKNPQEGLYNELQKDKMAEAYSEIGMKGERRRGKGHDGLYQGLSTATKDTYDALHMQALPPR

SEQ ID NO: 2187 - protein, 161 aa, synthetic construct
IQNPDPAVYQLRDSKSSDKSVCLFTDFDSQTNVSQSKDSDVYITDKTVLDMRSMDFKSNSAVAWSNKSDFACANAFNNSIIPEDTFFPSPESSCGTITQGLAVSTISSFFPPGYQVSFCLVMVLLFAVDTGLYFSVKTNIRSSTRDWKDHKFKWRKDPQDK

SEQ ID NO: 2188 - protein, 163 aa, synthetic construct
TRIQNPDPAVYQLRDSKSSDKSVCLFTDFDSQTNVSQSKDSDVYITDKTVLDMRSMDFKSNSAVAWSNKSDFACANAFNNSIIPEDTFFPSPESSCGTITQGLAVSTISSFFPPGYQVSFCLVMVLLFAVDTGLYFSVKTNIRSSTRDWKDHKFKWRKDPQDK

SEQ ID NO: 2189 - protein, 179 aa, synthetic construct; identical to SEQ ID NO: 1357

SEQ ID NO: 2190 - protein, 180 aa, synthetic construct
LEDLKNVFPPEVAVFEPSEAEISHTQKATLVCLATGFYPDHVELSWWVNGKEVHSGVCTDPQPLKEQPALNDSRYCLSSRLRVSATFWQNPRNHFRCQVQFYGLSENDEWTQDRAKPVTQIVSAEAWGRADCGFTSESYQQGVLSATILYEILLGKATLYAVLVSALVLMAMVKRKDSRG

SEQ ID NO: 2191 - protein, 140 aa, synthetic construct; identical to SEQ ID NO: 1337

SEQ ID NO: 2192 - protein, 134 aa, synthetic construct
TLSRTLILPCTSCGIARAATRACVCSPTSTARPTCPRARTPTCTSPISACWTCGAWTSRATPPWPGPTSPISPAPTPSTTALSPRTHSSQAPRAAATSWWKRASRQTPTTSRTASASESCCKWPALTCPCGCGP

SEQ ID NO: 2193 - protein, 275 aa, synthetic construct; identical to SEQ ID NO: 1823

SEQ ID NO: 2194 - protein, 276 aa, synthetic construct
LEDLKNVFPPEVAVFEPSEAEISHTQKATLVCLATGFYPDHVELSWWVNGKEVHSGVSTDPQPLKEQPALNDSRYCLSSRLRVSATFWQNPRNHFRCQVQFYGLSENDEWTQDRAKPVTQIVSAEAWGRADCGSQSFGLLDPKLCYLLDGILFIYGVILTALFLRVKFSRSADAPAYQQGQNQLYNELNLGRREEYDVLDKRRGRDPEMGGKPRRKNPQEGLYNELQKDKMAEAYSEIGMKGERRRGKGHDGLYQGLSTATKDTYDALHMQALPPR

SEQ ID NO: 2195 - protein, 238 aa, synthetic construct; identical to SEQ ID NO: 1822

SEQ ID NO: 2196 - protein, 240 aa, synthetic construct
TRIQNPDPAVYQLRDSKSSDKSVCLFTDFDSQTNVSQSKDSDVYITDKTVLDMRSMDFKSNSAVAWSNKSDFACANAFNNSIIPEDTFFPSPESSCGTQSFGLLDPKLCYLLDGILFIYGVILTALFLRVKFSRSADAPAYQQGQNQLYNELNLGRREEYDVLDKRRGRDPEMGGKPRRKNPQEGLYNELQKDKMAEAYSEIGMKGERRRGKGHDGLYQGLSTATKDTYDALHMQALPPR

SEQ ID NO: 2197 - protein, 737 aa, synthetic construct
MALPVTALLLPLALLLHAARPDIVMTQTPLTLSVTIGQPASISCKSSQSLLDSDGKTYLNWLLQRPGQSPERLIYLVSKLDSGVPDRFTGSGSGTDFTLKISRVEAEDLGVYCCWQGTHFPYTFGGGTKVEIKGLEDLKNVFPPEVAVFEPSEAEISHTQKATLVCLATGFYPDHVELSWWVNGKEVHSGVSTDPQPLKEQPALNDSRYCLSSRLRVSATFWQNPRNHFRCQVQFYGLSENDEWTQDRAKPVTQIVSAEAWGRADCGSQSFGLLDPKLCYLLDGILFIYGVILTALFLRVKFSRSADAPAYQQGQNQLYNELNLGRREEYDVLDKRRGRDPEMGGKPQRRKNPQEGLYNELQKDKMAEAYSEIGMKGERRRGKGHDGLYQGLSTATKDTYDALHMQALPPRRAKRSGSGATNFSLLKQAGDVEENPGPTSMDWIWRILFLVGAATGAHSFEQVQLQQPGAELVRPGASVKLSCKASGYTFTSYWMNWVKQRPGQGLEWIGMIDPSDSETHYNHIFKDKATLTVDKSSSTAYLQLSSLTSEDSAVYYCARNLYLWGQGTSVTVSSTRIQNPDPAVYQLRDSKSSDKSVCLFTDFDSQTNVSQSKDSDVYITDKTVLDMRSMDFKSNSAVAWSNKSDFACANAFNNSIIPEDTFFPSPESSCGTITQGLAVSTISSFFPPGYQVSFCLVMVLLFAVDTGLYFSVKTNIRSSTRDWKDHKFKWRKDPQDK

SEQ ID NO: 2198 - protein, 740 aa, synthetic construct
MALPVTALLLPLALLLHAARPDDIQLTQSPSSLSASVGDRVTITCKASQSVDYEGDSFLNWYQQKPGKAPKLLIYAASNLESGVPSRFSGSGSGTDFTLTISSLQPEDFATYYCQQSNEDPLTFGQGTKVEIKRLEDLKNVFPPEVAVFEPSEAEISHTQKATLVCLATGFYPDHVELSWWVNGKEVHSGVSTDPQPLKEQPALNDSRYCLSSRLRVSATFWQNPRNHFRCQVQFYGLSENDEWTQDRAKPVTQIVSAEAWGRADCGSQSFGLLDPKLCYLLDGILFIYGVILTALFLRVKFSRSADAPAYQQGQNQLYNELNLGRREEYDVLDKRRGRDPEMGGKPQRRKNPQEGLYNELQKDKMAEAYSEIGMKGERRRGKGHDGLYQGLSTATKDTYDALHMQALPPRRAKRSGSGATNFSLLKQAGDVEENPGPTSMDWIWRILFLVGAATGAHSFEVQLVESGGGLVQPGGSLRLSCAASGYTFSSYWIEWVRQAPGKGLEWIGEILPGGGDTNYNEIFKGRATFSADTSKNTAYLQMNSLRAEDTAVYYCTRRVPIRLDYWGQGTLVTVSSTRIQNPDPAVYQLRDSKSSDKSVCLFTDFDSQTNVSQSKDSDVYITDKTVLDMRSMDFKSNSAVAWSNKSDFACANAFNNSIIPEDTFFPSPESSCGTITQGLAVSTISSFFPPGYQVSFCLVMVLLFAVDTGLYFSVKTNIRSSTRDWKDHKFKWRKDPQDK

SEQ ID NO: 2199 - protein, 739 aa, synthetic construct
MALPVTALLLPLALLLHAARPDIQLTQSPSSLSASVGDRVTITCKASQSVDYEGDSFLNWYQQKPGKAPKLLIYAASNLESGVPSRFSGSGSGTDFTLTISSLQPEDFATYYCQQSNEDPLTFGQGTKVEIKRLEDLKNVFPPEVAVFEPSEAEISHTQKATLVCLATGFYPDHVELSWWVNGKEVHSGVSTDPQPLKEQPALNDSRYCLSSRLRVSATFWQNPRNHFRCQVQFYGLSENDEWTQDRAKPVTQIVSAEAWGRADCGSQSFGLLDPKLCYLLDGILFIYGVILTALFLRVKFSRSADAPAYQQGQNQLYNELNLGRREEYDVLDKRRGRDPEMGGKPQRRKNPQEGLYNELQKDKMAEAYSEIGMKGERRRGKGHDGLYQGLSTATKDTYDALHMQALPPRRAKRSGSGATNFSLLKQAGDVEENPGPTSMDWIWRILFLVGAATGAHSFEVQLVESGGGLVQPGGSLRLSCAASGYTFSSYWIEWVRQAPGKGLEWIGEILPGGGDTNYNEIFKGRATFSADTSKNTAYLQMNSLRAEDTAVYYCTRRVPIRLDYWGQGTLVTVSSTRIQNPDPAVYQLRDSKSSDKSVCLFTDFDSQTNVSQSKDSDVYITDKTVLDMRSMDFKSNSAVAWSNKSDFACANAFNNSIIPEDTFFPSPESSCGTITQGLAVSTISSFFPPGYQVSFCLVMVLLFAVDTGLYFSVKTNIRSSTRDWKDHKFKWRKDPQDK

SEQ ID NO: 2200 - protein, 741 aa, synthetic construct
MALPVTALLLPLALLLHAARPDDIQLTQSPSSLSASVGDRVTITCKASQSVDYEGDSFLNWYQQKPGKAPKLLIYAASNLESGVPSRFSGSGSGTDFTLTISSLQPEDFATYYCQQSNEDPLTFGQGTKVEIKRLEDLKNVFPPEVAVFEPSEAEISHTQKATLVCLATGFYPDHVELSWWVNGKEVHSGVSTDPQPLKEQPALNDSRYCLSSRLRVSATFWQNPRNHFRCQVQFYGLSENDEWTQDRAKPVTQIVSAEAWGRADCGSQSFGLLDPKLCYLLDGILFIYGVILTALFLRVKFSRSADAPAYQQGQNQLYNELNLGRREEYDVLDKRRGRDPEMGGKPQRRKNPQEGLYNELQKDKMAEAYSEIGMKGERRRGKGHDGLYQGLSTATKDTYDALHMQALPPRRAKRSGSGATNFSLLKQAGDVEENPGPTSMDWIWRILFLVGAATGAHSFEEVQLVESGGGLVQPGGSLRLSCAASGYTFSSYWIEWVRQAPGKGLEWIGEILPGGGDTNYNEIFKGRATFSADTSKNTAYLQMNSLRAEDTAVYYCTRRVPIRLDYWGQGTLVTVSSTRIQNPDPAVYQLRDSKSSDKSVCLFTDFDSQTNVSQSKDSDVYITDKTVLDMRSMDFKSNSAVAWSNKSDFACANAFNNSIIPEDTFFPSPESSCGTITQGLAVSTISSFFPPGYQVSFCLVMVLLFAVDTGLYFSVKTNIRSSTRDWKDHKFKWRKDPQDK

SEQ ID NO: 2201 - protein, 740 aa, synthetic construct
MALPVTALLLPLALLLHAARPDIQLTQSPSSLSASVGDRVTITCKASQSVDYEGDSFLNWYQQKPGKAPKLLIYAASNLESGVPSRFSGSGSGTDFTLTISSLQPEDFATYYCQQSNEDPLTFGQGTKVEIKRLEDLKNVFPPEVAVFEPSEAEISHTQKATLVCLATGFYPDHVELSWWVNGKEVHSGVSTDPQPLKEQPALNDSRYCLSSRLRVSATFWQNPRNHFRCQVQFYGLSENDEWTQDRAKPVTQIVSAEAWGRADCGSQSFGLLDPKLCYLLDGILFIYGVILTALFLRVKFSRSADAPAYQQGQNQLYNELNLGRREEYDVLDKRRGRDPEMGGKPQRRKNPQEGLYNELQKDKMAEAYSEIGMKGERRRGKGHDGLYQGLSTATKDTYDALHMQALPPRRAKRSGSGATNFSLLKQAGDVEENPGPTSMDWIWRILFLVGAATGAHSFEEVQLVESGGGLVQPGGSLRLSCAASGYTFSSYWIEWVRQAPGKGLEWIGEILPGGGDTNYNEIFKGRATFSADTSKNTAYLQMNSLRAEDTAVYYCTRRVPIRLDYWGQGTLVTVSSTRIQNPDPAVYQLRDSKSSDKSVCLFTDFDSQTNVSQSKDSDVYITDKTVLDMRSMDFKSNSAVAWSNKSDFACANAFNNSIIPEDTFFPSPESSCGTITQGLAVSTISSFFPPGYQVSFCLVMVLLFAVDTGLYFSVKTNIRSSTRDWKDHKFKWRKDPQDK

SEQ ID NO: 2202 - protein, 741 aa, synthetic construct
MALPVTALLLPLALLLHAARPDDIQLTQSPSSLSASVGDRVTITCKASQSVDYDGDSFLNWYQQKPGKAPKLLIYAASNLESGVPSRFSGSGSGTDFTLTISSLQPEDFATYYCQQSNEDPLTFGQGTKVEIKRLEDLKNVFPPEVAVFEPSEAEISHTQKATLVCLATGFYPDHVELSWWVNGKEVHSGVSTDPQPLKEQPALNDSRYCLSSRLRVSATFWQNPRNHFRCQVQFYGLSENDEWTQDRAKPVTQIVSAEAWGRADCGSQSFGLLDPKLCYLLDGILFIYGVILTALFLRVKFSRSADAPAYQQGQNQLYNELNLGRREEYDVLDKRRGRDPEMGGKPQRRKNPQEGLYNELQKDKMAEAYSEIGMKGERRRGKGHDGLYQGLSTATKDTYDALHMQALPPRRAKRSGSGATNFSLLKQAGDVEENPGPTSMDWIWRILFLVGAATGAHSFEEVQLVESGGGLVQPGGSLRLSCAASGYTFSSYWIEWVRQAPGKGLEWIGEILPGGGDTNYNEIFKGRATFSADTSKNTAYLQMNSLRAEDTAVYYCTRRVPIRLDYWGQGTLVTVSSTRIQNPDPAVYQLRDSKSSDKSVCLFTDFDSQTNVSQSKDSDVYITDKTVLDMRSMDFKSNSAVAWSNKSDFACANAFNNSIIPEDTFFPSPESSCGTITQGLAVSTISSFFPPGYQVSFCLVMVLLFAVDTGLYFSVKTNIRSSTRDWKDHKFKWRKDPQDK

SEQ ID NO: 2203 - protein, 740 aa, synthetic construct
MALPVTALLLPLALLLHAARPDIQLTQSPSSLSASVGDRVTITCKASQSVDYDGDSFLNWYQQKPGKAPKLLIYAASNLESGVPSRFSGSGSGTDFTLTISSLQPEDFATYYCQQSNEDPLTFGQGTKVEIKRLEDLKNVFPPEVAVFEPSEAEISHTQKATLVCLATGFYPDHVELSWWVNGKEVHSGVSTDPQPLKEQPALNDSRYCLSSRLRVSATFWQNPRNHFRCQVQFYGLSENDEWTQDRAKPVTQIVSAEAWGRADCGSQSFGLLDPKLCYLLDGILFIYGVILTALFLRVKFSRSADAPAYQQGQNQLYNELNLGRREEYDVLDKRRGRDPEMGGKPQRRKNPQEGLYNELQKDKMAEAYSEIGMKGERRRGKGHDGLYQGLSTATKDTYDALHMQALPPRRAKRSGSGATNFSLLKQAGDVEENPGPTSMDWIWRILFLVGAATGAHSFEEVQLVESGGGLVQPGGSLRLSCAASGYTFSSYWIEWVRQAPGKGLEWIGEILPGGGDTNYNEIFKGRATFSADTSKNTAYLQMNSLRAEDTAVYYCTRRVPIRLDYWGQGTLVTVSSTRIQNPDPAVYQLRDSKSSDKSVCLFTDFDSQTNVSQSKDSDVYITDKTVLDMRSMDFKSNSAVAWSNKSDFACANAFNNSIIPEDTFFPSPESSCGTITQGLAVSTISSFFPPGYQVSFCLVMVLLFAVDTGLYFSVKTNIRSSTRDWKDHKFKWRKDPQDK

SEQ ID NO: 2204 - protein, 739 aa, synthetic construct
MALPVTALLLPLALLLHAARPDIVMTQSPDSLAVSLGERATINCKASQSVDYEGDSFLNWYQQKPGQPPKLLIYAASNLESGVPSRFSGSGSGTDFTLTISSLQPEDVAVYYCQQSNEDPLTFGQGTKVEIKLEDLKNVFPPEVAVFEPSEAEISHTQKATLVCLATGFYPDHVELSWWVNGKEVHSGVSTDPQPLKEQPALNDSRYCLSSRLRVSATFWQNPRNHFRCQVQFYGLSENDEWTQDRAKPVTQIVSAEAWGRADCGSQSFGLLDPKLCYLLDGILFIYGVILTALFLRVKFSRSADAPAYQQGQNQLYNELNLGRREEYDVLDKRRGRDPEMGGKPQRRKNPQEGLYNELQKDKMAEAYSEIGMKGERRRGKGHDGLYQGLSTATKDTYDALHMQALPPRRAKRSGSGATNFSLLKQAGDVEENPGPTSMDWIWRILFLVGAATGAHSFEEVQLVESGGGLVQPGGSLRLSCAASGYTFSSYWIEWVRQAPGKGLEWIGEILPGGGDTNYNEIFKGRATFSADTSKNTAYLQMNSLRAEDTAVYYCTRRVPIRLDYWGQGTLVTVSSTRIQNPDPAVYQLRDSKSSDKSVCLFTDFDSQTNVSQSKDSDVYITDKTVLDMRSMDFKSNSAVAWSNKSDFACANAFNNSIIPEDTFFPSPESSCGTITQGLAVSTISSFFPPGYQVSFCLVMVLLFAVDTGLYFSVKTNIRSSTRDWKDHKFKWRKDPQDK

SEQ ID NO: 2205 - protein, 739 aa, synthetic construct
MALPVTALLLPLALLLHAARPDIVMTQSPDSLAVSLGERATINCKASQSVDYDGDSFLNWYQQKPGQPPKLLIYAASNLESGVPSRFSGSGSGTDFTLTISSLQPEDVAVYYCQQSNDDPLTFGQGTKVEIKLEDLKNVFPPEVAVFEPSEAEISHTQKATLVCLATGFYPDHVELSWWVNGKEVHSGVSTDPQPLKEQPALNDSRYCLSSRLRVSATFWQNPRNHFRCQVQFYGLSENDEWTQDRAKPVTQIVSAEAWGRADCGSQSFGLLDPKLCYLLDGILFIYGVILTALFLRVKFSRSADAPAYQQGQNQLYNELNLGRREEYDVLDKRRGRDPEMGGKPQRRKNPQEGLYNELQKDKMAEAYSEIGMKGERRRGKGHDGLYQGLSTATKDTYDALHMQALPPRRAKRSGSGATNFSLLKQAGDVEENPGPTSMDWIWRILFLVGAATGAHSFEEVQLVESGGGLVQPGGSLRLSCAASGYTFSSYWIEWVRQAPGKGLEWIGEILPGGGDTNYNEIFKGRATFSADTSKNTAYLQMNSLRAEDTAVYYCTRRVPIRLDYWGQGTLVTVSSTRIQNPDPAVYQLRDSKSSDKSVCLFTDFDSQTNVSQSKDSDVYITDKTVLDMRSMDFKSNSAVAWSNKSDFACANAFNNSIIPEDTFFPSPESSCGTITQGLAVSTISSFFPPGYQVSFCLVMVLLFAVDTGLYFSVKTNIRSSTRDWKDHKFKWRKDPQDK

SEQ ID NO: 2206 - protein, 741 aa, synthetic construct
MALPVTALLLPLALLLHAARPDDIQLTQSPSSLSASVGDRVTITCKASQSVDYEGDSFLNWYQQKPGKAPKLLIYAASNLESGVPSRFSGSGSGTDFTLTISSLQPEDFATYYCQQSNEDPLTFGQGTKVEIKRLEDLKNVFPPEVAVFEPSEAEISHTQKATLVCLATGFYPDHVELSWWVNGKEVHSGVSTDPQPLKEQPALNDSRYCLSSRLRVSATFWQNPRNHFRCQVQFYGLSENDEWTQDRAKPVTQIVSAEAWGRADCGSQSFGLLDPKLCYLLDGILFIYGVILTALFLRVKFSRSADAPAYQQGQNQLYNELNLGRREEYDVLDKRRGRDPEMGGKPQRRKNPQEGLYNELQKDKMAEAYSEIGMKGERRRGKGHDGLYQGLSTATKDTYDALHMQALPPRRAKRSGSGATNFSLLKQAGDVEENPGPTSMDWIWRILFLVGAATGAHSFEEVQLVESGGGLVQPGGSLRLSCAASGYTFTSYWIEWVRQAPGKGLEWIGEILPGGGDTNYNEIFKGRATFSADTSKNTAYLQMNSLRAEDTAVYYCTRRVPIRLDYWGQGTLVTVSSTRIQNPDPAVYQLRDSKSSDKSVCLFTDFDSQTNVSQSKDSDVYITDKTVLDMRSMDFKSNSAVAWSNKSDFACANAFNNSIIPEDTFFPSPESSCGTITQGLAVSTISSFFPPGYQVSFCLVMVLLFAVDTGLYFSVKTNIRSSTRDWKDHKFKWRKDPQDK

SEQ ID NO: 2207 - protein, 740 aa, synthetic construct
MALPVTALLLPLALLLHAARPDIQLTQSPSSLSASVGDRVTITCKASQSVDYEGDSFLNWYQQKPGKAPKLLIYAASNLESGVPSRFSGSGSGTDFTLTISSLQPEDFATYYCQQSNEDPLTFGQGTKVEIKRLEDLKNVFPPEVAVFEPSEAEISHTQKATLVCLATGFYPDHVELSWWVNGKEVHSGVSTDPQPLKEQPALNDSRYCLSSRLRVSATFWQNPRNHFRCQVQFYGLSENDEWTQDRAKPVTQIVSAEAWGRADCGSQSFGLLDPKLCYLLDGILFIYGVILTALFLRVKFSRSADAPAYQQGQNQLYNELNLGRREEYDVLDKRRGRDPEMGGKPQRRKNPQEGLYNELQKDKMAEAYSEIGMKGERRRGKGHDGLYQGLSTATKDTYDALHMQALPPRRAKRSGSGATNFSLLKQAGDVEENPGPTSMDWIWRILFLVGAATGAHSFEEVQLVESGGGLVQPGGSLRLSCAASGYTFTSYWIEWVRQAPGKGLEWIGEILPGGGDTNYNEIFKGRATFSADTSKNTAYLQMNSLRAEDTAVYYCTRRVPIRLDYWGQGTLVTVSSTRIQNPDPAVYQLRDSKSSDKSVCLFTDFDSQTNVSQSKDSDVYITDKTVLDMRSMDFKSNSAVAWSNKSDFACANAFNNSIIPEDTFFPSPESSCGTITQGLAVSTISSFFPPGYQVSFCLVMVLLFAVDTGLYFSVKTNIRSSTRDWKDHKFKWRKDPQDK

SEQ ID NO: 2208 - protein, 741 aa, synthetic construct; identical to SEQ ID NO: 2206

SEQ ID NO: 2209 - protein, 741 aa, synthetic construct
MALPVTALLLPLALLLHAARPDDIQLTQSPSSLSASVGDRVTITCKASQSVDYDGDSFLNWYQQKPGKAPKLLIYAASNLESGVPSRFSGSGSGTDFTLTISSLQPEDFATYYCQQSNEDPLTFGQGTKVEIKRLEDLKNVFPPEVAVFEPSEAEISHTQKATLVCLATGFYPDHVELSWWVNGKEVHSGVSTDPQPLKEQPALNDSRYCLSSRLRVSATFWQNPRNHFRCQVQFYGLSENDEWTQDRAKPVTQIVSAEAWGRADCGSQSFGLLDPKLCYLLDGILFIYGVILTALFLRVKFSRSADAPAYQQGQNQLYNELNLGRREEYDVLDKRRGRDPEMGGKPQRRKNPQEGLYNELQKDKMAEAYSEIGMKGERRRGKGHDGLYQGLSTATKDTYDALHMQALPPRRAKRSGSGATNFSLLKQAGDVEENPGPTSMDWIWRILFLVGAATGAHSFEEVQLVESGGGLVQPGGSLRLSCAASGYTFTSYWIEWVRQAPGKGLEWIGEILPGGGDTNYNEIFKGRATFSADTSKNTAYLQMNSLRAEDTAVYYCTRRVPIRLDYWGQGTLVTVSSTRIQNPDPAVYQLRDSKSSDKSVCLFTDFDSQTNVSQSKDSDVYITDKTVLDMRSMDFKSNSAVAWSNKSDFACANAFNNSIIPEDTFFPSPESSCGTITQGLAVSTISSFFPPGYQVSFCLVMVLLFAVDTGLYFSVKTNIRSSTRDWKDHKFKWRKDPQDK

SEQ ID NO: 2210 - protein, 740 aa, synthetic construct
MALPVTALLLPLALLLHAARPDIQLTQSPSSLSASVGDRVTITCKASQSVDYDGDSFLNWYQQKPGKAPKLLIYAASNLESGVPSRFSGSGSGTDFTLTISSLQPEDFATYYCQQSNEDPLTFGQGTKVEIKRLEDLKNVFPPEVAVFEPSEAEISHTQKATLVCLATGFYPDHVELSWWVNGKEVHSGVSTDPQPLKEQPALNDSRYCLSSRLRVSATFWQNPRNHFRCQVQFYGLSENDEWTQDRAKPVTQIVSAEAWGRADCGSQSFGLLDPKLCYLLDGILFIYGVILTALFLRVKFSRSADAPAYQQGQNQLYNELNLGRREEYDVLDKRRGRDPEMGGKPQRRKNPQEGLYNELQKDKMAEAYSEIGMKGERRRGKGHDGLYQGLSTATKDTYDALHMQALPPRRAKRSGSGATNFSLLKQAGDVEENPGPTSMDWIWRILFLVGAATGAHSFEEVQLVESGGGLVQPGGSLRLSCAASGYTFTSYWIEWVRQAPGKGLEWIGEILPGGGDTNYNEIFKGRATFSADTSKNTAYLQMNSLRAEDTAVYYCTRRVPIRLDYWGQGTLVTVSSTRIQNPDPAVYQLRDSKSSDKSVCLFTDFDSQTNVSQSKDSDVYITDKTVLDMRSMDFKSNSAVAWSNKSDFACANAFNNSIIPEDTFFPSPESSCGTITQGLAVSTISSFFPPGYQVSFCLVMVLLFAVDTGLYFSVKTNIRSSTRDWKDHKFKWRKDPQDK

SEQ ID NO: 2211 - protein, 739 aa, synthetic construct
MALPVTALLLPLALLLHAARPDIVMTQSPDSLAVSLGERATINCKASQSVDYEGDSFLNWYQQKPGQPPKLLIYAASNLESGVPSRFSGSGSGTDFTLTISSLQPEDVAVYYCQQSNEDPLTFGQGTKVEIKLEDLKNVFPPEVAVFEPSEAEISHTQKATLVCLATGFYPDHVELSWWVNGKEVHSGVSTDPQPLKEQPALNDSRYCLSSRLRVSATFWQNPRNHFRCQVQFYGLSENDEWTQDRAKPVTQIVSAEAWGRADCGSQSFGLLDPKLCYLLDGILFIYGVILTALFLRVKFSRSADAPAYQQGQNQLYNELNLGRREEYDVLDKRRGRDPEMGGKPQRRKNPQEGLYNELQKDKMAEAYSEIGMKGERRRGKGHDGLYQGLSTATKDTYDALHMQALPPRRAKRSGSGATNFSLLKQAGDVEENPGPTSMDWIWRILFLVGAATGAHSFEEVQLVESGGGLVQPGGSLRLSCAASGYTFTSYWIEWVRQAPGKGLEWIGEILPGGGDTNYNEIFKGRATFSADTSKNTAYLQMNSLRAEDTAVYYCTRRVPIRLDYWGQGTLVTVSSTRIQNPDPAVYQLRDSKSSDKSVCLFTDFDSQTNVSQSKDSDVYITDKTVLDMRSMDFKSNSAVAWSNKSDFACANAFNNSIIPEDTFFPSPESSCGTITQGLAVSTISSFFPPGYQVSFCLVMVLLFAVDTGLYFSVKTNIRSSTRDWKDHKFKWRKDPQDK

SEQ ID NO: 2212 - protein, 739 aa, synthetic construct
MALPVTALLLPLALLLHAARPDIVMTQSPDSLAVSLGERATINCKASQSVDYDGDSFLNWYQQKPGQPPKLLIYAASNLESGVPSRFSGSGSGTDFTLTISSLQPEDVAVYYCQQSNDDPLTFGQGTKVEIKLEDLKNVFPPEVAVFEPSEAEISHTQKATLVCLATGFYPDHVELSWWVNGKEVHSGVSTDPQPLKEQPALNDSRYCLSSRLRVSATFWQNPRNHFRCQVQFYGLSENDEWTQDRAKPVTQIVSAEAWGRADCGSQSFGLLDPKLCYLLDGILFIYGVILTALFLRVKFSRSADAPAYQQGQNQLYNELNLGRREEYDVLDKRRGRDPEMGGKPQRRKNPQEGLYNELQKDKMAEAYSEIGMKGERRRGKGHDGLYQGLSTATKDTYDALHMQALPPRRAKRSGSGATNFSLLKQAGDVEENPGPTSMDWIWRILFLVGAATGAHSFEEVQLVESGGGLVQPGGSLRLSCAASGYTFTSYWIEWVRQAPGKGLEWIGEILPGGGDTNYNEIFKGRATFSADTSKNTAYLQMNSLRAEDTAVYYCTRRVPIRLDYWGQGTLVTVSSTRIQNPDPAVYQLRDSKSSDKSVCLFTDFDSQTNVSQSKDSDVYITDKTVLDMRSMDFKSNSAVAWSNKSDFACANAFNNSIIPEDTFFPSPESSCGTITQGLAVSTISSFFPPGYQVSFCLVMVLLFAVDTGLYFSVKTNIRSSTRDWKDHKFKWRKDPQDK

SEQ ID NO: 2213 - protein, 739 aa, synthetic construct; identical to SEQ ID NO: 2205

SEQ ID NO: 2214 - protein, 740 aa, synthetic construct
MALPVTALLLPLALLLHAARPDDIQLTQSPSSLSASVGDRVTITCKASQSVDYEGDSFLNWYQQKPGKAPKLLIYAASNLESGVPSRFSGSGSGTDFTLTISSLQPEDFATYYCQQSNEDPLTFGQGTKVEIKRLEDLKNVFPPEVAVFEPSEAEISHTQKATLVCLATGFYPDHVELSWWVNGKEVHSGVSTDPQPLKEQPALNDSRYCLSSRLRVSATFWQNPRNHFRCQVQFYGLSENDEWTQDRAKPVTQIVSAEAWGRADCGSQSFGLLDPKLCYLLDGILFIYGVILTALFLRVKFSRSADAPAYQQGQNQLYNELNLGRREEYDVLDKRRGRDPEMGGKPQRRKNPQEGLYNELQKDKMAEAYSEIGMKGERRRGKGHDGLYQGLSTATKDTYDALHMQALPPRRAKRSGSGATNFSLLKQAGDVEENPGPTSMDWIWRILFLVGAATGAHSFEVQLVESGGGLVQPGGSLRLSCAASGYTFTSYWIEWVRQAPGKGLEWIGEILPGGGDTNYNEIFKGRATFSADTSKNTAYLQMNSLRAEDTAVYYCTRRVPIRLDYWGQGTLVTVSSTRIQNPDPAVYQLRDSKSSDKSVCLFTDFDSQTNVSQSKDSDVYITDKTVLDMRSMDFKSNSAVAWSNKSDFACANAFNNSIIPEDTFFPSPESSCGTITQGLAVSTISSFFPPGYQVSFCLVMVLLFAVDTGLYFSVKTNIRSSTRDWKDHKFKWRKDPQDK

SEQ ID NO: 2215 - protein, 739 aa, synthetic construct
MALPVTALLLPLALLLHAARPDIQLTQSPSSLSASVGDRVTITCKASQSVDYEGDSFLNWYQQKPGKAPKLLIYAASNLESGVPSRFSGSGSGTDFTLTISSLQPEDFATYYCQQSNEDPLTFGQGTKVEIKRLEDLKNVFPPEVAVFEPSEAEISHTQKATLVCLATGFYPDHVELSWWVNGKEVHSGVSTDPQPLKEQPALNDSRYCLSSRLRVSATFWQNPRNHFRCQVQFYGLSENDEWTQDRAKPVTQIVSAEAWGRADCGSQSFGLLDPKLCYLLDGILFIYGVILTALFLRVKFSRSADAPAYQQGQNQLYNELNLGRREEYDVLDKRRGRDPEMGGKPQRRKNPQEGLYNELQKDKMAEAYSEIGMKGERRRGKGHDGLYQGLSTATKDTYDALHMQALPPRRAKRSGSGATNFSLLKQAGDVEENPGPTSMDWIWRILFLVGAATGAHSFEVQLVESGGGLVQPGGSLRLSCAASGYTFTSYWIEWVRQAPGKGLEWIGEILPGGGDTNYNEIFKGRATFSADTSKNTAYLQMNSLRAEDTAVYYCTRRVPIRLDYWGQGTLVTVSSTRIQNPDPAVYQLRDSKSSDKSVCLFTDFDSQTNVSQSKDSDVYITDKTVLDMRSMDFKSNSAVAWSNKSDFACANAFNNSIIPEDTFFPSPESSCGTITQGLAVSTISSFFPPGYQVSFCLVMVLLFAVDTGLYFSVKTNIRSSTRDWKDHKFKWRKDPQDK

SEQ ID NO: 2216 - protein, 740 aa, synthetic construct; identical to SEQ ID NO: 2214

SEQ ID NO: 2217 - protein, 740 aa, synthetic construct
MALPVTALLLPLALLLHAARPDDIQLTQSPSSLSASVGDRVTITCKASQSVDYDGDSFLNWYQQKPGKAPKLLIYAASNLESGVPSRFSGSGSGTDFTLTISSLQPEDFATYYCQQSNEDPLTFGQGTKVEIKRLEDLKNVFPPEVAVFEPSEAEISHTQKATLVCLATGFYPDHVELSWWVNGKEVHSGVSTDPQPLKEQPALNDSRYCLSSRLRVSATFWQNPRNHFRCQVQFYGLSENDEWTQDRAKPVTQIVSAEAWGRADCGSQSFGLLDPKLCYLLDGILFIYGVILTALFLRVKFSRSADAPAYQQGQNQLYNELNLGRREEYDVLDKRRGRDPEMGGKPQRRKNPQEGLYNELQKDKMAEAYSEIGMKGERRRGKGHDGLYQGLSTATKDTYDALHMQALPPRRAKRSGSGATNFSLLKQAGDVEENPGPTSMDWIWRILFLVGAATGAHSFEVQLVESGGGLVQPGGSLRLSCAASGYTFTSYWIEWVRQAPGKGLEWIGEILPGGGDTNYNEIFKGRATFSADTSKNTAYLQMNSLRAEDTAVYYCTRRVPIRLDYWGQGTLVTVSSTRIQNPDPAVYQLRDSKSSDKSVCLFTDFDSQTNVSQSKDSDVYITDKTVLDMRSMDFKSNSAVAWSNKSDFACANAFNNSIIPEDTFFPSPESSCGTITQGLAVSTISSFFPPGYQVSFCLVMVLLFAVDTGLYFSVKTNIRSSTRDWKDHKFKWRKDPQDK

SEQ ID NO: 2218 - protein, 739 aa, synthetic construct
MALPVTALLLPLALLLHAARPDIQLTQSPSSLSASVGDRVTITCKASQSVDYDGDSFLNWYQQKPGKAPKLLIYAASNLESGVPSRFSGSGSGTDFTLTISSLQPEDFATYYCQQSNEDPLTFGQGTKVEIKRLEDLKNVFPPEVAVFEPSEAEISHTQKATLVCLATGFYPDHVELSWWVNGKEVHSGVSTDPQPLKEQPALNDSRYCLSSRLRVSATFWQNPRNHFRCQVQFYGLSENDEWTQDRAKPVTQIVSAEAWGRADCGSQSFGLLDPKLCYLLDGILFIYGVILTALFLRVKFSRSADAPAYQQGQNQLYNELNLGRREEYDVLDKRRGRDPEMGGKPQRRKNPQEGLYNELQKDKMAEAYSEIGMKGERRRGKGHDGLYQGLSTATKDTYDALHMQALPPRRAKRSGSGATNFSLLKQAGDVEENPGPTSMDWIWRILFLVGAATGAHSFEVQLVESGGGLVQPGGSLRLSCAASGYTFTSYWIEWVRQAPGKGLEWIGEILPGGGDTNYNEIFKGRATFSADTSKNTAYLQMNSLRAEDTAVYYCTRRVPIRLDYWGQGTLVTVSSTRIQNPDPAVYQLRDSKSSDKSVCLFTDFDSQTNVSQSKDSDVYITDKTVLDMRSMDFKSNSAVAWSNKSDFACANAFNNSIIPEDTFFPSPESSCGTITQGLAVSTISSFFPPGYQVSFCLVMVLLFAVDTGLYFSVKTNIRSSTRDWKDHKFKWRKDPQDK

SEQ ID NO: 2219 - protein, 738 aa, synthetic construct
MALPVTALLLPLALLLHAARPDIVMTQSPDSLAVSLGERATINCKASQSVDYEGDSFLNWYQQKPGQPPKLLIYAASNLESGVPSRFSGSGSGTDFTLTISSLQPEDVAVYYCQQSNEDPLTFGQGTKVEIKLEDLKNVFPPEVAVFEPSEAEISHTQKATLVCLATGFYPDHVELSWWVNGKEVHSGVSTDPQPLKEQPALNDSRYCLSSRLRVSATFWQNPRNHFRCQVQFYGLSENDEWTQDRAKPVTQIVSAEAWGRADCGSQSFGLLDPKLCYLLDGILFIYGVILTALFLRVKFSRSADAPAYQQGQNQLYNELNLGRREEYDVLDKRRGRDPEMGGKPQRRKNPQEGLYNELQKDKMAEAYSEIGMKGERRRGKGHDGLYQGLSTATKDTYDALHMQALPPRRAKRSGSGATNFSLLKQAGDVEENPGPTSMDWIWRILFLVGAATGAHSFEVQLVESGGGLVQPGGSLRLSCAASGYTFTSYWIEWVRQAPGKGLEWIGEILPGGGDTNYNEIFKGRATFSADTSKNTAYLQMNSLRAEDTAVYYCTRRVPIRLDYWGQGTLVTVSSTRIQNPDPAVYQLRDSKSSDKSVCLFTDFDSQTNVSQSKDSDVYITDKTVLDMRSMDFKSNSAVAWSNKSDFACANAFNNSIIPEDTFFPSPESSCGTITQGLAVSTISSFFPPGYQVSFCLVMVLLFAVDTGLYFSVKTNIRSSTRDWKDHKFKWRKDPQDK

SEQ ID NO: 2220 - protein, 738 aa, synthetic construct
MALPVTALLLPLALLLHAARPDIVMTQSPDSLAVSLGERATINCKASQSVDYDGDSFLNWYQQKPGQPPKLLIYAASNLESGVPSRFSGSGSGTDFTLTISSLQPEDVAVYYCQQSNDDPLTFGQGTKVEIKLEDLKNVFPPEVAVFEPSEAEISHTQKATLVCLATGFYPDHVELSWWVNGKEVHSGVSTDPQPLKEQPALNDSRYCLSSRLRVSATFWQNPRNHFRCQVQFYGLSENDEWTQDRAKPVTQIVSAEAWGRADCGSQSFGLLDPKLCYLLDGILFIYGVILTALFLRVKFSRSADAPAYQQGQNQLYNELNLGRREEYDVLDKRRGRDPEMGGKPQRRKNPQEGLYNELQKDKMAEAYSEIGMKGERRRGKGHDGLYQGLSTATKDTYDALHMQALPPRRAKRSGSGATNFSLLKQAGDVEENPGPTSMDWIWRILFLVGAATGAHSFEVQLVESGGGLVQPGGSLRLSCAASGYTFTSYWIEWVRQAPGKGLEWIGEILPGGGDTNYNEIFKGRATFSADTSKNTAYLQMNSLRAEDTAVYYCTRRVPIRLDYWGQGTLVTVSSTRIQNPDPAVYQLRDSKSSDKSVCLFTDFDSQTNVSQSKDSDVYITDKTVLDMRSMDFKSNSAVAWSNKSDFACANAFNNSIIPEDTFFPSPESSCGTITQGLAVSTISSFFPPGYQVSFCLVMVLLFAVDTGLYFSVKTNIRSSTRDWKDHKFKWRKDPQDK

SEQ ID NO: 2221 - protein, 738 aa, synthetic construct
MALPVTALLLPLALLLHAARPDIVMTQSPDSLAVSLGERATINCKASQSVDYDGDSFLNWYQQKPGQPPKLLIYAASNLESGVPSRFSGSGSGTDFTLTISSLQPEDVAVYYCQQSNDDPLTFGQGTKVEIKLEDLKNVFPPEVAVFEPSEAEISHTQKATLVCLATGFYPDHVELSWWVNGKEVHSGVSTDPQPLKEQPALNDSRYCLSSRLRVSATFWQNPRNHFRCQVQFYGLSENDEWTQDRAKPVTQIVSAEAWGRADCGSQSFGLLDPKLCYLLDGILFIYGVILTALFLRVKFSRSADAPAYQQGQNQLYNELNLGRREEYDVLDKRRGRDPEMGGKPQRRKNPQEGLYNELQKDKMAEAYSEIGMKGERRRGKGHDGLYQGLSTATKDTYDALHMQALPPRRAKRSGSGATNFSLLKQAGDVEENPGPTSMDWIWRILFLVGAATGAHSFEVQLVESGGGLVQPGGSLRLSCAASGYTFSSYWIEWVRQAPGKGLEWIGEILPGGGDTNYNEIFKGRATFSADTSKNTAYLQMNSLRAEDTAVYYCTRRVPIRLDYWGQGTLVTVSSTRIQNPDPAVYQLRDSKSSDKSVCLFTDFDSQTNVSQSKDSDVYITDKTVLDMRSMDFKSNSAVAWSNKSDFACANAFNNSIIPEDTFFPSPESSCGTITQGLAVSTISSFFPPGYQVSFCLVMVLLFAVDTGLYFSVKTNIRSSTRDWKDHKFKWRKDPQDK

SEQ ID NO: 2222 - protein, 739 aa, synthetic construct
MALPVTALLLPLALLLHAARPDDIQLTQSPSSLSASVGDRVTITCKASQSVDYEGDSFLNWYQQKPGKAPKLLIYAASNLESGVPSRFSGSGSGTDFTLTISSLQPEDFATYYCQQSNEDPLTFGQGTKVEIKRLEDLKNVFPPEVAVFEPSEAEISHTQKATLVCLATGFYPDHVELSWWVNGKEVHSGVSTDPQPLKEQPALNDSRYCLSSRLRVSATFWQNPRNHFRCQVQFYGLSENDEWTQDRAKPVTQIVSAEAWGRADCGSQSFGLLDPKLCYLLDGILFIYGVILTALFLRVKFSRSADAPAYQQGQNQLYNELNLGRREEYDVLDKRRGRDPEMGGKPRRKNPQEGLYNELQKDKMAEAYSEIGMKGERRRGKGHDGLYQGLSTATKDTYDALHMQALPPRRAKRSGSGATNFSLLKQAGDVEENPGPTSMDWIWRILFLVGAATGAHSFEVQLVESGGGLVQPGGSLRLSCAASGYTFSSYWIEWVRQAPGKGLEWIGEILPGGGDTNYNEIFKGRATFSADTSKNTAYLQMNSLRAEDTAVYYCTRRVPIRLDYWGQGTLVTVSSTRIQNPDPAVYQLRDSKSSDKSVCLFTDFDSQTNVSQSKDSDVYITDKTVLDMRSMDFKSNSAVAWSNKSDFACANAFNNSIIPEDTFFPSPESSCGTITQGLAVSTISSFFPPGYQVSFCLVMVLLFAVDTGLYFSVKTNIRSSTRDWKDHKFKWRKDPQDK

SEQ ID NO: 2223 - protein, 738 aa, synthetic construct
MALPVTALLLPLALLLHAARPDIQLTQSPSSLSASVGDRVTITCKASQSVDYEGDSFLNWYQQKPGKAPKLLIYAASNLESGVPSRFSGSGSGTDFTLTISSLQPEDFATYYCQQSNEDPLTFGQGTKVEIKRLEDLKNVFPPEVAVFEPSEAEISHTQKATLVCLATGFYPDHVELSWWVNGKEVHSGVSTDPQPLKEQPALNDSRYCLSSRLRVSATFWQNPRNHFRCQVQFYGLSENDEWTQDRAKPVTQIVSAEAWGRADCGSQSFGLLDPKLCYLLDGILFIYGVILTALFLRVKFSRSADAPAYQQGQNQLYNELNLGRREEYDVLDKRRGRDPEMGGKPRRKNPQEGLYNELQKDKMAEAYSEIGMKGERRRGKGHDGLYQGLSTATKDTYDALHMQALPPRRAKRSGSGATNFSLLKQAGDVEENPGPTSMDWIWRILFLVGAATGAHSFEVQLVESGGGLVQPGGSLRLSCAASGYTFSSYWIEWVRQAPGKGLEWIGEILPGGGDTNYNEIFKGRATFSADTSKNTAYLQMNSLRAEDTAVYYCTRRVPIRLDYWGQGTLVTVSSTRIQNPDPAVYQLRDSKSSDKSVCLFTDFDSQTNVSQSKDSDVYITDKTVLDMRSMDFKSNSAVAWSNKSDFACANAFNNSIIPEDTFFPSPESSCGTITQGLAVSTISSFFPPGYQVSFCLVMVLLFAVDTGLYFSVKTNIRSSTRDWKDHKFKWRKDPQDK

SEQ ID NO: 2224 - protein, 740 aa, synthetic construct
MALPVTALLLPLALLLHAARPDDIQLTQSPSSLSASVGDRVTITCKASQSVDYEGDSFLNWYQQKPGKAPKLLIYAASNLESGVPSRFSGSGSGTDFTLTISSLQPEDFATYYCQQSNEDPLTFGQGTKVEIKRLEDLKNVFPPEVAVFEPSEAEISHTQKATLVCLATGFYPDHVELSWWVNGKEVHSGVSTDPQPLKEQPALNDSRYCLSSRLRVSATFWQNPRNHFRCQVQFYGLSENDEWTQDRAKPVTQIVSAEAWGRADCGSQSFGLLDPKLCYLLDGILFIYGVILTALFLRVKFSRSADAPAYQQGQNQLYNELNLGRREEYDVLDKRRGRDPEMGGKPRRKNPQEGLYNELQKDKMAEAYSEIGMKGERRRGKGHDGLYQGLSTATKDTYDALHMQALPPRRAKRSGSGATNFSLLKQAGDVEENPGPTSMDWIWRILFLVGAATGAHSFEEVQLVESGGGLVQPGGSLRLSCAASGYTFSSYWIEWVRQAPGKGLEWIGEILPGGGDTNYNEIFKGRATFSADTSKNTAYLQMNSLRAEDTAVYYCTRRVPIRLDYWGQGTLVTVSSTRIQNPDPAVYQLRDSKSSDKSVCLFTDFDSQTNVSQSKDSDVYITDKTVLDMRSMDFKSNSAVAWSNKSDFACANAFNNSIIPEDTFFPSPESSCGTITQGLAVSTISSFFPPGYQVSFCLVMVLLFAVDTGLYFSVKTNIRSSTRDWKDHKFKWRKDPQDK

SEQ ID NO: 2225 - protein, 739 aa, synthetic construct
MALPVTALLLPLALLLHAARPDIQLTQSPSSLSASVGDRVTITCKASQSVDYEGDSFLNWYQQKPGKAPKLLIYAASNLESGVPSRFSGSGSGTDFTLTISSLQPEDFATYYCQQSNEDPLTFGQGTKVEIKRLEDLKNVFPPEVAVFEPSEAEISHTQKATLVCLATGFYPDHVELSWWVNGKEVHSGVSTDPQPLKEQPALNDSRYCLSSRLRVSATFWQNPRNHFRCQVQFYGLSENDEWTQDRAKPVTQIVSAEAWGRADCGSQSFGLLDPKLCYLLDGILFIYGVILTALFLRVKFSRSADAPAYQQGQNQLYNELNLGRREEYDVLDKRRGRDPEMGGKPRRKNPQEGLYNELQKDKMAEAYSEIGMKGERRRGKGHDGLYQGLSTATKDTYDALHMQALPPRRAKRSGSGATNFSLLKQAGDVEENPGPTSMDWIWRILFLVGAATGAHSFEEVQLVESGGGLVQPGGSLRLSCAASGYTFSSYWIEWVRQAPGKGLEWIGEILPGGGDTNYNEIFKGRATFSADTSKNTAYLQMNSLRAEDTAVYYCTRRVPIRLDYWGQGTLVTVSSTRIQNPDPAVYQLRDSKSSDKSVCLFTDFDSQTNVSQSKDSDVYITDKTVLDMRSMDFKSNSAVAWSNKSDFACANAFNNSIIPEDTFFPSPESSCGTITQGLAVSTISSFFPPGYQVSFCLVMVLLFAVDTGLYFSVKTNIRSSTRDWKDHKFKWRKDPQDK

SEQ ID NO: 2226 - protein, 740 aa, synthetic construct
MALPVTALLLPLALLLHAARPDDIQLTQSPSSLSASVGDRVTITCKASQSVDYDGDSFLNWYQQKPGKAPKLLIYAASNLESGVPSRFSGSGSGTDFTLTISSLQPEDFATYYCQQSNEDPLTFGQGTKVEIKRLEDLKNVFPPEVAVFEPSEAEISHTQKATLVCLATGFYPDHVELSWWVNGKEVHSGVSTDPQPLKEQPALNDSRYCLSSRLRVSATFWQNPRNHFRCQVQFYGLSENDEWTQDRAKPVTQIVSAEAWGRADCGSQSFGLLDPKLCYLLDGILFIYGVILTALFLRVKFSRSADAPAYQQGQNQLYNELNLGRREEYDVLDKRRGRDPEMGGKPRRKNPQEGLYNELQKDKMAEAYSEIGMKGERRRGKGHDGLYQGLSTATKDTYDALHMQALPPRRAKRSGSGATNFSLLKQAGDVEENPGPTSMDWIWRILFLVGAATGAHSFEEVQLVESGGGLVQPGGSLRLSCAASGYTFSSYWIEWVRQAPGKGLEWIGEILPGGGDTNYNEIFKGRATFSADTSKNTAYLQMNSLRAEDTAVYYCTRRVPIRLDYWGQGTLVTVSSTRIQNPDPAVYQLRDSKSSDKSVCLFTDFDSQTNVSQSKDSDVYITDKTVLDMRSMDFKSNSAVAWSNKSDFACANAFNNSIIPEDTFFPSPESSCGTITQGLAVSTISSFFPPGYQVSFCLVMVLLFAVDTGLYFSVKTNIRSSTRDWKDHKFKWRKDPQDK

SEQ ID NO: 2227 - protein, 739 aa, synthetic construct
MALPVTALLLPLALLLHAARPDIQLTQSPSSLSASVGDRVTITCKASQSVDYDGDSFLNWYQQKPGKAPKLLIYAASNLESGVPSRFSGSGSGTDFTLTISSLQPEDFATYYCQQSNEDPLTFGQGTKVEIKRLEDLKNVFPPEVAVFEPSEAEISHTQKATLVCLATGFYPDHVELSWWVNGKEVHSGVSTDPQPLKEQPALNDSRYCLSSRLRVSATFWQNPRNHFRCQVQFYGLSENDEWTQDRAKPVTQIVSAEAWGRADCGSQSFGLLDPKLCYLLDGILFIYGVILTALFLRVKFSRSADAPAYQQGQNQLYNELNLGRREEYDVLDKRRGRDPEMGGKPRRKNPQEGLYNELQKDKMAEAYSEIGMKGERRRGKGHDGLYQGLSTATKDTYDALHMQALPPRRAKRSGSGATNFSLLKQAGDVEENPGPTSMDWIWRILFLVGAATGAHSFEEVQLVESGGGLVQPGGSLRLSCAASGYTFSSYWIEWVRQAPGKGLEWIGEILPGGGDTNYNEIFKGRATFSADTSKNTAYLQMNSLRAEDTAVYYCTRRVPIRLDYWGQGTLVTVSSTRIQNPDPAVYQLRDSKSSDKSVCLFTDFDSQTNVSQSKDSDVYITDKTVLDMRSMDFKSNSAVAWSNKSDFACANAFNNSIIPEDTFFPSPESSCGTITQGLAVSTISSFFPPGYQVSFCLVMVLLFAVDTGLYFSVKTNIRSSTRDWKDHKFKWRKDPQDK

SEQ ID NO: 2228 - protein, 738 aa, synthetic construct
MALPVTALLLPLALLLHAARPDIVMTQSPDSLAVSLGERATINCKASQSVDYEGDSFLNWYQQKPGQPPKLLIYAASNLESGVPSRFSGSGSGTDFTLTISSLQPEDVAVYYCQQSNEDPLTFGQGTKVEIKLEDLKNVFPPEVAVFEPSEAEISHTQKATLVCLATGFYPDHVELSWWVNGKEVHSGVSTDPQPLKEQPALNDSRYCLSSRLRVSATFWQNPRNHFRCQVQFYGLSENDEWTQDRAKPVTQIVSAEAWGRADCGSQSFGLLDPKLCYLLDGILFIYGVILTALFLRVKFSRSADAPAYQQGQNQLYNELNLGRREEYDVLDKRRGRDPEMGGKPRRKNPQEGLYNELQKDKMAEAYSEIGMKGERRRGKGHDGLYQGLSTATKDTYDALHMQALPPRRAKRSGSGATNFSLLKQAGDVEENPGPTSMDWIWRILFLVGAATGAHSFEEVQLVESGGGLVQPGGSLRLSCAASGYTFSSYWIEWVRQAPGKGLEWIGEILPGGGDTNYNEIFKGRATFSADTSKNTAYLQMNSLRAEDTAVYYCTRRVPIRLDYWGQGTLVTVSSTRIQNPDPAVYQLRDSKSSDKSVCLFTDFDSQTNVSQSKDSDVYITDKTVLDMRSMDFKSNSAVAWSNKSDFACANAFNNSIIPEDTFFPSPESSCGTITQGLAVSTISSFFPPGYQVSFCLVMVLLFAVDTGLYFSVKTNIRSSTRDWKDHKFKWRKDPQDK

SEQ ID NO: 2229 - protein, 738 aa, synthetic construct
MALPVTALLLPLALLLHAARPDIVMTQSPDSLAVSLGERATINCKASQSVDYDGDSFLNWYQQKPGQPPKLLIYAASNLESGVPSRFSGSGSGTDFTLTISSLQPEDVAVYYCQQSNDDPLTFGQGTKVEIKLEDLKNVFPPEVAVFEPSEAEISHTQKATLVCLATGFYPDHVELSWWVNGKEVHSGVSTDPQPLKEQPALNDSRYCLSSRLRVSATFWQNPRNHFRCQVQFYGLSENDEWTQDRAKPVTQIVSAEAWGRADCGSQSFGLLDPKLCYLLDGILFIYGVILTALFLRVKFSRSADAPAYQQGQNQLYNELNLGRREEYDVLDKRRGRDPEMGGKPRRKNPQEGLYNELQKDKMAEAYSEIGMKGERRRGKGHDGLYQGLSTATKDTYDALHMQALPPRRAKRSGSGATNFSLLKQAGDVEENPGPTSMDWIWRILFLVGAATGAHSFEEVQLVESGGGLVQPGGSLRLSCAASGYTFSSYWIEWVRQAPGKGLEWIGEILPGGGDTNYNEIFKGRATFSADTSKNTAYLQMNSLRAEDTAVYYCTRRVPIRLDYWGQGTLVTVSSTRIQNPDPAVYQLRDSKSSDKSVCLFTDFDSQTNVSQSKDSDVYITDKTVLDMRSMDFKSNSAVAWSNKSDFACANAFNNSIIPEDTFFPSPESSCGTITQGLAVSTISSFFPPGYQVSFCLVMVLLFAVDTGLYFSVKTNIRSSTRDWKDHKFKWRKDPQDK

SEQ ID NO: 2230 - protein, 740 aa, synthetic construct
MALPVTALLLPLALLLHAARPDDIQLTQSPSSLSASVGDRVTITCKASQSVDYEGDSFLNWYQQKPGKAPKLLIYAASNLESGVPSRFSGSGSGTDFTLTISSLQPEDFATYYCQQSNEDPLTFGQGTKVEIKRLEDLKNVFPPEVAVFEPSEAEISHTQKATLVCLATGFYPDHVELSWWVNGKEVHSGVSTDPQPLKEQPALNDSRYCLSSRLRVSATFWQNPRNHFRCQVQFYGLSENDEWTQDRAKPVTQIVSAEAWGRADCGSQSFGLLDPKLCYLLDGILFIYGVILTALFLRVKFSRSADAPAYQQGQNQLYNELNLGRREEYDVLDKRRGRDPEMGGKPRRKNPQEGLYNELQKDKMAEAYSEIGMKGERRRGKGHDGLYQGLSTATKDTYDALHMQALPPRRAKRSGSGATNFSLLKQAGDVEENPGPTSMDWIWRILFLVGAATGAHSFEEVQLVESGGGLVQPGGSLRLSCAASGYTFTSYWIEWVRQAPGKGLEWIGEILPGGGDTNYNEIFKGRATFSADTSKNTAYLQMNSLRAEDTAVYYCTRRVPIRLDYWGQGTLVTVSSTRIQNPDPAVYQLRDSKSSDKSVCLFTDFDSQTNVSQSKDSDVYITDKTVLDMRSMDFKSNSAVAWSNKSDFACANAFNNSIIPEDTFFPSPESSCGTITQGLAVSTISSFFPPGYQVSFCLVMVLLFAVDTGLYFSVKTNIRSSTRDWKDHKFKWRKDPQDK

SEQ ID NO: 2231 - protein, 739 aa, synthetic construct
MALPVTALLLPLALLLHAARPDIQLTQSPSSLSASVGDRVTITCKASQSVDYEGDSFLNWYQQKPGKAPKLLIYAASNLESGVPSRFSGSGSGTDFTLTISSLQPEDFATYYCQQSNEDPLTFGQGTKVEIKRLEDLKNVFPPEVAVFEPSEAEISHTQKATLVCLATGFYPDHVELSWWVNGKEVHSGVSTDPQPLKEQPALNDSRYCLSSRLRVSATFWQNPRNHFRCQVQFYGLSENDEWTQDRAKPVTQIVSAEAWGRADCGSQSFGLLDPKLCYLLDGILFIYGVILTALFLRVKFSRSADAPAYQQGQNQLYNELNLGRREEYDVLDKRRGRDPEMGGKPRRKNPQEGLYNELQKDKMAEAYSEIGMKGERRRGKGHDGLYQGLSTATKDTYDALHMQALPPRRAKRSGSGATNFSLLKQAGDVEENPGPTSMDWIWRILFLVGAATGAHSFEEVQLVESGGGLVQPGGSLRLSCAASGYTFTSYWIEWVRQAPGKGLEWIGEILPGGGDTNYNEIFKGRATFSADTSKNTAYLQMNSLRAEDTAVYYCTRRVPIRLDYWGQGTLVTVSSTRIQNPDPAVYQLRDSKSSDKSVCLFTDFDSQTNVSQSKDSDVYITDKTVLDMRSMDFKSNSAVAWSNKSDFACANAFNNSIIPEDTFFPSPESSCGTITQGLAVSTISSFFPPGYQVSFCLVMVLLFAVDTGLYFSVKTNIRSSTRDWKDHKFKWRKDPQDK

SEQ ID NO: 2232 - protein, 740 aa, synthetic construct; identical to SEQ ID NO: 2230

SEQ ID NO: 2233 - protein, 740 aa, synthetic construct
MALPVTALLLPLALLLHAARPDDIQLTQSPSSLSASVGDRVTITCKASQSVDYDGDSFLNWYQQKPGKAPKLLIYAASNLESGVPSRFSGSGSGTDFTLTISSLQPEDFATYYCQQSNEDPLTFGQGTKVEIKRLEDLKNVFPPEVAVFEPSEAEISHTQKATLVCLATGFYPDHVELSWWVNGKEVHSGVSTDPQPLKEQPALNDSRYCLSSRLRVSATFWQNPRNHFRCQVQFYGLSENDEWTQDRAKPVTQIVSAEAWGRADCGSQSFGLLDPKLCYLLDGILFIYGVILTALFLRVKFSRSADAPAYQQGQNQLYNELNLGRREEYDVLDKRRGRDPEMGGKPRRKNPQEGLYNELQKDKMAEAYSEIGMKGERRRGKGHDGLYQGLSTATKDTYDALHMQALPPRRAKRSGSGATNFSLLKQAGDVEENPGPTSMDWIWRILFLVGAATGAHSFEEVQLVESGGGLVQPGGSLRLSCAASGYTFTSYWIEWVRQAPGKGLEWIGEILPGGGDTNYNEIFKGRATFSADTSKNTAYLQMNSLRAEDTAVYYCTRRVPIRLDYWGQGTLVTVSSTRIQNPDPAVYQLRDSKSSDKSVCLFTDFDSQTNVSQSKDSDVYITDKTVLDMRSMDFKSNSAVAWSNKSDFACANAFNNSIIPEDTFFPSPESSCGTITQGLAVSTISSFFPPGYQVSFCLVMVLLFAVDTGLYFSVKTNIRSSTRDWKDHKFKWRKDPQDK

SEQ ID NO: 2234 - protein, 739 aa, synthetic construct
MALPVTALLLPLALLLHAARPDIQLTQSPSSLSASVGDRVTITCKASQSVDYDGDSFLNWYQQKPGKAPKLLIYAASNLESGVPSRFSGSGSGTDFTLTISSLQPEDFATYYCQQSNEDPLTFGQGTKVEIKRLEDLKNVFPPEVAVFEPSEAEISHTQKATLVCLATGFYPDHVELSWWVNGKEVHSGVSTDPQPLKEQPALNDSRYCLSSRLRVSATFWQNPRNHFRCQVQFYGLSENDEWTQDRAKPVTQIVSAEAWGRADCGSQSFGLLDPKLCYLLDGILFIYGVILTALFLRVKFSRSADAPAYQQGQNQLYNELNLGRREEYDVLDKRRGRDPEMGGKPRRKNPQEGLYNELQKDKMAEAYSEIGMKGERRRGKGHDGLYQGLSTATKDTYDALHMQALPPRRAKRSGSGATNFSLLKQAGDVEENPGPTSMDWIWRILFLVGAATGAHSFEEVQLVESGGGLVQPGGSLRLSCAASGYTFTSYWIEWVRQAPGKGLEWIGEILPGGGDTNYNEIFKGRATFSADTSKNTAYLQMNSLRAEDTAVYYCTRRVPIRLDYWGQGTLVTVSSTRIQNPDPAVYQLRDSKSSDKSVCLFTDFDSQTNVSQSKDSDVYITDKTVLDMRSMDFKSNSAVAWSNKSDFACANAFNNSIIPEDTFFPSPESSCGTITQGLAVSTISSFFPPGYQVSFCLVMVLLFAVDTGLYFSVKTNIRSSTRDWKDHKFKWRKDPQDK

SEQ ID NO: 2235 - protein, 738 aa, synthetic construct
MALPVTALLLPLALLLHAARPDIVMTQSPDSLAVSLGERATINCKASQSVDYEGDSFLNWYQQKPGQPPKLLIYAASNLESGVPSRFSGSGSGTDFTLTISSLQPEDVAVYYCQQSNEDPLTFGQGTKVEIKLEDLKNVFPPEVAVFEPSEAEISHTQKATLVCLATGFYPDHVELSWWVNGKEVHSGVSTDPQPLKEQPALNDSRYCLSSRLRVSATFWQNPRNHFRCQVQFYGLSENDEWTQDRAKPVTQIVSAEAWGRADCGSQSFGLLDPKLCYLLDGILFIYGVILTALFLRVKFSRSADAPAYQQGQNQLYNELNLGRREEYDVLDKRRGRDPEMGGKPRRKNPQEGLYNELQKDKMAEAYSEIGMKGERRRGKGHDGLYQGLSTATKDTYDALHMQALPPRRAKRSGSGATNFSLLKQAGDVEENPGPTSMDWIWRILFLVGAATGAHSFEEVQLVESGGGLVQPGGSLRLSCAASGYTFTSYWIEWVRQAPGKGLEWIGEILPGGGDTNYNEIFKGRATFSADTSKNTAYLQMNSLRAEDTAVYYCTRRVPIRLDYWGQGTLVTVSSTRIQNPDPAVYQLRDSKSSDKSVCLFTDFDSQTNVSQSKDSDVYITDKTVLDMRSMDFKSNSAVAWSNKSDFACANAFNNSIIPEDTFFPSPESSCGTITQGLAVSTISSFFPPGYQVSFCLVMVLLFAVDTGLYFSVKTNIRSSTRDWKDHKFKWRKDPQDK

SEQ ID NO: 2236 - protein, 738 aa, synthetic construct
MALPVTALLLPLALLLHAARPDIVMTQSPDSLAVSLGERATINCKASQSVDYDGDSFLNWYQQKPGQPPKLLIYAASNLESGVPSRFSGSGSGTDFTLTISSLQPEDVAVYYCQQSNDDPLTFGQGTKVEIKLEDLKNVFPPEVAVFEPSEAEISHTQKATLVCLATGFYPDHVELSWWVNGKEVHSGVSTDPQPLKEQPALNDSRYCLSSRLRVSATFWQNPRNHFRCQVQFYGLSENDEWTQDRAKPVTQIVSAEAWGRADCGSQSFGLLDPKLCYLLDGILFIYGVILTALFLRVKFSRSADAPAYQQGQNQLYNELNLGRREEYDVLDKRRGRDPEMGGKPRRKNPQEGLYNELQKDKMAEAYSEIGMKGERRRGKGHDGLYQGLSTATKDTYDALHMQALPPRRAKRSGSGATNFSLLKQAGDVEENPGPTSMDWIWRILFLVGAATGAHSFEEVQLVESGGGLVQPGGSLRLSCAASGYTFTSYWIEWVRQAPGKGLEWIGEILPGGGDTNYNEIFKGRATFSADTSKNTAYLQMNSLRAEDTAVYYCTRRVPIRLDYWGQGTLVTVSSTRIQNPDPAVYQLRDSKSSDKSVCLFTDFDSQTNVSQSKDSDVYITDKTVLDMRSMDFKSNSAVAWSNKSDFACANAFNNSIIPEDTFFPSPESSCGTITQGLAVSTISSFFPPGYQVSFCLVMVLLFAVDTGLYFSVKTNIRSSTRDWKDHKFKWRKDPQDK

SEQ ID NO: 2237 - protein, 738 aa, synthetic construct; identical to SEQ ID NO: 2229

SEQ ID NO: 2238 - protein, 739 aa, synthetic construct
MALPVTALLLPLALLLHAARPDDIQLTQSPSSLSASVGDRVTITCKASQSVDYEGDSFLNWYQQKPGKAPKLLIYAASNLESGVPSRFSGSGSGTDFTLTISSLQPEDFATYYCQQSNEDPLTFGQGTKVEIKRLEDLKNVFPPEVAVFEPSEAEISHTQKATLVCLATGFYPDHVELSWWVNGKEVHSGVSTDPQPLKEQPALNDSRYCLSSRLRVSATFWQNPRNHFRCQVQFYGLSENDEWTQDRAKPVTQIVSAEAWGRADCGSQSFGLLDPKLCYLLDGILFIYGVILTALFLRVKFSRSADAPAYQQGQNQLYNELNLGRREEYDVLDKRRGRDPEMGGKPRRKNPQEGLYNELQKDKMAEAYSEIGMKGERRRGKGHDGLYQGLSTATKDTYDALHMQALPPRRAKRSGSGATNFSLLKQAGDVEENPGPTSMDWIWRILFLVGAATGAHSFEVQLVESGGGLVQPGGSLRLSCAASGYTFTSYWIEWVRQAPGKGLEWIGEILPGGGDTNYNEIFKGRATFSADTSKNTAYLQMNSLRAEDTAVYYCTRRVPIRLDYWGQGTLVTVSSTRIQNPDPAVYQLRDSKSSDKSVCLFTDFDSQTNVSQSKDSDVYITDKTVLDMRSMDFKSNSAVAWSNKSDFACANAFNNSIIPEDTFFPSPESSCGTITQGLAVSTISSFFPPGYQVSFCLVMVLLFAVDTGLYFSVKTNIRSSTRDWKDHKFKWRKDPQDK

SEQ ID NO: 2239 - protein, 738 aa, synthetic construct
MALPVTALLLPLALLLHAARPDIQLTQSPSSLSASVGDRVTITCKASQSVDYEGDSFLNWYQQKPGKAPKLLIYAASNLESGVPSRFSGSGSGTDFTLTISSLQPEDFATYYCQQSNEDPLTFGQGTKVEIKRLEDLKNVFPPEVAVFEPSEAEISHTQKATLVCLATGFYPDHVELSWWVNGKEVHSGVSTDPQPLKEQPALNDSRYCLSSRLRVSATFWQNPRNHFRCQVQFYGLSENDEWTQDRAKPVTQIVSAEAWGRADCGSQSFGLLDPKLCYLLDGILFIYGVILTALFLRVKFSRSADAPAYQQGQNQLYNELNLGRREEYDVLDKRRGRDPEMGGKPRRKNPQEGLYNELQKDKMAEAYSEIGMKGERRRGKGHDGLYQGLSTATKDTYDALHMQALPPRRAKRSGSGATNFSLLKQAGDVEENPGPTSMDWIWRILFLVGAATGAHSFEVQLVESGGGLVQPGGSLRLSCAASGYTFTSYWIEWVRQAPGKGLEWIGEILPGGGDTNYNEIFKGRATFSADTSKNTAYLQMNSLRAEDTAVYYCTRRVPIRLDYWGQGTLVTVSSTRIQNPDPAVYQLRDSKSSDKSVCLFTDFDSQTNVSQSKDSDVYITDKTVLDMRSMDFKSNSAVAWSNKSDFACANAFNNSIIPEDTFFPSPESSCGTITQGLAVSTISSFFPPGYQVSFCLVMVLLFAVDTGLYFSVKTNIRSSTRDWKDHKFKWRKDPQDK

SEQ ID NO: 2240 - protein, 739 aa, synthetic construct; identical to SEQ ID NO: 2238

SEQ ID NO: 2241 - protein, 739 aa, synthetic construct
MALPVTALLLPLALLLHAARPDDIQLTQSPSSLSASVGDRVTITCKASQSVDYDGDSFLNWYQQKPGKAPKLLIYAASNLESGVPSRFSGSGSGTDFTLTISSLQPEDFATYYCQQSNEDPLTFGQGTKVEIKRLEDLKNVFPPEVAVFEPSEAEISHTQKATLVCLATGFYPDHVELSWWVNGKEVHSGVSTDPQPLKEQPALNDSRYCLSSRLRVSATFWQNPRNHFRCQVQFYGLSENDEWTQDRAKPVTQIVSAEAWGRADCGSQSFGLLDPKLCYLLDGILFIYGVILTALFLRVKFSRSADAPAYQQGQNQLYNELNLGRREEYDVLDKRRGRDPEMGGKPRRKNPQEGLYNELQKDKMAEAYSEIGMKGERRRGKGHDGLYQGLSTATKDTYDALHMQALPPRRAKRSGSGATNFSLLKQAGDVEENPGPTSMDWIWRILFLVGAATGAHSFEVQLVESGGGLVQPGGSLRLSCAASGYTFTSYWIEWVRQAPGKGLEWIGEILPGGGDTNYNEIFKGRATFSADTSKNTAYLQMNSLRAEDTAVYYCTRRVPIRLDYWGQGTLVTVSSTRIQNPDPAVYQLRDSKSSDKSVCLFTDFDSQTNVSQSKDSDVYITDKTVLDMRSMDFKSNSAVAWSNKSDFACANAFNNSIIPEDTFFPSPESSCGTITQGLAVSTISSFFPPGYQVSFCLVMVLLFAVDTGLYFSVKTNIRSSTRDWKDHKFKWRKDPQDK

SEQ ID NO: 2242 - protein, 738 aa, synthetic construct
MALPVTALLLPLALLLHAARPDIQLTQSPSSLSASVGDRVTITCKASQSVDYDGDSFLNWYQQKPGKAPKLLIYAASNLESGVPSRFSGSGSGTDFTLTISSLQPEDFATYYCQQSNEDPLTFGQGTKVEIKRLEDLKNVFPPEVAVFEPSEAEISHTQKATLVCLATGFYPDHVELSWWVNGKEVHSGVSTDPQPLKEQPALNDSRYCLSSRLRVSATFWQNPRNHFRCQVQFYGLSENDEWTQDRAKPVTQIVSAEAWGRADCGSQSFGLLDPKLCYLLDGILFIYGVILTALFLRVKFSRSADAPAYQQGQNQLYNELNLGRREEYDVLDKRRGRDPEMGGKPRRKNPQEGLYNELQKDKMAEAYSEIGMKGERRRGKGHDGLYQGLSTATKDTYDALHMQALPPRRAKRSGSGATNFSLLKQAGDVEENPGPTSMDWIWRILFLVGAATGAHSFEVQLVESGGGLVQPGGSLRLSCAASGYTFTSYWIEWVRQAPGKGLEWIGEILPGGGDTNYNEIFKGRATFSADTSKNTAYLQMNSLRAEDTAVYYCTRRVPIRLDYWGQGTLVTVSSTRIQNPDPAVYQLRDSKSSDKSVCLFTDFDSQTNVSQSKDSDVYITDKTVLDMRSMDFKSNSAVAWSNKSDFACANAFNNSIIPEDTFFPSPESSCGTITQGLAVSTISSFFPPGYQVSFCLVMVLLFAVDTGLYFSVKTNIRSSTRDWKDHKFKWRKDPQDK

SEQ ID NO: 2243 - protein, 737 aa, synthetic construct
MALPVTALLLPLALLLHAARPDIVMTQSPDSLAVSLGERATINCKASQSVDYEGDSFLNWYQQKPGQPPKLLIYAASNLESGVPSRFSGSGSGTDFTLTISSLQPEDVAVYYCQQSNEDPLTFGQGTKVEIKLEDLKNVFPPEVAVFEPSEAEISHTQKATLVCLATGFYPDHVELSWWVNGKEVHSGVSTDPQPLKEQPALNDSRYCLSSRLRVSATFWQNPRNHFRCQVQFYGLSENDEWTQDRAKPVTQIVSAEAWGRADCGSQSFGLLDPKLCYLLDGILFIYGVILTALFLRVKFSRSADAPAYQQGQNQLYNELNLGRREEYDVLDKRRGRDPEMGGKPRRKNPQEGLYNELQKDKMAEAYSEIGMKGERRRGKGHDGLYQGLSTATKDTYDALHMQALPPRRAKRSGSGATNFSLLKQAGDVEENPGPTSMDWIWRILFLVGAATGAHSFEVQLVESGGGLVQPGGSLRLSCAASGYTFTSYWIEWVRQAPGKGLEWIGEILPGGGDTNYNEIFKGRATFSADTSKNTAYLQMNSLRAEDTAVYYCTRRVPIRLDYWGQGTLVTVSSTRIQNPDPAVYQLRDSKSSDKSVCLFTDFDSQTNVSQSKDSDVYITDKTVLDMRSMDFKSNSAVAWSNKSDFACANAFNNSIIPEDTFFPSPESSCGTITQGLAVSTISSFFPPGYQVSFCLVMVLLFAVDTGLYFSVKTNIRSSTRDWKDHKFKWRKDPQDK

SEQ ID NO: 2244 - protein, 737 aa, synthetic construct
MALPVTALLLPLALLLHAARPDIVMTQSPDSLAVSLGERATINCKASQSVDYDGDSFLNWYQQKPGQPPKLLIYAASNLESGVPSRFSGSGSGTDFTLTISSLQPEDVAVYYCQQSNDDPLTFGQGTKVEIKLEDLKNVFPPEVAVFEPSEAEISHTQKATLVCLATGFYPDHVELSWWVNGKEVHSGVSTDPQPLKEQPALNDSRYCLSSRLRVSATFWQNPRNHFRCQVQFYGLSENDEWTQDRAKPVTQIVSAEAWGRADCGSQSFGLLDPKLCYLLDGILFIYGVILTALFLRVKFSRSADAPAYQQGQNQLYNELNLGRREEYDVLDKRRGRDPEMGGKPRRKNPQEGLYNELQKDKMAEAYSEIGMKGERRRGKGHDGLYQGLSTATKDTYDALHMQALPPRRAKRSGSGATNFSLLKQAGDVEENPGPTSMDWIWRILFLVGAATGAHSFEVQLVESGGGLVQPGGSLRLSCAASGYTFTSYWIEWVRQAPGKGLEWIGEILPGGGDTNYNEIFKGRATFSADTSKNTAYLQMNSLRAEDTAVYYCTRRVPIRLDYWGQGTLVTVSSTRIQNPDPAVYQLRDSKSSDKSVCLFTDFDSQTNVSQSKDSDVYITDKTVLDMRSMDFKSNSAVAWSNKSDFACANAFNNSIIPEDTFFPSPESSCGTITQGLAVSTISSFFPPGYQVSFCLVMVLLFAVDTGLYFSVKTNIRSSTRDWKDHKFKWRKDPQDK

SEQ ID NO: 2245 - protein, 737 aa, synthetic construct
MALPVTALLLPLALLLHAARPDIVMTQSPDSLAVSLGERATINCKASQSVDYDGDSFLNWYQQKPGQPPKLLIYAASNLESGVPSRFSGSGSGTDFTLTISSLQPEDVAVYYCQQSNDDPLTFGQGTKVEIKLEDLKNVFPPEVAVFEPSEAEISHTQKATLVCLATGFYPDHVELSWWVNGKEVHSGVSTDPQPLKEQPALNDSRYCLSSRLRVSATFWQNPRNHFRCQVQFYGLSENDEWTQDRAKPVTQIVSAEAWGRADCGSQSFGLLDPKLCYLLDGILFIYGVILTALFLRVKFSRSADAPAYQQGQNQLYNELNLGRREEYDVLDKRRGRDPEMGGKPRRKNPQEGLYNELQKDKMAEAYSEIGMKGERRRGKGHDGLYQGLSTATKDTYDALHMQALPPRRAKRSGSGATNFSLLKQAGDVEENPGPTSMDWIWRILFLVGAATGAHSFEVQLVESGGGLVQPGGSLRLSCAASGYTFSSYWIEWVRQAPGKGLEWIGEILPGGGDTNYNEIFKGRATFSADTSKNTAYLQMNSLRAEDTAVYYCTRRVPIRLDYWGQGTLVTVSSTRIQNPDPAVYQLRDSKSSDKSVCLFTDFDSQTNVSQSKDSDVYITDKTVLDMRSMDFKSNSAVAWSNKSDFACANAFNNSIIPEDTFFPSPESSCGTITQGLAVSTISSFFPPGYQVSFCLVMVLLFAVDTGLYFSVKTNIRSSTRDWKDHKFKWRKDPQDK

SEQ ID NO: 2246 - protein, 816 aa, synthetic construct
MALPVTALLLPLALLLHAARPDDIQLTQSPSSLSASVGDRVTITCKASQSVDYEGDSFLNWYQQKPGKAPKLLIYAASNLESGVPSRFSGSGSGTDFTLTISSLQPEDFATYYCQQSNEDPLTFGQGTKVEIKRLEDLKNVFPPEVAVFEPSEAEISHTQKATLVCLATGFYPDHVELSWWVNGKEVHSGVSTDPQPLKEQPALNDSRYCLSSRLRVSATFWQNPRNHFRCQVQFYGLSENDEWTQDRAKPVTQIVSAEAWGRADCGSQSFGLLDPKLCYLLDGILFIYGVILTALFLRVKFSRSADAPAYQQGQNQLYNELNLGRREEYDVLDKRRGRDPEMGGKPRRKNPQEGLYNELQKDKMAEAYSEIGMKGERRRGKGHDGLYQGLSTATKDTYDALHMQALPPRRAKRSGSGATNFSLLKQAGDVEENPGPTSMDWIWRILFLVGAATGAHSFEVQLVESGGGLVQPGGSLRLSCAASGYTFSSYWIEWVRQAPGKGLEWIGEILPGGGDTNYNEIFKGRATFSADTSKNTAYLQMNSLRAEDTAVYYCTRRVPIRLDYWGQGTLVTVSSTRIQNPDPAVYQLRDSKSSDKSVCLFTDFDSQTNVSQSKDSDVYITDKTVLDMRSMDFKSNSAVAWSNKSDFACANAFNNSIIPEDTFFPSPESSCGTQSFGLLDPKLCYLLDGILFIYGVILTALFLRVKFSRSADAPAYQQGQNQLYNELNLGRREEYDVLDKRRGRDPEMGGKPRRKNPQEGLYNELQKDKMAEAYSEIGMKGERRRGKGHDGLYQGLSTATKDTYDALHMQALPPR

SEQ ID NO: 2247 - protein, 815 aa, synthetic construct
MALPVTALLLPLALLLHAARPDIQLTQSPSSLSASVGDRVTITCKASQSVDYEGDSFLNWYQQKPGKAPKLLIYAASNLESGVPSRFSGSGSGTDFTLTISSLQPEDFATYYCQQSNEDPLTFGQGTKVEIKRLEDLKNVFPPEVAVFEPSEAEISHTQKATLVCLATGFYPDHVELSWWVNGKEVHSGVSTDPQPLKEQPALNDSRYCLSSRLRVSATFWQNPRNHFRCQVQFYGLSENDEWTQDRAKPVTQIVSAEAWGRADCGSQSFGLLDPKLCYLLDGILFIYGVILTALFLRVKFSRSADAPAYQQGQNQLYNELNLGRREEYDVLDKRRGRDPEMGGKPRRKNPQEGLYNELQKDKMAEAYSEIGMKGERRRGKGHDGLYQGLSTATKDTYDALHMQALPPRRAKRSGSGATNFSLLKQAGDVEENPGPTSMDWIWRILFLVGAATGAHSFEVQLVESGGGLVQPGGSLRLSCAASGYTFSSYWIEWVRQAPGKGLEWIGEILPGGGDTNYNEIFKGRATFSADTSKNTAYLQMNSLRAEDTAVYYCTRRVPIRLDYWGQGTLVTVSSTRIQNPDPAVYQLRDSKSSDKSVCLFTDFDSQTNVSQSKDSDVYITDKTVLDMRSMDFKSNSAVAWSNKSDFACANAFNNSIIPEDTFFPSPESSCGTQSFGLLDPKLCYLLDGILFIYGVILTALFLRVKFSRSADAPAYQQGQNQLYNELNLGRREEYDVLDKRRGRDPEMGGKPRRKNPQEGLYNELQKDKMAEAYSEIGMKGERRRGKGHDGLYQGLSTATKDTYDALHMQALPPR

SEQ ID NO: 2248 - protein, 817 aa, synthetic construct
MALPVTALLLPLALLLHAARPDDIQLTQSPSSLSASVGDRVTITCKASQSVDYEGDSFLNWYQQKPGKAPKLLIYAASNLESGVPSRFSGSGSGTDFTLTISSLQPEDFATYYCQQSNEDPLTFGQGTKVEIKRLEDLKNVFPPEVAVFEPSEAEISHTQKATLVCLATGFYPDHVELSWWVNGKEVHSGVSTDPQPLKEQPALNDSRYCLSSRLRVSATFWQNPRNHFRCQVQFYGLSENDEWTQDRAKPVTQIVSAEAWGRADCGSQSFGLLDPKLCYLLDGILFIYGVILTALFLRVKFSRSADAPAYQQGQNQLYNELNLGRREEYDVLDKRRGRDPEMGGKPRRKNPQEGLYNELQKDKMAEAYSEIGMKGERRRGKGHDGLYQGLSTATKDTYDALHMQALPPRRAKRSGSGATNFSLLKQAGDVEENPGPTSMDWIWRILFLVGAATGAHSFEEVQLVESGGGLVQPGGSLRLSCAASGYTFSSYWIEWVRQAPGKGLEWIGEILPGGGDTNYNEIFKGRATFSADTSKNTAYLQMNSLRAEDTAVYYCTRRVPIRLDYWGQGTLVTVSSTRIQNPDPAVYQLRDSKSSDKSVCLFTDFDSQTNVSQSKDSDVYITDKTVLDMRSMDFKSNSAVAWSNKSDFACANAFNNSIIPEDTFFPSPESSCGTQSFGLLDPKLCYLLDGILFIYGVILTALFLRVKFSRSADAPAYQQGQNQLYNELNLGRREEYDVLDKRRGRDPEMGGKPRRKNPQEGLYNELQKDKMAEAYSEIGMKGERRRGKGHDGLYQGLSTATKDTYDALHMQALPPR

SEQ ID NO: 2249 - protein, 816 aa, synthetic construct
MALPVTALLLPLALLLHAARPDIQLTQSPSSLSASVGDRVTITCKASQSVDYEGDSFLNWYQQKPGKAPKLLIYAASNLESGVPSRFSGSGSGTDFTLTISSLQPEDFATYYCQQSNEDPLTFGQGTKVEIKRLEDLKNVFPPEVAVFEPSEAEISHTQKATLVCLATGFYPDHVELSWWVNGKEVHSGVSTDPQPLKEQPALNDSRYCLSSRLRVSATFWQNPRNHFRCQVQFYGLSENDEWTQDRAKPVTQIVSAEAWGRADCGSQSFGLLDPKLCYLLDGILFIYGVILTALFLRVKFSRSADAPAYQQGQNQLYNELNLGRREEYDVLDKRRGRDPEMGGKPRRKNPQEGLYNELQKDKMAEAYSEIGMKGERRRGKGHDGLYQGLSTATKDTYDALHMQALPPRRAKRSGSGATNFSLLKQAGDVEENPGPTSMDWIWRILFLVGAATGAHSFEEVQLVESGGGLVQPGGSLRLSCAASGYTFSSYWIEWVRQAPGKGLEWIGEILPGGGDTNYNEIFKGRATFSADTSKNTAYLQMNSLRAEDTAVYYCTRRVPIRLDYWGQGTLVTVSSTRIQNPDPAVYQLRDSKSSDKSVCLFTDFDSQTNVSQSKDSDVYITDKTVLDMRSMDFKSNSAVAWSNKSDFACANAFNNSIIPEDTFFPSPESSCGTQSFGLLDPKLCYLLDGILFIYGVILTALFLRVKFSRSADAPAYQQGQNQLYNELNLGRREEYDVLDKRRGRDPEMGGKPRRKNPQEGLYNELQKDKMAEAYSEIGMKGERRRGKGHDGLYQGLSTATKDTYDALHMQALPPR

SEQ ID NO: 2250 - protein, 817 aa, synthetic construct
MALPVTALLLPLALLLHAARPDDIQLTQSPSSLSASVGDRVTITCKASQSVDYDGDSFLNWYQQKPGKAPKLLIYAASNLESGVPSRFSGSGSGTDFTLTISSLQPEDFATYYCQQSNEDPLTFGQGTKVEIKRLEDLKNVFPPEVAVFEPSEAEISHTQKATLVCLATGFYPDHVELSWWVNGKEVHSGVSTDPQPLKEQPALNDSRYCLSSRLRVSATFWQNPRNHFRCQVQFYGLSENDEWTQDRAKPVTQIVSAEAWGRADCGSQSFGLLDPKLCYLLDGILFIYGVILTALFLRVKFSRSADAPAYQQGQNQLYNELNLGRREEYDVLDKRRGRDPEMGGKPRRKNPQEGLYNELQKDKMAEAYSEIGMKGERRRGKGHDGLYQGLSTATKDTYDALHMQALPPRRAKRSGSGATNFSLLKQAGDVEENPGPTSMDWIWRILFLVGAATGAHSFEEVQLVESGGGLVQPGGSLRLSCAASGYTFSSYWIEWVRQAPGKGLEWIGEILPGGGDTNYNEIFKGRATFSADTSKNTAYLQMNSLRAEDTAVYYCTRRVPIRLDYWGQGTLVTVSSTRIQNPDPAVYQLRDSKSSDKSVCLFTDFDSQTNVSQSKDSDVYITDKTVLDMRSMDFKSNSAVAWSNKSDFACANAFNNSIIPEDTFFPSPESSCGTQSFGLLDPKLCYLLDGILFIYGVILTALFLRVKFSRSADAPAYQQGQNQLYNELNLGRREEYDVLDKRRGRDPEMGGKPRRKNPQEGLYNELQKDKMAEAYSEIGMKGERRRGKGHDGLYQGLSTATKDTYDALHMQALPPR

SEQ ID NO: 2251 - protein, 816 aa, synthetic construct
MALPVTALLLPLALLLHAARPDIQLTQSPSSLSASVGDRVTITCKASQSVDYDGDSFLNWYQQKPGKAPKLLIYAASNLESGVPSRFSGSGSGTDFTLTISSLQPEDFATYYCQQSNEDPLTFGQGTKVEIKRLEDLKNVFPPEVAVFEPSEAEISHTQKATLVCLATGFYPDHVELSWWVNGKEVHSGVSTDPQPLKEQPALNDSRYCLSSRLRVSATFWQNPRNHFRCQVQFYGLSENDEWTQDRAKPVTQIVSAEAWGRADCGSQSFGLLDPKLCYLLDGILFIYGVILTALFLRVKFSRSADAPAYQQGQNQLYNELNLGRREEYDVLDKRRGRDPEMGGKPRRKNPQEGLYNELQKDKMAEAYSEIGMKGERRRGKGHDGLYQGLSTATKDTYDALHMQALPPRRAKRSGSGATNFSLLKQAGDVEENPGPTSMDWIWRILFLVGAATGAHSFEEVQLVESGGGLVQPGGSLRLSCAASGYTFSSYWIEWVRQAPGKGLEWIGEILPGGGDTNYNEIFKGRATFSADTSKNTAYLQMNSLRAEDTAVYYCTRRVPIRLDYWGQGTLVTVSSTRIQNPDPAVYQLRDSKSSDKSVCLFTDFDSQTNVSQSKDSDVYITDKTVLDMRSMDFKSNSAVAWSNKSDFACANAFNNSIIPEDTFFPSPESSCGTQSFGLLDPKLCYLLDGILFIYGVILTALFLRVKFSRSADAPAYQQGQNQLYNELNLGRREEYDVLDKRRGRDPEMGGKPRRKNPQEGLYNELQKDKMAEAYSEIGMKGERRRGKGHDGLYQGLSTATKDTYDALHMQALPPR

SEQ ID NO: 2252 - protein, 815 aa, synthetic construct
MALPVTALLLPLALLLHAARPDIVMTQSPDSLAVSLGERATINCKASQSVDYEGDSFLNWYQQKPGQPPKLLIYAASNLESGVPSRFSGSGSGTDFTLTISSLQPEDVAVYYCQQSNEDPLTFGQGTKVEIKLEDLKNVFPPEVAVFEPSEAEISHTQKATLVCLATGFYPDHVELSWWVNGKEVHSGVSTDPQPLKEQPALNDSRYCLSSRLRVSATFWQNPRNHFRCQVQFYGLSENDEWTQDRAKPVTQIVSAEAWGRADCGSQSFGLLDPKLCYLLDGILFIYGVILTALFLRVKFSRSADAPAYQQGQNQLYNELNLGRREEYDVLDKRRGRDPEMGGKPRRKNPQEGLYNELQKDKMAEAYSEIGMKGERRRGKGHDGLYQGLSTATKDTYDALHMQALPPRRAKRSGSGATNFSLLKQAGDVEENPGPTSMDWIWRILFLVGAATGAHSFEEVQLVESGGGLVQPGGSLRLSCAASGYTFSSYWIEWVRQAPGKGLEWIGEILPGGGDTNYNEIFKGRATFSADTSKNTAYLQMNSLRAEDTAVYYCTRRVPIRLDYWGQGTLVTVSSTRIQNPDPAVYQLRDSKSSDKSVCLFTDFDSQTNVSQSKDSDVYITDKTVLDMRSMDFKSNSAVAWSNKSDFACANAFNNSIIPEDTFFPSPESSCGTQSFGLLDPKLCYLLDGILFIYGVILTALFLRVKFSRSADAPAYQQGQNQLYNELNLGRREEYDVLDKRRGRDPEMGGKPRRKNPQEGLYNELQKDKMAEAYSEIGMKGERRRGKGHDGLYQGLSTATKDTYDALHMQALPPR

SEQ ID NO: 2253 - protein, 815 aa, synthetic construct
MALPVTALLLPLALLLHAARPDIVMTQSPDSLAVSLGERATINCKASQSVDYDGDSFLNWYQQKPGQPPKLLIYAASNLESGVPSRFSGSGSGTDFTLTISSLQPEDVAVYYCQQSNDDPLTFGQGTKVEIKLEDLKNVFPPEVAVFEPSEAEISHTQKATLVCLATGFYPDHVELSWWVNGKEVHSGVSTDPQPLKEQPALNDSRYCLSSRLRVSATFWQNPRNHFRCQVQFYGLSENDEWTQDRAKPVTQIVSAEAWGRADCGSQSFGLLDPKLCYLLDGILFIYGVILTALFLRVKFSRSADAPAYQQGQNQLYNELNLGRREEYDVLDKRRGRDPEMGGKPRRKNPQEGLYNELQKDKMAEAYSEIGMKGERRRGKGHDGLYQGLSTATKDTYDALHMQALPPRRAKRSGSGATNFSLLKQAGDVEENPGPTSMDWIWRILFLVGAATGAHSFEEVQLVESGGGLVQPGGSLRLSCAASGYTFSSYWIEWVRQAPGKGLEWIGEILPGGGDTNYNEIFKGRATFSADTSKNTAYLQMNSLRAEDTAVYYCTRRVPIRLDYWGQGTLVTVSSTRIQNPDPAVYQLRDSKSSDKSVCLFTDFDSQTNVSQSKDSDVYITDKTVLDMRSMDFKSNSAVAWSNKSDFACANAFNNSIIPEDTFFPSPESSCGTQSFGLLDPKLCYLLDGILFIYGVILTALFLRVKFSRSADAPAYQQGQNQLYNELNLGRREEYDVLDKRRGRDPEMGGKPRRKNPQEGLYNELQKDKMAEAYSEIGMKGERRRGKGHDGLYQGLSTATKDTYDALHMQALPPR

SEQ ID NO: 2254 - protein, 817 aa, synthetic construct
MALPVTALLLPLALLLHAARPDDIQLTQSPSSLSASVGDRVTITCKASQSVDYEGDSFLNWYQQKPGKAPKLLIYAASNLESGVPSRFSGSGSGTDFTLTISSLQPEDFATYYCQQSNEDPLTFGQGTKVEIKRLEDLKNVFPPEVAVFEPSEAEISHTQKATLVCLATGFYPDHVELSWWVNGKEVHSGVSTDPQPLKEQPALNDSRYCLSSRLRVSATFWQNPRNHFRCQVQFYGLSENDEWTQDRAKPVTQIVSAEAWGRADCGSQSFGLLDPKLCYLLDGILFIYGVILTALFLRVKFSRSADAPAYQQGQNQLYNELNLGRREEYDVLDKRRGRDPEMGGKPRRKNPQEGLYNELQKDKMAEAYSEIGMKGERRRGKGHDGLYQGLSTATKDTYDALHMQALPPRRAKRSGSGATNFSLLKQAGDVEENPGPTSMDWIWRILFLVGAATGAHSFEEVQLVESGGGLVQPGGSLRLSCAASGYTFTSYWIEWVRQAPGKGLEWIGEILPGGGDTNYNEIFKGRATFSADTSKNTAYLQMNSLRAEDTAVYYCTRRVPIRLDYWGQGTLVTVSSTRIQNPDPAVYQLRDSKSSDKSVCLFTDFDSQTNVSQSKDSDVYITDKTVLDMRSMDFKSNSAVAWSNKSDFACANAFNNSIIPEDTFFPSPESSCGTQSFGLLDPKLCYLLDGILFIYGVILTALFLRVKFSRSADAPAYQQGQNQLYNELNLGRREEYDVLDKRRGRDPEMGGKPRRKNPQEGLYNELQKDKMAEAYSEIGMKGERRRGKGHDGLYQGLSTATKDTYDALHMQALPPR

SEQ ID NO: 2255 - protein, 816 aa, synthetic construct
MALPVTALLLPLALLLHAARPDIQLTQSPSSLSASVGDRVTITCKASQSVDYEGDSFLNWYQQKPGKAPKLLIYAASNLESGVPSRFSGSGSGTDFTLTISSLQPEDFATYYCQQSNEDPLTFGQGTKVEIKRLEDLKNVFPPEVAVFEPSEAEISHTQKATLVCLATGFYPDHVELSWWVNGKEVHSGVSTDPQPLKEQPALNDSRYCLSSRLRVSATFWQNPRNHFRCQVQFYGLSENDEWTQDRAKPVTQIVSAEAWGRADCGSQSFGLLDPKLCYLLDGILFIYGVILTALFLRVKFSRSADAPAYQQGQNQLYNELNLGRREEYDVLDKRRGRDPEMGGKPRRKNPQEGLYNELQKDKMAEAYSEIGMKGERRRGKGHDGLYQGLSTATKDTYDALHMQALPPRRAKRSGSGATNFSLLKQAGDVEENPGPTSMDWIWRILFLVGAATGAHSFEEVQLVESGGGLVQPGGSLRLSCAASGYTFTSYWIEWVRQAPGKGLEWIGEILPGGGDTNYNEIFKGRATFSADTSKNTAYLQMNSLRAEDTAVYYCTRRVPIRLDYWGQGTLVTVSSTRIQNPDPAVYQLRDSKSSDKSVCLFTDFDSQTNVSQSKDSDVYITDKTVLDMRSMDFKSNSAVAWSNKSDFACANAFNNSIIPEDTFFPSPESSCGTQSFGLLDPKLCYLLDGILFIYGVILTALFLRVKFSRSADAPAYQQGQNQLYNELNLGRREEYDVLDKRRGRDPEMGGKPRRKNPQEGLYNELQKDKMAEAYSEIGMKGERRRGKGHDGLYQGLSTATKDTYDALHMQALPPR

SEQ ID NO: 2256 - protein, 817 aa, synthetic construct; identical to SEQ ID NO: 2254

SEQ ID NO: 2257 - protein, 817 aa, synthetic construct
MALPVTALLLPLALLLHAARPDDIQLTQSPSSLSASVGDRVTITCKASQSVDYDGDSFLNWYQQKPGKAPKLLIYAASNLESGVPSRFSGSGSGTDFTLTISSLQPEDFATYYCQQSNEDPLTFGQGTKVEIKRLEDLKNVFPPEVAVFEPSEAEISHTQKATLVCLATGFYPDHVELSWWVNGKEVHSGVSTDPQPLKEQPALNDSRYCLSSRLRVSATFWQNPRNHFRCQVQFYGLSENDEWTQDRAKPVTQIVSAEAWGRADCGSQSFGLLDPKLCYLLDGILFIYGVILTALFLRVKFSRSADAPAYQQGQNQLYNELNLGRREEYDVLDKRRGRDPEMGGKPRRKNPQEGLYNELQKDKMAEAYSEIGMKGERRRGKGHDGLYQGLSTATKDTYDALHMQALPPRRAKRSGSGATNFSLLKQAGDVEENPGPTSMDWIWRILFLVGAATGAHSFEEVQLVESGGGLVQPGGSLRLSCAASGYTFTSYWIEWVRQAPGKGLEWIGEILPGGGDTNYNEIFKGRATFSADTSKNTAYLQMNSLRAEDTAVYYCTRRVPIRLDYWGQGTLVTVSSTRIQNPDPAVYQLRDSKSSDKSVCLFTDFDSQTNVSQSKDSDVYITDKTVLDMRSMDFKSNSAVAWSNKSDFACANAFNNSIIPEDTFFPSPESSCGTQSFGLLDPKLCYLLDGILFIYGVILTALFLRVKFSRSADAPAYQQGQNQLYNELNLGRREEYDVLDKRRGRDPEMGGKPRRKNPQEGLYNELQKDKMAEAYSEIGMKGERRRGKGHDGLYQGLSTATKDTYDALHMQALPPR

SEQ ID NO: 2258 - protein, 816 aa, synthetic construct
MALPVTALLLPLALLLHAARPDIQLTQSPSSLSASVGDRVTITCKASQSVDYDGDSFLNWYQQKPGKAPKLLIYAASNLESGVPSRFSGSGSGTDFTLTISSLQPEDFATYYCQQSNEDPLTFGQGTKVEIKRLEDLKNVFPPEVAVFEPSEAEISHTQKATLVCLATGFYPDHVELSWWVNGKEVHSGVSTDPQPLKEQPALNDSRYCLSSRLRVSATFWQNPRNHFRCQVQFYGLSENDEWTQDRAKPVTQIVSAEAWGRADCGSQSFGLLDPKLCYLLDGILFIYGVILTALFLRVKFSRSADAPAYQQGQNQLYNELNLGRREEYDVLDKRRGRDPEMGGKPRRKNPQEGLYNELQKDKMAEAYSEIGMKGERRRGKGHDGLYQGLSTATKDTYDALHMQALPPRRAKRSGSGATNFSLLKQAGDVEENPGPTSMDWIWRILFLVGAATGAHSFEEVQLVESGGGLVQPGGSLRLSCAASGYTFTSYWIEWVRQAPGKGLEWIGEILPGGGDTNYNEIFKGRATFSADTSKNTAYLQMNSLRAEDTAVYYCTRRVPIRLDYWGQGTLVTVSSTRIQNPDPAVYQLRDSKSSDKSVCLFTDFDSQTNVSQSKDSDVYITDKTVLDMRSMDFKSNSAVAWSNKSDFACANAFNNSIIPEDTFFPSPESSCGTQSFGLLDPKLCYLLDGILFIYGVILTALFLRVKFSRSADAPAYQQGQNQLYNELNLGRREEYDVLDKRRGRDPEMGGKPRRKNPQEGLYNELQKDKMAEAYSEIGMKGERRRGKGHDGLYQGLSTATKDTYDALHMQALPPR

SEQ ID NO: 2259 - protein, 815 aa, synthetic construct
MALPVTALLLPLALLLHAARPDIVMTQSPDSLAVSLGERATINCKASQSVDYEGDSFLNWYQQKPGQPPKLLIYAASNLESGVPSRFSGSGSGTDFTLTISSLQPEDVAVYYCQQSNEDPLTFGQGTKVEIKLEDLKNVFPPEVAVFEPSEAEISHTQKATLVCLATGFYPDHVELSWWVNGKEVHSGVSTDPQPLKEQPALNDSRYCLSSRLRVSATFWQNPRNHFRCQVQFYGLSENDEWTQDRAKPVTQIVSAEAWGRADCGSQSFGLLDPKLCYLLDGILFIYGVILTALFLRVKFSRSADAPAYQQGQNQLYNELNLGRREEYDVLDKRRGRDPEMGGKPRRKNPQEGLYNELQKDKMAEAYSEIGMKGERRRGKGHDGLYQGLSTATKDTYDALHMQALPPRRAKRSGSGATNFSLLKQAGDVEENPGPTSMDWIWRILFLVGAATGAHSFEEVQLVESGGGLVQPGGSLRLSCAASGYTFTSYWIEWVRQAPGKGLEWIGEILPGGGDTNYNEIFKGRATFSADTSKNTAYLQMNSLRAEDTAVYYCTRRVPIRLDYWGQGTLVTVSSTRIQNPDPAVYQLRDSKSSDKSVCLFTDFDSQTNVSQSKDSDVYITDKTVLDMRSMDFKSNSAVAWSNKSDFACANAFNNSIIPEDTFFPSPESSCGTQSFGLLDPKLCYLLDGILFIYGVILTALFLRVKFSRSADAPAYQQGQNQLYNELNLGRREEYDVLDKRRGRDPEMGGKPRRKNPQEGLYNELQKDKMAEAYSEIGMKGERRRGKGHDGLYQGLSTATKDTYDALHMQALPPR

SEQ ID NO: 2260 - protein, 815 aa, synthetic construct
MALPVTALLLPLALLLHAARPDIVMTQSPDSLAVSLGERATINCKASQSVDYDGDSFLNWYQQKPGQPPKLLIYAASNLESGVPSRFSGSGSGTDFTLTISSLQPEDVAVYYCQQSNDDPLTFGQGTKVEIKLEDLKNVFPPEVAVFEPSEAEISHTQKATLVCLATGFYPDHVELSWWVNGKEVHSGVSTDPQPLKEQPALNDSRYCLSSRLRVSATFWQNPRNHFRCQVQFYGLSENDEWTQDRAKPVTQIVSAEAWGRADCGSQSFGLLDPKLCYLLDGILFIYGVILTALFLRVKFSRSADAPAYQQGQNQLYNELNLGRREEYDVLDKRRGRDPEMGGKPRRKNPQEGLYNELQKDKMAEAYSEIGMKGERRRGKGHDGLYQGLSTATKDTYDALHMQALPPRRAKRSGSGATNFSLLKQAGDVEENPGPTSMDWIWRILFLVGAATGAHSFEEVQLVESGGGLVQPGGSLRLSCAASGYTFTSYWIEWVRQAPGKGLEWIGEILPGGGDTNYNEIFKGRATFSADTSKNTAYLQMNSLRAEDTAVYYCTRRVPIRLDYWGQGTLVTVSSTRIQNPDPAVYQLRDSKSSDKSVCLFTDFDSQTNVSQSKDSDVYITDKTVLDMRSMDFKSNSAVAWSNKSDFACANAFNNSIIPEDTFFPSPESSCGTQSFGLLDPKLCYLLDGILFIYGVILTALFLRVKFSRSADAPAYQQGQNQLYNELNLGRREEYDVLDKRRGRDPEMGGKPRRKNPQEGLYNELQKDKMAEAYSEIGMKGERRRGKGHDGLYQGLSTATKDTYDALHMQALPPR

SEQ ID NO: 2261 - protein, 815 aa, synthetic construct; identical to SEQ ID NO: 2253

SEQ ID NO: 2262 - protein, 816 aa, synthetic construct
MALPVTALLLPLALLLHAARPDDIQLTQSPSSLSASVGDRVTITCKASQSVDYEGDSFLNWYQQKPGKAPKLLIYAASNLESGVPSRFSGSGSGTDFTLTISSLQPEDFATYYCQQSNEDPLTFGQGTKVEIKRLEDLKNVFPPEVAVFEPSEAEISHTQKATLVCLATGFYPDHVELSWWVNGKEVHSGVSTDPQPLKEQPALNDSRYCLSSRLRVSATFWQNPRNHFRCQVQFYGLSENDEWTQDRAKPVTQIVSAEAWGRADCGSQSFGLLDPKLCYLLDGILFIYGVILTALFLRVKFSRSADAPAYQQGQNQLYNELNLGRREEYDVLDKRRGRDPEMGGKPRRKNPQEGLYNELQKDKMAEAYSEIGMKGERRRGKGHDGLYQGLSTATKDTYDALHMQALPPRRAKRSGSGATNFSLLKQAGDVEENPGPTSMDWIWRILFLVGAATGAHSFEVQLVESGGGLVQPGGSLRLSCAASGYTFTSYWIEWVRQAPGKGLEWIGEILPGGGDTNYNEIFKGRATFSADTSKNTAYLQMNSLRAEDTAVYYCTRRVPIRLDYWGQGTLVTVSSTRIQNPDPAVYQLRDSKSSDKSVCLFTDFDSQTNVSQSKDSDVYITDKTVLDMRSMDFKSNSAVAWSNKSDFACANAFNNSIIPEDTFFPSPESSCGTQSFGLLDPKLCYLLDGILFIYGVILTALFLRVKFSRSADAPAYQQGQNQLYNELNLGRREEYDVLDKRRGRDPEMGGKPRRKNPQEGLYNELQKDKMAEAYSEIGMKGERRRGKGHDGLYQGLSTATKDTYDALHMQALPPR

SEQ ID NO: 2263 - protein, 815 aa, synthetic construct
MALPVTALLLPLALLLHAARPDIQLTQSPSSLSASVGDRVTITCKASQSVDYEGDSFLNWYQQKPGKAPKLLIYAASNLESGVPSRFSGSGSGTDFTLTISSLQPEDFATYYCQQSNEDPLTFGQGTKVEIKRLEDLKNVFPPEVAVFEPSEAEISHTQKATLVCLATGFYPDHVELSWWVNGKEVHSGVSTDPQPLKEQPALNDSRYCLSSRLRVSATFWQNPRNHFRCQVQFYGLSENDEWTQDRAKPVTQIVSAEAWGRADCGSQSFGLLDPKLCYLLDGILFIYGVILTALFLRVKFSRSADAPAYQQGQNQLYNELNLGRREEYDVLDKRRGRDPEMGGKPRRKNPQEGLYNELQKDKMAEAYSEIGMKGERRRGKGHDGLYQGLSTATKDTYDALHMQALPPRRAKRSGSGATNFSLLKQAGDVEENPGPTSMDWIWRILFLVGAATGAHSFEVQLVESGGGLVQPGGSLRLSCAASGYTFTSYWIEWVRQAPGKGLEWIGEILPGGGDTNYNEIFKGRATFSADTSKNTAYLQMNSLRAEDTAVYYCTRRVPIRLDYWGQGTLVTVSSTRIQNPDPAVYQLRDSKSSDKSVCLFTDFDSQTNVSQSKDSDVYITDKTVLDMRSMDFKSNSAVAWSNKSDFACANAFNNSIIPEDTFFPSPESSCGTQSFGLLDPKLCYLLDGILFIYGVILTALFLRVKFSRSADAPAYQQGQNQLYNELNLGRREEYDVLDKRRGRDPEMGGKPRRKNPQEGLYNELQKDKMAEAYSEIGMKGERRRGKGHDGLYQGLSTATKDTYDALHMQALPPR

SEQ ID NO: 2264 - protein, 816 aa, synthetic construct; identical to SEQ ID NO: 2262

SEQ ID NO: 2265 - protein, 816 aa, synthetic construct
MALPVTALLLPLALLLHAARPDDIQLTQSPSSLSASVGDRVTITCKASQSVDYDGDSFLNWYQQKPGKAPKLLIYAASNLESGVPSRFSGSGSGTDFTLTISSLQPEDFATYYCQQSNEDPLTFGQGTKVEIKRLEDLKNVFPPEVAVFEPSEAEISHTQKATLVCLATGFYPDHVELSWWVNGKEVHSGVSTDPQPLKEQPALNDSRYCLSSRLRVSATFWQNPRNHFRCQVQFYGLSENDEWTQDRAKPVTQIVSAEAWGRADCGSQSFGLLDPKLCYLLDGILFIYGVILTALFLRVKFSRSADAPAYQQGQNQLYNELNLGRREEYDVLDKRRGRDPEMGGKPRRKNPQEGLYNELQKDKMAEAYSEIGMKGERRRGKGHDGLYQGLSTATKDTYDALHMQALPPRRAKRSGSGATNFSLLKQAGDVEENPGPTSMDWIWRILFLVGAATGAHSFEVQLVESGGGLVQPGGSLRLSCAASGYTFTSYWIEWVRQAPGKGLEWIGEILPGGGDTNYNEIFKGRATFSADTSKNTAYLQMNSLRAEDTAVYYCTRRVPIRLDYWGQGTLVTVSSTRIQNPDPAVYQLRDSKSSDKSVCLFTDFDSQTNVSQSKDSDVYITDKTVLDMRSMDFKSNSAVAWSNKSDFACANAFNNSIIPEDTFFPSPESSCGTQSFGLLDPKLCYLLDGILFIYGVILTALFLRVKFSRSADAPAYQQGQNQLYNELNLGRREEYDVLDKRRGRDPEMGGKPRRKNPQEGLYNELQKDKMAEAYSEIGMKGERRRGKGHDGLYQGLSTATKDTYDALHMQALPPR

SEQ ID NO: 2266 - protein, 815 aa, synthetic construct
MALPVTALLLPLALLLHAARPDIQLTQSPSSLSASVGDRVTITCKASQSVDYDGDSFLNWYQQKPGKAPKLLIYAASNLESGVPSRFSGSGSGTDFTLTISSLQPEDFATYYCQQSNEDPLTFGQGTKVEIKRLEDLKNVFPPEVAVFEPSEAEISHTQKATLVCLATGFYPDHVELSWWVNGKEVHSGVSTDPQPLKEQPALNDSRYCLSSRLRVSATFWQNPRNHFRCQVQFYGLSENDEWTQDRAKPVTQIVSAEAWGRADCGSQSFGLLDPKLCYLLDGILFIYGVILTALFLRVKFSRSADAPAYQQGQNQLYNELNLGRREEYDVLDKRRGRDPEMGGKPRRKNPQEGLYNELQKDKMAEAYSEIGMKGERRRGKGHDGLYQGLSTATKDTYDALHMQALPPRRAKRSGSGATNFSLLKQAGDVEENPGPTSMDWIWRILFLVGAATGAHSFEVQLVESGGGLVQPGGSLRLSCAASGYTFTSYWIEWVRQAPGKGLEWIGEILPGGGDTNYNEIFKGRATFSADTSKNTAYLQMNSLRAEDTAVYYCTRRVPIRLDYWGQGTLVTVSSTRIQNPDPAVYQLRDSKSSDKSVCLFTDFDSQTNVSQSKDSDVYITDKTVLDMRSMDFKSNSAVAWSNKSDFACANAFNNSIIPEDTFFPSPESSCGTQSFGLLDPKLCYLLDGILFIYGVILTALFLRVKFSRSADAPAYQQGQNQLYNELNLGRREEYDVLDKRRGRDPEMGGKPRRKNPQEGLYNELQKDKMAEAYSEIGMKGERRRGKGHDGLYQGLSTATKDTYDALHMQALPPR

SEQ ID NO: 2267 - protein, 814 aa, synthetic construct
MALPVTALLLPLALLLHAARPDIVMTQSPDSLAVSLGERATINCKASQSVDYEGDSFLNWYQQKPGQPPKLLIYAASNLESGVPSRFSGSGSGTDFTLTISSLQPEDVAVYYCQQSNEDPLTFGQGTKVEIKLEDLKNVFPPEVAVFEPSEAEISHTQKATLVCLATGFYPDHVELSWWVNGKEVHSGVSTDPQPLKEQPALNDSRYCLSSRLRVSATFWQNPRNHFRCQVQFYGLSENDEWTQDRAKPVTQIVSAEAWGRADCGSQSFGLLDPKLCYLLDGILFIYGVILTALFLRVKFSRSADAPAYQQGQNQLYNELNLGRREEYDVLDKRRGRDPEMGGKPRRKNPQEGLYNELQKDKMAEAYSEIGMKGERRRGKGHDGLYQGLSTATKDTYDALHMQALPPRRAKRSGSGATNFSLLKQAGDVEENPGPTSMDWIWRILFLVGAATGAHSFEVQLVESGGGLVQPGGSLRLSCAASGYTFTSYWIEWVRQAPGKGLEWIGEILPGGGDTNYNEIFKGRATFSADTSKNTAYLQMNSLRAEDTAVYYCTRRVPIRLDYWGQGTLVTVSSTRIQNPDPAVYQLRDSKSSDKSVCLFTDFDSQTNVSQSKDSDVYITDKTVLDMRSMDFKSNSAVAWSNKSDFACANAFNNSIIPEDTFFPSPESSCGTQSFGLLDPKLCYLLDGILFIYGVILTALFLRVKFSRSADAPAYQQGQNQLYNELNLGRREEYDVLDKRRGRDPEMGGKPRRKNPQEGLYNELQKDKMAEAYSEIGMKGERRRGKGHDGLYQGLSTATKDTYDALHMQALPPR

SEQ ID NO: 2268 - protein, 814 aa, synthetic construct
MALPVTALLLPLALLLHAARPDIVMTQSPDSLAVSLGERATINCKASQSVDYDGDSFLNWYQQKPGQPPKLLIYAASNLESGVPSRFSGSGSGTDFTLTISSLQPEDVAVYYCQQSNDDPLTFGQGTKVEIKLEDLKNVFPPEVAVFEPSEAEISHTQKATLVCLATGFYPDHVELSWWVNGKEVHSGVSTDPQPLKEQPALNDSRYCLSSRLRVSATFWQNPRNHFRCQVQFYGLSENDEWTQDRAKPVTQIVSAEAWGRADCGSQSFGLLDPKLCYLLDGILFIYGVILTALFLRVKFSRSADAPAYQQGQNQLYNELNLGRREEYDVLDKRRGRDPEMGGKPRRKNPQEGLYNELQKDKMAEAYSEIGMKGERRRGKGHDGLYQGLSTATKDTYDALHMQALPPRRAKRSGSGATNFSLLKQAGDVEENPGPTSMDWIWRILFLVGAATGAHSFEVQLVESGGGLVQPGGSLRLSCAASGYTFTSYWIEWVRQAPGKGLEWIGEILPGGGDTNYNEIFKGRATFSADTSKNTAYLQMNSLRAEDTAVYYCTRRVPIRLDYWGQGTLVTVSSTRIQNPDPAVYQLRDSKSSDKSVCLFTDFDSQTNVSQSKDSDVYITDKTVLDMRSMDFKSNSAVAWSNKSDFACANAFNNSIIPEDTFFPSPESSCGTQSFGLLDPKLCYLLDGILFIYGVILTALFLRVKFSRSADAPAYQQGQNQLYNELNLGRREEYDVLDKRRGRDPEMGGKPRRKNPQEGLYNELQKDKMAEAYSEIGMKGERRRGKGHDGLYQGLSTATKDTYDALHMQALPPR

SEQ ID NO: 2269 - protein, 814 aa, synthetic construct
MALPVTALLLPLALLLHAARPDIVMTQSPDSLAVSLGERATINCKASQSVDYDGDSFLNWYQQKPGQPPKLLIYAASNLESGVPSRFSGSGSGTDFTLTISSLQPEDVAVYYCQQSNDDPLTFGQGTKVEIKLEDLKNVFPPEVAVFEPSEAEISHTQKATLVCLATGFYPDHVELSWWVNGKEVHSGVSTDPQPLKEQPALNDSRYCLSSRLRVSATFWQNPRNHFRCQVQFYGLSENDEWTQDRAKPVTQIVSAEAWGRADCGSQSFGLLDPKLCYLLDGILFIYGVILTALFLRVKFSRSADAPAYQQGQNQLYNELNLGRREEYDVLDKRRGRDPEMGGKPRRKNPQEGLYNELQKDKMAEAYSEIGMKGERRRGKGHDGLYQGLSTATKDTYDALHMQALPPRRAKRSGSGATNFSLLKQAGDVEENPGPTSMDWIWRILFLVGAATGAHSFEVQLVESGGGLVQPGGSLRLSCAASGYTFSSYWIEWVRQAPGKGLEWIGEILPGGGDTNYNEIFKGRATFSADTSKNTAYLQMNSLRAEDTAVYYCTRRVPIRLDYWGQGTLVTVSSTRIQNPDPAVYQLRDSKSSDKSVCLFTDFDSQTNVSQSKDSDVYITDKTVLDMRSMDFKSNSAVAWSNKSDFACANAFNNSIIPEDTFFPSPESSCGTQSFGLLDPKLCYLLDGILFIYGVILTALFLRVKFSRSADAPAYQQGQNQLYNELNLGRREEYDVLDKRRGRDPEMGGKPRRKNPQEGLYNELQKDKMAEAYSEIGMKGERRRGKGHDGLYQGLSTATKDTYDALHMQALPPR

SEQ ID NO: 2270 - protein, 622 aa, synthetic construct
MALPVTALLLPLALLLHAARPDDIQLTQSPSSLSASVGDRVTITCKASQSVDYEGDSFLNWYQQKPGKAPKLLIYAASNLESGVPSRFSGSGSGTDFTLTISSLQPEDFATYYCQQSNEDPLTFGQGTKVEIKRLEDLKNVFPPEVAVFEPSEAEISHTQKATLVCLATGFYPDHVELSWWVNGKEVHSGVCTDPQPLKEQPALNDSRYCLSSRLRVSATFWQNPRNHFRCQVQFYGLSENDEWTQDRAKPVTQIVSAEAWGRADCGFTSESYQQGVLSATILYEILLGKATLYAVLVSALVLMAMVKRKDSRGRAKRSGSGATNFSLLKQAGDVEENPGPTSMDWIWRILFLVGAATGAHSFEVQLVESGGGLVQPGGSLRLSCAASGYTFSSYWIEWVRQAPGKGLEWIGEILPGGGDTNYNEIFKGRATFSADTSKNTAYLQMNSLRAEDTAVYYCTRRVPIRLDYWGQGTLVTVSSTRIQNPDPAVYQLRDSKSSDKSVCLFTDFDSQTNVSQSKDSDVYITDKCVLDMRSMDFKSNSAVAWSNKSDFACANAFNNSIIPEDTFFPSPESSCDVKLVEKSFETDTNLNFQNLSVIGFRILLLKVAGFNLLMTLRLWSS

SEQ ID NO: 2271 - protein, 621 aa, synthetic construct
MALPVTALLLPLALLLHAARPDIQLTQSPSSLSASVGDRVTITCKASQSVDYEGDSFLNWYQQKPGKAPKLLIYAASNLESGVPSRFSGSGSGTDFTLTISSLQPEDFATYYCQQSNEDPLTFGQGTKVEIKRLEDLKNVFPPEVAVFEPSEAEISHTQKATLVCLATGFYPDHVELSWWVNGKEVHSGVCTDPQPLKEQPALNDSRYCLSSRLRVSATFWQNPRNHFRCQVQFYGLSENDEWTQDRAKPVTQIVSAEAWGRADCGFTSESYQQGVLSATILYEILLGKATLYAVLVSALVLMAMVKRKDSRGRAKRSGSGATNFSLLKQAGDVEENPGPTSMDWIWRILFLVGAATGAHSFEVQLVESGGGLVQPGGSLRLSCAASGYTFSSYWIEWVRQAPGKGLEWIGEILPGGGDTNYNEIFKGRATFSADTSKNTAYLQMNSLRAEDTAVYYCTRRVPIRLDYWGQGTLVTVSSTRIQNPDPAVYQLRDSKSSDKSVCLFTDFDSQTNVSQSKDSDVYITDKCVLDMRSMDFKSNSAVAWSNKSDFACANAFNNSIIPEDTFFPSPESSCDVKLVEKSFETDTNLNFQNLSVIGFRILLLKVAGFNLLMTLRLWSS

SEQ ID NO: 2272 - protein, 623 aa, synthetic construct
MALPVTALLLPLALLLHAARPDDIQLTQSPSSLSASVGDRVTITCKASQSVDYEGDSFLNWYQQKPGKAPKLLIYAASNLESGVPSRFSGSGSGTDFTLTISSLQPEDFATYYCQQSNEDPLTFGQGTKVEIKRLEDLKNVFPPEVAVFEPSEAEISHTQKATLVCLATGFYPDHVELSWWVNGKEVHSGVCTDPQPLKEQPALNDSRYCLSSRLRVSATFWQNPRNHFRCQVQFYGLSENDEWTQDRAKPVTQIVSAEAWGRADCGFTSESYQQGVLSATILYEILLGKATLYAVLVSALVLMAMVKRKDSRGRAKRSGSGATNFSLLKQAGDVEENPGPTSMDWIWRILFLVGAATGAHSFEEVQLVESGGGLVQPGGSLRLSCAASGYTFSSYWIEWVRQAPGKGLEWIGEILPGGGDTNYNEIFKGRATFSADTSKNTAYLQMNSLRAEDTAVYYCTRRVPIRLDYWGQGTLVTVSSTRIQNPDPAVYQLRDSKSSDKSVCLFTDFDSQTNVSQSKDSDVYITDKCVLDMRSMDFKSNSAVAWSNKSDFACANAFNNSIIPEDTFFPSPESSCDVKLVEKSFETDTNLNFQNLSVIGFRILLLKVAGFNLLMTLRLWSS

SEQ ID NO: 2273 - protein, 622 aa, synthetic construct
MALPVTALLLPLALLLHAARPDIQLTQSPSSLSASVGDRVTITCKASQSVDYEGDSFLNWYQQKPGKAPKLLIYAASNLESGVPSRFSGSGSGTDFTLTISSLQPEDFATYYCQQSNEDPLTFGQGTKVEIKRLEDLKNVFPPEVAVFEPSEAEISHTQKATLVCLATGFYPDHVELSWWVNGKEVHSGVCTDPQPLKEQPALNDSRYCLSSRLRVSATFWQNPRNHFRCQVQFYGLSENDEWTQDRAKPVTQIVSAEAWGRADCGFTSESYQQGVLSATILYEILLGKATLYAVLVSALVLMAMVKRKDSRGRAKRSGSGATNFSLLKQAGDVEENPGPTSMDWIWRILFLVGAATGAHSFEEVQLVESGGGLVQPGGSLRLSCAASGYTFSSYWIEWVRQAPGKGLEWIGEILPGGGDTNYNEIFKGRATFSADTSKNTAYLQMNSLRAEDTAVYYCTRRVPIRLDYWGQGTLVTVSSTRIQNPDPAVYQLRDSKSSDKSVCLFTDFDSQTNVSQSKDSDVYITDKCVLDMRSMDFKSNSAVAWSNKSDFACANAFNNSIIPEDTFFPSPESSCDVKLVEKSFETDTNLNFQNLSVIGFRILLLKVAGFNLLMTLRLWSS

SEQ ID NO: 2274 - protein, 623 aa, synthetic construct
MALPVTALLLPLALLLHAARPDDIQLTQSPSSLSASVGDRVTITCKASQSVDYDGDSFLNWYQQKPGKAPKLLIYAASNLESGVPSRFSGSGSGTDFTLTISSLQPEDFATYYCQQSNEDPLTFGQGTKVEIKRLEDLKNVFPPEVAVFEPSEAEISHTQKATLVCLATGFYPDHVELSWWVNGKEVHSGVCTDPQPLKEQPALNDSRYCLSSRLRVSATFWQNPRNHFRCQVQFYGLSENDEWTQDRAKPVTQIVSAEAWGRADCGFTSESYQQGVLSATILYEILLGKATLYAVLVSALVLMAMVKRKDSRGRAKRSGSGATNFSLLKQAGDVEENPGPTSMDWIWRILFLVGAATGAHSFEEVQLVESGGGLVQPGGSLRLSCAASGYTFSSYWIEWVRQAPGKGLEWIGEILPGGGDTNYNEIFKGRATFSADTSKNTAYLQMNSLRAEDTAVYYCTRRVPIRLDYWGQGTLVTVSSTRIQNPDPAVYQLRDSKSSDKSVCLFTDFDSQTNVSQSKDSDVYITDKCVLDMRSMDFKSNSAVAWSNKSDFACANAFNNSIIPEDTFFPSPESSCDVKLVEKSFETDTNLNFQNLSVIGFRILLLKVAGFNLLMTLRLWSS

SEQ ID NO: 2275 - protein, 622 aa, synthetic construct
MALPVTALLLPLALLLHAARPDIQLTQSPSSLSASVGDRVTITCKASQSVDYDGDSFLNWYQQKPGKAPKLLIYAASNLESGVPSRFSGSGSGTDFTLTISSLQPEDFATYYCQQSNEDPLTFGQGTKVEIKRLEDLKNVFPPEVAVFEPSEAEISHTQKATLVCLATGFYPDHVELSWWVNGKEVHSGVCTDPQPLKEQPALNDSRYCLSSRLRVSATFWQNPRNHFRCQVQFYGLSENDEWTQDRAKPVTQIVSAEAWGRADCGFTSESYQQGVLSATILYEILLGKATLYAVLVSALVLMAMVKRKDSRGRAKRSGSGATNFSLLKQAGDVEENPGPTSMDWIWRILFLVGAATGAHSFEEVQLVESGGGLVQPGGSLRLSCAASGYTFSSYWIEWVRQAPGKGLEWIGEILPGGGDTNYNEIFKGRATFSADTSKNTAYLQMNSLRAEDTAVYYCTRRVPIRLDYWGQGTLVTVSSTRIQNPDPAVYQLRDSKSSDKSVCLFTDFDSQTNVSQSKDSDVYITDKCVLDMRSMDFKSNSAVAWSNKSDFACANAFNNSIIPEDTFFPSPESSCDVKLVEKSFETDTNLNFQNLSVIGFRILLLKVAGFNLLMTLRLWSS

SEQ ID NO: 2276 - protein, 621 aa, synthetic construct
MALPVTALLLPLALLLHAARPDIVMTQSPDSLAVSLGERATINCKASQSVDYEGDSFLNWYQQKPGQPPKLLIYAASNLESGVPSRFSGSGSGTDFTLTISSLQPEDVAVYYCQQSNEDPLTFGQGTKVEIKLEDLKNVFPPEVAVFEPSEAEISHTQKATLVCLATGFYPDHVELSWWVNGKEVHSGVCTDPQPLKEQPALNDSRYCLSSRLRVSATFWQNPRNHFRCQVQFYGLSENDEWTQDRAKPVTQIVSAEAWGRADCGFTSESYQQGVLSATILYEILLGKATLYAVLVSALVLMAMVKRKDSRGRAKRSGSGATNFSLLKQAGDVEENPGPTSMDWIWRILFLVGAATGAHSFEEVQLVESGGGLVQPGGSLRLSCAASGYTFSSYWIEWVRQAPGKGLEWIGEILPGGGDTNYNEIFKGRATFSADTSKNTAYLQMNSLRAEDTAVYYCTRRVPIRLDYWGQGTLVTVSSTRIQNPDPAVYQLRDSKSSDKSVCLFTDFDSQTNVSQSKDSDVYITDKCVLDMRSMDFKSNSAVAWSNKSDFACANAFNNSIIPEDTFFPSPESSCDVKLVEKSFETDTNLNFQNLSVIGFRILLLKVAGFNLLMTLRLWSS

SEQ ID NO: 2277 - protein, 621 aa, synthetic construct
MALPVTALLLPLALLLHAARPDIVMTQSPDSLAVSLGERATINCKASQSVDYDGDSFLNWYQQKPGQPPKLLIYAASNLESGVPSRFSGSGSGTDFTLTISSLQPEDVAVYYCQQSNDDPLTFGQGTKVEIKLEDLKNVFPPEVAVFEPSEAEISHTQKATLVCLATGFYPDHVELSWWVNGKEVHSGVCTDPQPLKEQPALNDSRYCLSSRLRVSATFWQNPRNHFRCQVQFYGLSENDEWTQDRAKPVTQIVSAEAWGRADCGFTSESYQQGVLSATILYEILLGKATLYAVLVSALVLMAMVKRKDSRGRAKRSGSGATNFSLLKQAGDVEENPGPTSMDWIWRILFLVGAATGAHSFEEVQLVESGGGLVQPGGSLRLSCAASGYTFSSYWIEWVRQAPGKGLEWIGEILPGGGDTNYNEIFKGRATFSADTSKNTAYLQMNSLRAEDTAVYYCTRRVPIRLDYWGQGTLVTVSSTRIQNPDPAVYQLRDSKSSDKSVCLFTDFDSQTNVSQSKDSDVYITDKCVLDMRSMDFKSNSAVAWSNKSDFACANAFNNSIIPEDTFFPSPESSCDVKLVEKSFETDTNLNFQNLSVIGFRILLLKVAGFNLLMTLRLWSS

SEQ ID NO: 2278 - protein, 623 aa, synthetic construct
MALPVTALLLPLALLLHAARPDDIQLTQSPSSLSASVGDRVTITCKASQSVDYEGDSFLNWYQQKPGKAPKLLIYAASNLESGVPSRFSGSGSGTDFTLTISSLQPEDFATYYCQQSNEDPLTFGQGTKVEIKRLEDLKNVFPPEVAVFEPSEAEISHTQKATLVCLATGFYPDHVELSWWVNGKEVHSGVCTDPQPLKEQPALNDSRYCLSSRLRVSATFWQNPRNHFRCQVQFYGLSENDEWTQDRAKPVTQIVSAEAWGRADCGFTSESYQQGVLSATILYEILLGKATLYAVLVSALVLMAMVKRKDSRGRAKRSGSGATNFSLLKQAGDVEENPGPTSMDWIWRILFLVGAATGAHSFEEVQLVESGGGLVQPGGSLRLSCAASGYTFTSYWIEWVRQAPGKGLEWIGEILPGGGDTNYNEIFKGRATFSADTSKNTAYLQMNSLRAEDTAVYYCTRRVPIRLDYWGQGTLVTVSSTRIQNPDPAVYQLRDSKSSDKSVCLFTDFDSQTNVSQSKDSDVYITDKCVLDMRSMDFKSNSAVAWSNKSDFACANAFNNSIIPEDTFFPSPESSCDVKLVEKSFETDTNLNFQNLSVIGFRILLLKVAGFNLLMTLRLWSS

SEQ ID NO: 2279 - protein, 622 aa, synthetic construct
MALPVTALLLPLALLLHAARPDIQLTQSPSSLSASVGDRVTITCKASQSVDYEGDSFLNWYQQKPGKAPKLLIYAASNLESGVPSRFSGSGSGTDFTLTISSLQPEDFATYYCQQSNEDPLTFGQGTKVEIKRLEDLKNVFPPEVAVFEPSEAEISHTQKATLVCLATGFYPDHVELSWWVNGKEVHSGVCTDPQPLKEQPALNDSRYCLSSRLRVSATFWQNPRNHFRCQVQFYGLSENDEWTQDRAKPVTQIVSAEAWGRADCGFTSESYQQGVLSATILYEILLGKATLYAVLVSALVLMAMVKRKDSRGRAKRSGSGATNFSLLKQAGDVEENPGPTSMDWIWRILFLVGAATGAHSFEEVQLVESGGGLVQPGGSLRLSCAASGYTFTSYWIEWVRQAPGKGLEWIGEILPGGGDTNYNEIFKGRATFSADTSKNTAYLQMNSLRAEDTAVYYCTRRVPIRLDYWGQGTLVTVSSTRIQNPDPAVYQLRDSKSSDKSVCLFTDFDSQTNVSQSKDSDVYITDKCVLDMRSMDFKSNSAVAWSNKSDFACANAFNNSIIPEDTFFPSPESSCDVKLVEKSFETDTNLNFQNLSVIGFRILLLKVAGFNLLMTLRLWSS

SEQ ID NO: 2280 - protein, 623 aa, synthetic construct; identical to SEQ ID NO: 2278

SEQ ID NO: 2281 - protein, 623 aa, synthetic construct
MALPVTALLLPLALLLHAARPDDIQLTQSPSSLSASVGDRVTITCKASQSVDYDGDSFLNWYQQKPGKAPKLLIYAASNLESGVPSRFSGSGSGTDFTLTISSLQPEDFATYYCQQSNEDPLTFGQGTKVEIKRLEDLKNVFPPEVAVFEPSEAEISHTQKATLVCLATGFYPDHVELSWWVNGKEVHSGVCTDPQPLKEQPALNDSRYCLSSRLRVSATFWQNPRNHFRCQVQFYGLSENDEWTQDRAKPVTQIVSAEAWGRADCGFTSESYQQGVLSATILYEILLGKATLYAVLVSALVLMAMVKRKDSRGRAKRSGSGATNFSLLKQAGDVEENPGPTSMDWIWRILFLVGAATGAHSFEEVQLVESGGGLVQPGGSLRLSCAASGYTFTSYWIEWVRQAPGKGLEWIGEILPGGGDTNYNEIFKGRATFSADTSKNTAYLQMNSLRAEDTAVYYCTRRVPIRLDYWGQGTLVTVSSTRIQNPDPAVYQLRDSKSSDKSVCLFTDFDSQTNVSQSKDSDVYITDKCVLDMRSMDFKSNSAVAWSNKSDFACANAFNNSIIPEDTFFPSPESSCDVKLVEKSFETDTNLNFQNLSVIGFRILLLKVAGFNLLMTLRLWSS

SEQ ID NO: 2282 - protein, 622 aa, synthetic construct
MALPVTALLLPLALLLHAARPDIQLTQSPSSLSASVGDRVTITCKASQSVDYDGDSFLNWYQQKPGKAPKLLIYAASNLESGVPSRFSGSGSGTDFTLTISSLQPEDFATYYCQQSNEDPLTFGQGTKVEIKRLEDLKNVFPPEVAVFEPSEAEISHTQKATLVCLATGFYPDHVELSWWVNGKEVHSGVCTDPQPLKEQPALNDSRYCLSSRLRVSATFWQNPRNHFRCQVQFYGLSENDEWTQDRAKPVTQIVSAEAWGRADCGFTSESYQQGVLSATILYEILLGKATLYAVLVSALVLMAMVKRKDSRGRAKRSGSGATNFSLLKQAGDVEENPGPTSMDWIWRILFLVGAATGAHSFEEVQLVESGGGLVQPGGSLRLSCAASGYTFTSYWIEWVRQAPGKGLEWIGEILPGGGDTNYNEIFKGRATFSADTSKNTAYLQMNSLRAEDTAVYYCTRRVPIRLDYWGQGTLVTVSSTRIQNPDPAVYQLRDSKSSDKSVCLFTDFDSQTNVSQSKDSDVYITDKCVLDMRSMDFKSNSAVAWSNKSDFACANAFNNSIIPEDTFFPSPESSCDVKLVEKSFETDTNLNFQNLSVIGFRILLLKVAGFNLLMTLRLWSS

SEQ ID NO: 2283 - protein, 621 aa, synthetic construct
MALPVTALLLPLALLLHAARPDIVMTQSPDSLAVSLGERATINCKASQSVDYEGDSFLNWYQQKPGQPPKLLIYAASNLESGVPSRFSGSGSGTDFTLTISSLQPEDVAVYYCQQSNEDPLTFGQGTKVEIKLEDLKNVFPPEVAVFEPSEAEISHTQKATLVCLATGFYPDHVELSWWVNGKEVHSGVCTDPQPLKEQPALNDSRYCLSSRLRVSATFWQNPRNHFRCQVQFYGLSENDEWTQDRAKPVTQIVSAEAWGRADCGFTSESYQQGVLSATILYEILLGKATLYAVLVSALVLMAMVKRKDSRGRAKRSGSGATNFSLLKQAGDVEENPGPTSMDWIWRILFLVGAATGAHSFEEVQLVESGGGLVQPGGSLRLSCAASGYTFTSYWIEWVRQAPGKGLEWIGEILPGGGDTNYNEIFKGRATFSADTSKNTAYLQMNSLRAEDTAVYYCTRRVPIRLDYWGQGTLVTVSSTRIQNPDPAVYQLRDSKSSDKSVCLFTDFDSQTNVSQSKDSDVYITDKCVLDMRSMDFKSNSAVAWSNKSDFACANAFNNSIIPEDTFFPSPESSCDVKLVEKSFETDTNLNFQNLSVIGFRILLLKVAGFNLLMTLRLWSS

SEQ ID NO: 2284 - protein, 621 aa, synthetic construct
MALPVTALLLPLALLLHAARPDIVMTQSPDSLAVSLGERATINCKASQSVDYDGDSFLNWYQQKPGQPPKLLIYAASNLESGVPSRFSGSGSGTDFTLTISSLQPEDVAVYYCQQSNDDPLTFGQGTKVEIKLEDLKNVFPPEVAVFEPSEAEISHTQKATLVCLATGFYPDHVELSWWVNGKEVHSGVCTDPQPLKEQPALNDSRYCLSSRLRVSATFWQNPRNHFRCQVQFYGLSENDEWTQDRAKPVTQIVSAEAWGRADCGFTSESYQQGVLSATILYEILLGKATLYAVLVSALVLMAMVKRKDSRGRAKRSGSGATNFSLLKQAGDVEENPGPTSMDWIWRILFLVGAATGAHSFEEVQLVESGGGLVQPGGSLRLSCAASGYTFTSYWIEWVRQAPGKGLEWIGEILPGGGDTNYNEIFKGRATFSADTSKNTAYLQMNSLRAEDTAVYYCTRRVPIRLDYWGQGTLVTVSSTRIQNPDPAVYQLRDSKSSDKSVCLFTDFDSQTNVSQSKDSDVYITDKCVLDMRSMDFKSNSAVAWSNKSDFACANAFNNSIIPEDTFFPSPESSCDVKLVEKSFETDTNLNFQNLSVIGFRILLLKVAGFNLLMTLRLWSS

SEQ ID NO: 2285 - protein, 621 aa, synthetic construct; identical to SEQ ID NO: 2277

SEQ ID NO: 2286 - protein, 622 aa, synthetic construct
MALPVTALLLPLALLLHAARPDDIQLTQSPSSLSASVGDRVTITCKASQSVDYEGDSFLNWYQQKPGKAPKLLIYAASNLESGVPSRFSGSGSGTDFTLTISSLQPEDFATYYCQQSNEDPLTFGQGTKVEIKRLEDLKNVFPPEVAVFEPSEAEISHTQKATLVCLATGFYPDHVELSWWVNGKEVHSGVCTDPQPLKEQPALNDSRYCLSSRLRVSATFWQNPRNHFRCQVQFYGLSENDEWTQDRAKPVTQIVSAEAWGRADCGFTSESYQQGVLSATILYEILLGKATLYAVLVSALVLMAMVKRKDSRGRAKRSGSGATNFSLLKQAGDVEENPGPTSMDWIWRILFLVGAATGAHSFEVQLVESGGGLVQPGGSLRLSCAASGYTFTSYWIEWVRQAPGKGLEWIGEILPGGGDTNYNEIFKGRATFSADTSKNTAYLQMNSLRAEDTAVYYCTRRVPIRLDYWGQGTLVTVSSTRIQNPDPAVYQLRDSKSSDKSVCLFTDFDSQTNVSQSKDSDVYITDKCVLDMRSMDFKSNSAVAWSNKSDFACANAFNNSIIPEDTFFPSPESSCDVKLVEKSFETDTNLNFQNLSVIGFRILLLKVAGFNLLMTLRLWSS

SEQ ID NO: 2287 - protein, 621 aa, synthetic construct
MALPVTALLLPLALLLHAARPDIQLTQSPSSLSASVGDRVTITCKASQSVDYEGDSFLNWYQQKPGKAPKLLIYAASNLESGVPSRFSGSGSGTDFTLTISSLQPEDFATYYCQQSNEDPLTFGQGTKVEIKRLEDLKNVFPPEVAVFEPSEAEISHTQKATLVCLATGFYPDHVELSWWVNGKEVHSGVCTDPQPLKEQPALNDSRYCLSSRLRVSATFWQNPRNHFRCQVQFYGLSENDEWTQDRAKPVTQIVSAEAWGRADCGFTSESYQQGVLSATILYEILLGKATLYAVLVSALVLMAMVKRKDSRGRAKRSGSGATNFSLLKQAGDVEENPGPTSMDWIWRILFLVGAATGAHSFEVQLVESGGGLVQPGGSLRLSCAASGYTFTSYWIEWVRQAPGKGLEWIGEILPGGGDTNYNEIFKGRATFSADTSKNTAYLQMNSLRAEDTAVYYCTRRVPIRLDYWGQGTLVTVSSTRIQNPDPAVYQLRDSKSSDKSVCLFTDFDSQTNVSQSKDSDVYITDKCVLDMRSMDFKSNSAVAWSNKSDFACANAFNNSIIPEDTFFPSPESSCDVKLVEKSFETDTNLNFQNLSVIGFRILLLKVAGFNLLMTLRLWSS

SEQ ID NO: 2288 - protein, 622 aa, synthetic construct; identical to SEQ ID NO: 2286

SEQ ID NO: 2289 - protein, 622 aa, synthetic construct
MALPVTALLLPLALLLHAARPDDIQLTQSPSSLSASVGDRVTITCKASQSVDYDGDSFLNWYQQKPGKAPKLLIYAASNLESGVPSRFSGSGSGTDFTLTISSLQPEDFATYYCQQSNEDPLTFGQGTKVEIKRLEDLKNVFPPEVAVFEPSEAEISHTQKATLVCLATGFYPDHVELSWWVNGKEVHSGVCTDPQPLKEQPALNDSRYCLSSRLRVSATFWQNPRNHFRCQVQFYGLSENDEWTQDRAKPVTQIVSAEAWGRADCGFTSESYQQGVLSATILYEILLGKATLYAVLVSALVLMAMVKRKDSRGRAKRSGSGATNFSLLKQAGDVEENPGPTSMDWIWRILFLVGAATGAHSFEVQLVESGGGLVQPGGSLRLSCAASGYTFTSYWIEWVRQAPGKGLEWIGEILPGGGDTNYNEIFKGRATFSADTSKNTAYLQMNSLRAEDTAVYYCTRRVPIRLDYWGQGTLVTVSSTRIQNPDPAVYQLRDSKSSDKSVCLFTDFDSQTNVSQSKDSDVYITDKCVLDMRSMDFKSNSAVAWSNKSDFACANAFNNSIIPEDTFFPSPESSCDVKLVEKSFETDTNLNFQNLSVIGFRILLLKVAGFNLLMTLRLWSS

SEQ ID NO: 2290 - protein, 621 aa, synthetic construct
MALPVTALLLPLALLLHAARPDIQLTQSPSSLSASVGDRVTITCKASQSVDYDGDSFLNWYQQKPGKAPKLLIYAASNLESGVPSRFSGSGSGTDFTLTISSLQPEDFATYYCQQSNEDPLTFGQGTKVEIKRLEDLKNVFPPEVAVFEPSEAEISHTQKATLVCLATGFYPDHVELSWWVNGKEVHSGVCTDPQPLKEQPALNDSRYCLSSRLRVSATFWQNPRNHFRCQVQFYGLSENDEWTQDRAKPVTQIVSAEAWGRADCGFTSESYQQGVLSATILYEILLGKATLYAVLVSALVLMAMVKRKDSRGRAKRSGSGATNFSLLKQAGDVEENPGPTSMDWIWRILFLVGAATGAHSFEVQLVESGGGLVQPGGSLRLSCAASGYTFTSYWIEWVRQAPGKGLEWIGEILPGGGDTNYNEIFKGRATFSADTSKNTAYLQMNSLRAEDTAVYYCTRRVPIRLDYWGQGTLVTVSSTRIQNPDPAVYQLRDSKSSDKSVCLFTDFDSQTNVSQSKDSDVYITDKCVLDMRSMDFKSNSAVAWSNKSDFACANAFNNSIIPEDTFFPSPESSCDVKLVEKSFETDTNLNFQNLSVIGFRILLLKVAGFNLLMTLRLWSS

SEQ ID NO: 2291 - protein, 620 aa, synthetic construct
MALPVTALLLPLALLLHAARPDIVMTQSPDSLAVSLGERATINCKASQSVDYEGDSFLNWYQQKPGQPPKLLIYAASNLESGVPSRFSGSGSGTDFTLTISSLQPEDVAVYYCQQSNEDPLTFGQGTKVEIKLEDLKNVFPPEVAVFEPSEAEISHTQKATLVCLATGFYPDHVELSWWVNGKEVHSGVCTDPQPLKEQPALNDSRYCLSSRLRVSATFWQNPRNHFRCQVQFYGLSENDEWTQDRAKPVTQIVSAEAWGRADCGFTSESYQQGVLSATILYEILLGKATLYAVLVSALVLMAMVKRKDSRGRAKRSGSGATNFSLLKQAGDVEENPGPTSMDWIWRILFLVGAATGAHSFEVQLVESGGGLVQPGGSLRLSCAASGYTFTSYWIEWVRQAPGKGLEWIGEILPGGGDTNYNEIFKGRATFSADTSKNTAYLQMNSLRAEDTAVYYCTRRVPIRLDYWGQGTLVTVSSTRIQNPDPAVYQLRDSKSSDKSVCLFTDFDSQTNVSQSKDSDVYITDKCVLDMRSMDFKSNSAVAWSNKSDFACANAFNNSIIPEDTFFPSPESSCDVKLVEKSFETDTNLNFQNLSVIGFRILLLKVAGFNLLMTLRLWSS

SEQ ID NO: 2292 - protein, 620 aa, synthetic construct
MALPVTALLLPLALLLHAARPDIVMTQSPDSLAVSLGERATINCKASQSVDYDGDSFLNWYQQKPGQPPKLLIYAASNLESGVPSRFSGSGSGTDFTLTISSLQPEDVAVYYCQQSNDDPLTFGQGTKVEIKLEDLKNVFPPEVAVFEPSEAEISHTQKATLVCLATGFYPDHVELSWWVNGKEVHSGVCTDPQPLKEQPALNDSRYCLSSRLRVSATFWQNPRNHFRCQVQFYGLSENDEWTQDRAKPVTQIVSAEAWGRADCGFTSESYQQGVLSATILYEILLGKATLYAVLVSALVLMAMVKRKDSRGRAKRSGSGATNFSLLKQAGDVEENPGPTSMDWIWRILFLVGAATGAHSFEVQLVESGGGLVQPGGSLRLSCAASGYTFTSYWIEWVRQAPGKGLEWIGEILPGGGDTNYNEIFKGRATFSADTSKNTAYLQMNSLRAEDTAVYYCTRRVPIRLDYWGQGTLVTVSSTRIQNPDPAVYQLRDSKSSDKSVCLFTDFDSQTNVSQSKDSDVYITDKCVLDMRSMDFKSNSAVAWSNKSDFACANAFNNSIIPEDTFFPSPESSCDVKLVEKSFETDTNLNFQNLSVIGFRILLLKVAGFNLLMTLRLWSS

SEQ ID NO: 2293 - protein, 620 aa, synthetic construct
MALPVTALLLPLALLLHAARPDIVMTQSPDSLAVSLGERATINCKASQSVDYDGDSFLNWYQQKPGQPPKLLIYAASNLESGVPSRFSGSGSGTDFTLTISSLQPEDVAVYYCQQSNDDPLTFGQGTKVEIKLEDLKNVFPPEVAVFEPSEAEISHTQKATLVCLATGFYPDHVELSWWVNGKEVHSGVCTDPQPLKEQPALNDSRYCLSSRLRVSATFWQNPRNHFRCQVQFYGLSENDEWTQDRAKPVTQIVSAEAWGRADCGFTSESYQQGVLSATILYEILLGKATLYAVLVSALVLMAMVKRKDSRGRAKRSGSGATNFSLLKQAGDVEENPGPTSMDWIWRILFLVGAATGAHSFEVQLVESGGGLVQPGGSLRLSCAASGYTFSSYWIEWVRQAPGKGLEWIGEILPGGGDTNYNEIFKGRATFSADTSKNTAYLQMNSLRAEDTAVYYCTRRVPIRLDYWGQGTLVTVSSTRIQNPDPAVYQLRDSKSSDKSVCLFTDFDSQTNVSQSKDSDVYITDKCVLDMRSMDFKSNSAVAWSNKSDFACANAFNNSIIPEDTFFPSPESSCDVKLVEKSFETDTNLNFQNLSVIGFRILLLKVAGFNLLMTLRLWSS

SEQ ID NO: 2294 - protein, 622 aa, synthetic construct
MALPVTALLLPLALLLHAARPDDIVMTQSPDSLAVSLGERATINCKASQSVDYDGDSFLNWYQQKPGQPPKLLIYAASNLESGVPSRFSGSGSGTDFTLTISSLQPEDVAVYYCQQSNDDPLTFGQGTKVEIKLEDLKNVFPPEVAVFEPSEAEISHTQKATLVCLATGFYPDHVELSWWVNGKEVHSGVCTDPQPLKEQPALNDSRYCLSSRLRVSATFWQNPRNHFRCQVQFYGLSENDEWTQDRAKPVTQIVSAEAWGRADCGFTSESYQQGVLSATILYEILLGKATLYAVLVSALVLMAMVKRKDSRGRAKRSGSGATNFSLLKQAGDVEENPGPTSMDWIWRILFLVGAATGAHSFEEVQLVESGGGLVQPGGSLRLSCAASGYTFTSYWIEWVRQAPGKGLEWIGEILPGGGDTNYNEIFKGRATFSADTSKNTAYLQMNSLRAEDTAVYYCTRRVPIRLDYWGQGTLVTVSSTRIQNPDPAVYQLRDSKSSDKSVCLFTDFDSQTNVSQSKDSDVYITDKCVLDMRSMDFKSNSAVAWSNKSDFACANAFNNSIIPEDTFFPSPESSCDVKLVEKSFETDTNLNFQNLSVIGFRILLLKVAGFNLLMTLRLWSS

SEQ ID NO: 2295 - protein, 621 aa, synthetic construct; identical to SEQ ID NO: 2290

SEQ ID NO: 2296 - protein, 738 aa, synthetic construct; identical to SEQ ID NO: 2242

SEQ ID NO: 2297 - protein, 622 aa, synthetic construct
MALPVTALLLPLALLLHAARPDIQLTQSPSSLSASVGDRVTITCKASQSVDYDGDSFLNWYQQKPGKAPKLLIYAASNLESGVPSRFSGSGSGTDFTLTISSLQPEDFATYYCQQSNEDPLTFGQGTKVEIKRLEDLKNVFPPEVAVFEPSEAEISHTQKATLVCLATGFYPDHVELSWWVNGKEVHSGVCTDPQPLKEQPALNDSRYCLSSRLRVSATFWQNPRNHFRCQVQFYGLSENDEWTQDRAKPVTQIVSAEAWGRADCGFTSESYQQGVLSAYYMYLLLLLKSVVYFAIITCCLLRRTAFCCNGEKSRAKRSGSGATNFSLLKQAGDVEENPGPTSMDWIWRILFLVGAATGAHSFEVQLVESGGGLVQPGGSLRLSCAASGYTFTSYWIEWVRQAPGKGLEWIGEILPGGGDTNYNEIFKGRATFSADTSKNTAYLQMNSLRAEDTAVYYCTRRVPIRLDYWGQGTLVTVSSTRIQNPDPAVYQLRDSKSSDKSVCLFTDFDSQTNVSQSKDSDVYITDKCVLDMRSMDFKSNSAVAWSNKSDFACANAFNNSIIPEDTFFPSPESSCDVKLVEKSFETDTNLNFQNLSVIGFRILLLKVAGFNLLMTLRLWSS

SEQ ID NO: 2298 - protein, 738 aa, synthetic construct; identical to SEQ ID NO: 2223

SEQ ID NO: 2299 - protein, 621 aa, synthetic construct; identical to SEQ ID NO: 2271

SEQ ID NO: 2300 - protein, 622 aa, synthetic construct
MALPVTALLLPLALLLHAARPDIQLTQSPSSLSASVGDRVTITCKASQSVDYEGDSFLNWYQQKPGKAPKLLIYAASNLESGVPSRFSGSGSGTDFTLTISSLQPEDFATYYCQQSNEDPLTFGQGTKVEIKRLEDLKNVFPPEVAVFEPSEAEISHTQKATLVCLATGFYPDHVELSWWVNGKEVHSGVCTDPQPLKEQPALNDSRYCLSSRLRVSATFWQNPRNHFRCQVQFYGLSENDEWTQDRAKPVTQIVSAEAWGRADCGFTSESYQQGVLSAYYMYLLLLLKSVVYFAIITCCLLRRTAFCCNGEKSRAKRSGSGATNFSLLKQAGDVEENPGPTSMDWIWRILFLVGAATGAHSFEVQLVESGGGLVQPGGSLRLSCAASGYTFSSYWIEWVRQAPGKGLEWIGEILPGGGDTNYNEIFKGRATFSADTSKNTAYLQMNSLRAEDTAVYYCTRRVPIRLDYWGQGTLVTVSSTRIQNPDPAVYQLRDSKSSDKSVCLFTDFDSQTNVSQSKDSDVYITDKCVLDMRSMDFKSNSAVAWSNKSDFACANAFNNSIIPEDTFFPSPESSCDVKLVEKSFETDTNLNFQNLSVIGFRILLLKVAGFNLLMTLRLWSS

SEQ ID NO: 2301 - protein, 490 aa, synthetic construct
MALPVTALLLPLALLLHAARPDIQLTQSPSSLSASVGDRVTITCKASQSVDYDGDSFLNWYQQKPGKAPKLLIYAASNLESGVPSRFSGSGSGTDFTLTISSLQPEDFATYYCQQSNEDPLTFGQGTKVEIKRGGGGSGGGGSGGGGSEVQLVESGGGLVQPGGSLRLSCAASGYTFTSYWIEWVRQAPGKGLEWIGEILPGGGDTNYNEIFKGRATFSADTSKNTAYLQMNSLRAEDTAVYYCTRRVPIRLDYWGQGTLVTVSSTRTTTPAPRPPTPAPTIASQPLSLRPEACRPAAGGAVHTRGLDFACDIYIWAPLAGTCGVLLLSLVITLYCKRGRKKLLYIFKQPFMRPVQTTQEEDGCSCRFPEEEEGGCELRVKFSRSADAPAYQQGQNQLYNELNLGRREEYDVLDKRRGRDPEMGGKPRRKNPQEGLYNELQKDKMAEAYSEIGMKGERRRGKGHDGLYQGLSTATKDTYDALHMQALPPR

SEQ ID NO: 2302 - protein, 618 aa, synthetic construct
MALPVTALLLPLALLLHAARPDIVMTQTPLTLSVTIGQPASISCKSSQSLLDSDGKTYLNWLLQRPGQSPERLIYLVSKLDSGVPDRFTGSGSGTDFTLKISRVEAEDLGVYCCWQGTHFPYTFGGGTKVEIKLEDLKNVFPPEVAVFEPSEAEISHTQKATLVCLATGFYPDHVELSWWVNGKEVHSGVCTDPQPLKEQPALNDSRYCLSSRLRVSATFWQNPRNHFRCQVQFYGLSENDEWTQDRAKPVTQIVSAEAWGRADCGFTSESYQQGVLSATILYEILLGKATLYAVLVSALVLMAMVKRKDSRGRAKRSGSGATNFSLLKQAGDVEENPGPTSMDWIWRILFLVGAATGAHSFEQVQLQQPGAELVRPGASVKLSCKASGYTFTSYWMNWVKQRPGQGLEWIGMIDPSDSETHYNHIFKDKATLTVDKSSSTAYLQLSSLTSEDSAVYYCARNLYLWGQGTSVTVSSTRIQNPDPAVYQLRDSKSSDKSVCLFTDFDSQTNVSQSKDSDVYITDKCVLDMRSMDFKSNSAVAWSNKSDFACANAFNNSIIPEDTFFPSPESSCDVKLVEKSFETDTNLNFQNLSVIGFRILLLKVAGFNLLMTLRLWSS

SEQ ID NO: 2303 - protein, 16 aa, synthetic construct
GGGGGGGGGGGGGGGG

SEQ ID NO: 2304 - protein, 554 aa, synthetic construct
MALPVTALLLPLALLLHAARPDIQMTQSPSSLSASVGDRVTITCKASDHINNWLAWYQQKPGQAPKLLIYGATTLETGVPSRFSGSGSGTDYTLTISSLQPEDFATYYCQQSWNTPWTFGQGTKLEIKRLEGGSARSEDRYRNPKGGSFEQVQLQQPGAELVKPGASVKMSCKASGYAFSSYWINWMKQKPGQGLEWIGQIYPGDGDTNYNGKFKGRATLTADTSSSTAYMQLSSLTSEDSAVYFCARSITTVVGCAMDYWGQGTSVTVSSTRIQNPDPAVYQLRDSKSSDKSVCLFTDFDSQTNVSQSKDSDVYITDKTVLDMRSMDFKSNSAVAWSNKSDFACANAFNNSIIPEDTFFPSPESSCGTQSFGLLDPKLCYLLDGILFIYGVILTALFLKRGRKKLLYIFKQPFMRPVQTTQEEDGCSCRFPEEEEGGCELRVKFSRSADAPAYQQGQNQLYNELNLGRREEYDVLDKRRGRDPEMGGKPQRRKNPQEGLYNELQKDKMAEAYSEIGMKGERRRGKGHDGLYQGLSTATKDTYDALHMQALPPR

SEQ ID NO: 2305 - protein, 617 aa, synthetic construct
MALPVTALLLPLALLLHAARPQIVLTQSPAIMSASPGEKVTMTCSASSSVSFMHWYQQKSGTSPKRWIYDTSTLASGVPARFGGSGSGTSYSLTISSMEAEDAATYYCQQWSSNPLTFGAGTKLELKRLEDLKNVFPPEVAVFEPSEAEISHTQKATLVCLATGFYPDHVELSWWVNGKEVHSGVSTDPQPLKEQPALNDSRYCLSSRLRVSATFWQNPRNHFRCQVQFYGLSENDEWTQDRAKPVTQIVSAEAWGRADCGFTSESYQQGVLSAYYMYLLLLLKSVVYFAIITCCLLRRTAFCCNGEKSRAKRSGSGATNFSLLKQAGDVEENPGPTSMDWIWRILFLVGAATGAHSFEQVQLQQSGPELVKPGASVRISCKASGYTFTSYYIHWVKQRPGQGLEWIGWIYPGNLNTKYNEKFKGKATLTADKSSSTAYMQLSSLTSEDSAVYFCARYDWYFDVWGAGTTVTVSSTRIQNPDPAVYQLRDSKSSDKSVCLFTDFDSQTNVSQSKDSDVYITDKCVLDMRSMDFKSNSAVAWSNKSDFACANAFNNSIIPEDTFFPSSDVPCDVKLVEKSFETDTNLNFQNLSVIGFRILLLKVAGFNLLMTLRLWSS

SEQ ID NO: 2306 - protein, 623 aa, synthetic construct
MALPVTALLLPLALLLHAARPDDIVMTQSPDSLAVSLGERATINCKASQSVDYDGDSFLNWYQQKPGQPPKLLIYAASNLESGVPSRFSGSGSGTDFTLTISSLQPEDVAVYYCQQSNDDPLTFGQGTKVEIKLEDLKNVFPPEVAVFEPSEAEISHTQKATLVCLATGFYPDHVELSWWVNGKEVHSGVSTDPQPLKEQPALNDSRYCLSSRLRVSATFWQNPRNHFRCQVQFYGLSENDEWTQDRAKPVTQIVSAEAWGRADCGFTSESYQQGVLSAYYMYLLLLLKSVVYFAIITCCLLRRTAFCCNGEKSRAKRSGSGATNFSLLKQAGDVEENPGPTSMDWIWRILFLVGAATGAHSFEEVQLVESGGGLVQPGGSLRLSCAASGYTFTSYWIEWVRQAPGKGLEWIGEILPGGGDTNYNEIFKGRATFSADTSKNTAYLQMNSLRAEDTAVYYCTRRVPIRLDYWGQGTLVTVSSTRIQNPDPAVYQLRDSKSSDKSVCLFTDFDSQTNVSQSKDSDVYITDKCVLDMRSMDFKSNSAVAWSNKSDFACANAFNNSIIPEDTFFPSPESSCDVKLVEKSFETDTNLNFQNLSVIGFRILLLKVAGFNLLMTLRLWSS

SEQ ID NO: 2307 - protein, 890 aa, synthetic construct
MALPVTALLLPLALLLHAARPDIQMTQSPSSLSASVGDRVTITCKASDHINNWLAWYQQKPGQAPKLLIYGATTLETGVPSRFSGSGSGTDYTLTISSLQPEDFATYYCQQSWNTPWTFGQGTKLEIKRLEDLKNVFPPEVAVFEPSEAEISHTQKATLVCLATGFYPDHVELSWWVNGKEVHSGVCTDPQPLKEQPALNDSRYCLSSRLRVSATFWQNPRNHFRCQVQFYGLSENDEWTQDRAKPVTQIVSAEAWGRADCGFTSESYQQGVLSATILYEILLGKATLYAVLVSALVLMAMVKRKDSRGRAKRSGSGATNFSLLKQAGDVEENPGPTSATMDWIWRILFLVGAATGAHSGPARSEDRYRNPKGSAGSGGGGSGGGGSGGGGSFEQVQLQQPGAELVKPGASVKMSCKASGYAFSSYWINWMKQKPGQGLEWIGQIYPGDGDTNYNGKFKGRATLTADTSSSTAYMQLSSLTSEDSAVYFCARSITTVVGCAMDYWGQGTSVTVSSTRIQNPDPAVYQLRDSKSSDKSVCLFTDFDSQTNVSQSKDSDVYITDKCVLDMRSMDFKSNSAVAWSNKSDFACANAFNNSIIPEDTFFPSPESSCDVKLVEKSFETDTNLNFQNLSVIGFRILLLKVAGFNLLMTLRLWSSRAKRSGSGVKQTLNFDLLKLAGDVESNPGPSRGHMTEYKPTVRLATRDDVPRAVRTLAAAFADYPATRHTVDPDRHIERVTELQELFLTRVGLDIGKVWVADDGAAVAVWTTPESVEAGAVFAEIGPRMAELSGSRLAAQQQMEGLLAPHRPKEPAWFLATVGVSPDHQGKGLGSAVVLPGVEAAERAGVPAFLETSAPRNLPFYERLGFTVTADVEVPEGPRTWCMTRKPGA

SEQ ID NO: 2308 - protein, 887 aa, synthetic construct
MALPVTALLLPLALLLHAARPDIQMTQSPSSLSASVGDRVTITCKASDHINNWLAWYQQKPGQAPKLLIYGATTLETGVPSRFSGSGSGTDYTLTISSLQPEDFATYYCQQSWNTPWTFGQGTKLEIKRLEDLKNVFPPEVAVFEPSEAEISHTQKATLVCLATGFYPDHVELSWWVNGKEVHSGVCTDPQPLKEQPALNDSRYCLSSRLRVSATFWQNPRNHFRCQVQFYGLSENDEWTQDRAKPVTQIVSAEAWGRADCGFTSESYQQGVLSATILYEILLGKATLYAVLVSALVLMAMVKRKDSRGRAKRSGSGATNFSLLKQAGDVEENPGPTSATMDWIWRILFLVGAATGAHSGPARSEDRYRNPKGSFGGGSGGGGSGGGGSFEQVQLQQPGAELVKPGASVKMSCKASGYAFSSYWINWMKQKPGQGLEWIGQIYPGDGDTNYNGKFKGRATLTADTSSSTAYMQLSSLTSEDSAVYFCARSITTVVGCAMDYWGQGTSVTVSSTRIQNPDPAVYQLRDSKSSDKSVCLFTDFDSQTNVSQSKDSDVYITDKCVLDMRSMDFKSNSAVAWSNKSDFACANAFNNSIIPEDTFFPSPESSCDVKLVEKSFETDTNLNFQNLSVIGFRILLLKVAGFNLLMTLRLWSSRAKRSGSGVKQTLNFDLLKLAGDVESNPGPSRGHMTEYKPTVRLATRDDVPRAVRTLAAAFADYPATRHTVDPDRHIERVTELQELFLTRVGLDIGKVWVADDGAAVAVWTTPESVEAGAVFAEIGPRMAELSGSRLAAQQQMEGLLAPHRPKEPAWFLATVGVSPDHQGKGLGSAVVLPGVEAAERAGVPAFLETSAPRNLPFYERLGFTVTADVEVPEGPRTWCMTRKPGA

SEQ ID NO: 2309 - protein, 797 aa, synthetic construct
MALPVTALLLPLALLLHAARPACRARSEDRYRNPKGSAGTGGGGSGGGGSGGGGSEFDIQMTQSPSSLSASVGDRVTITCKASDHINNWLAWYQQKPGQAPKLLIYGATTLETGVPSRFSGSGSGTDYTLTISSLQPEDFATYYCQQSWNTPWTFGQGTKLEIKRLEDLKNVFPPEVAVFEPSEAEISHTQKATLVCLATGFYPDHVELSWWVNGKEVHSGVCTDPQPLKEQPALNDSRYCLSSRLRVSATFWQNPRNHFRCQVQFYGLSENDEWTQDRAKPVTQIVSAEAWGRADCGFTSESYQQGVLSATILYEILLGKATLYAVLVSALVLMAMVKRKDSRGRAKRSGSGATNFSLLKQAGDVEENPGPTSATMDWIWRILFLVGAATGAHSGPEVQLVESGGGLVQAGGSLRLSCAASGRTFTMGWFRQAPGKEREFVAAISLSPTLAYYADSVKGRFTISRDNAKNTVVLQMNSLKPEDTALYYCAADRKSVMSIRPDYWGQGTQVTVSSGSGGGGSGGGGSGGGGSFEQVQLQQPGAELVKPGASVKMSCKASGYAFSSYWINWMKQKPGQGLEWIGQIYPGDGDTNYNGKFKGRATLTADTSSSTAYMQLSSLTSEDSAVYFCARSITTVVGCAMDYWGQGTSVTVSSTRIQNPDPAVYQLRDSKSSDKSVCLFTDFDSQTNVSQSKDSDVYITDKCVLDMRSMDFKSNSAVAWSNKSDFACANAFNNSIIPEDTFFPSPESSCDVKLVEKSFETDTNLNFQNLSVIGFRILLLKVAGFNLLMTLRLWSS

SEQ ID NO: 2310 - protein, 793 aa, synthetic construct
MALPVTALLLPLALLLHAARPACARSEDRYRNPKGTGGGGSGGGGSGGGGSEFDIQMTQSPSSLSASVGDRVTITCKASDHINNWLAWYQQKPGQAPKLLIYGATTLETGVPSRFSGSGSGTDYTLTISSLQPEDFATYYCQQSWNTPWTFGQGTKLEIKRLEDLKNVFPPEVAVFEPSEAEISHTQKATLVCLATGFYPDHVELSWWVNGKEVHSGVCTDPQPLKEQPALNDSRYCLSSRLRVSATFWQNPRNHFRCQVQFYGLSENDEWTQDRAKPVTQIVSAEAWGRADCGFTSESYQQGVLSATILYEILLGKATLYAVLVSALVLMAMVKRKDSRGRAKRSGSGATNFSLLKQAGDVEENPGPTSATMDWIWRILFLVGAATGAHSGPEVQLVESGGGLVQAGGSLRLSCAASGRTFTMGWFRQAPGKEREFVAAISLSPTLAYYADSVKGRFTISRDNAKNTVVLQMNSLKPEDTALYYCAADRKSVMSIRPDYWGQGTQVTVSSGSGGGGSGGGGSGGGGSFEQVQLQQPGAELVKPGASVKMSCKASGYAFSSYWINWMKQKPGQGLEWIGQIYPGDGDTNYNGKFKGRATLTADTSSSTAYMQLSSLTSEDSAVYFCARSITTVVGCAMDYWGQGTSVTVSSTRIQNPDPAVYQLRDSKSSDKSVCLFTDFDSQTNVSQSKDSDVYITDKCVLDMRSMDFKSNSAVAWSNKSDFACANAFNNSIIPEDTFFPSPESSCDVKLVEKSFETDTNLNFQNLSVIGFRILLLKVAGFNLLMTLRLWSS

SEQ ID NO: 2311 - protein, 887 aa, synthetic construct
MALPVTALLLPLALLLHAARPDIQMTQSPSSLSASVGDRVTITCKASDHINNWLAWYQQKPGQAPKLLIYGATTLETGVPSRFSGSGSGTDYTLTISSLQPEDFATYYCQQSWNTPWTFGQGTKLEIKRLEDLKNVFPPEVAVFEPSEAEISHTQKATLVCLATGFYPDHVELSWWVNGKEVHSGVCTDPQPLKEQPALNDSRYCLSSRLRVSATFWQNPRNHFRCQVQFYGLSENDEWTQDRAKPVTQIVSAEAWGRADCGFTSESYQQGVLSATILYEILLGKATLYAVLVSALVLMAMVKRKDSRGRAKRSGSGATNFSLLKQAGDVEENPGPTSATMDWIWRILFLVGAATGAHSGPARSEDRYRNPKGSGGGGSGGGGSGGGGSFEQVQLQQPGAELVKPGASVKMSCKASGYAFSSYWINWMKQKPGQGLEWIGQIYPGDGDTNYNGKFKGRATLTADTSSSTAYMQLSSLTSEDSAVYFCARSITTVVGCAMDYWGQGTSVTVSSTRIQNPDPAVYQLRDSKSSDKSVCLFTDFDSQTNVSQSKDSDVYITDKCVLDMRSMDFKSNSAVAWSNKSDFACANAFNNSIIPEDTFFPSPESSCDVKLVEKSFETDTNLNFQNLSVIGFRILLLKVAGFNLLMTLRLWSSRAKRSGSGVKQTLNFDLLKLAGDVESNPGPSRGHMTEYKPTVRLATRDDVPRAVRTLAAAFADYPATRHTVDPDRHIERVTELQELFLTRVGLDIGKVWVADDGAAVAVWTTPESVEAGAVFAEIGPRMAELSGSRLAAQQQMEGLLAPHRPKEPAWFLATVGVSPDHQGKGLGSAVVLPGVEAAERAGVPAFLETSAPRNLPFYERLGFTVTADVEVPEGPRTWCMTRKPGA

SEQ ID NO: 2312 - protein, 793 aa, synthetic construct; identical to SEQ ID NO: 2310

SEQ ID NO: 2313 - protein, 870 aa, synthetic construct
MALPVTALLLPLALLLHAARPSYVLTQPPSVSVAPGQTARITCGGNNIGGKSVHWYQQPPGQAPVVVVYDDSDRPSGIPERFSGSNSGNTATLTISRVEAGDEAVYYCQVWDSSSDHVVFGGGTKLTVLLEDLKHVFPPEVAVFEPSDAEIWHTQKATLVCLATGFYPDHVELSWWVNGKEVHSGVSTDPQPLKEQPALNDSRYCLSSRLRVSATFWQNPRNHFRCQVQFYGLSENDEWTQDRAKPVTQIVSAEAWGRADCGFTSESYQQGVLSAYYMYLLLLLKSVVYFAIITCCLLRRTAFCCNGEKSRAKRSGSGATNFSLLKQAGDVEENPGPTSMDWIWRILFLVGAATGAHSFEQLQLQESGPGLVKPSETLSLTCTVSGGSISSSSYFWGWIRQPPGKGLEWIGSIYYSGITYYNPSLKSRVTISVDTSKNQFSLKLSSVTAADTAVYYCARHDGAVAGLFDYWGQGTLVTVSSATRSQPHTKPSVFVMKNGTNVACLVKEFYPKDIRINLVSSKKITEFDPAIVISPSGKYNAVKLGKYEDSNSVTCSVQHDNKTVHSTDFEVKTDSTDHVKPKETENTKQPSKSCHKPKAIVHTEKVNMMSLTVLGFRILLLKVAGFNLLMTLRLWSSRAKRSGSGVKQTLNFDLLKLAGDVESNPGPSRGHMTEYKPTVRLATRDDVPRAVRTLAAAFADYPATRHTVDPDRHIERVTELQELFLTRVGLDIGKVWVADDGAAVAVWTTPESVEAGAVFAEIGPRMAELSGSRLAAQQQMEGLLAPHRPKEPAWFLATVGVSPDHQGKGLGSAVVLPGVEAAERAGVPAFLETSAPRNLPFYERLGFTVTADVEVPEGPRTWCMTRKPGA

SEQ ID NO: 2314 - protein, 1076 aa, synthetic construct
MALPVTALLLPLALLLHAARPDDIQLTQSPSSLSASVGDRVTITCKASQSVDYEGDSFLNWYQQKPGKAPKLLIYAASNLESGVPSRFSGSGSGTDFTLTISSLQPEDFATYYCQQSNEDPLTFGQGTKVEIKRLEDLKNVFPPEVAVFEPSEAEISHTQKATLVCLATGFYPDHVELSWWVNGKEVHSGVSTDPQPLKEQPALNDSRYCLSSRLRVSATFWQNPRNHFRCQVQFYGLSENDEWTQDRAKPVTQIVSAEAWGRADCGSQSFGLLDPKLCYLLDGILFIYGVILTALFLRVKFSRSADAPAYQQGQNQLYNELNLGRREEYDVLDKRRGRDPEMGGKPRRKNPQEGLYNELQKDKMAEAYSEIGMKGERRRGKGHDGLYQGLSTATKDTYDALHMQALPPRRAKRSGSGATNFSLLKQAGDVEENPGPTSMDWIWRILFLVGAATGAHSFEEVQLVESGGGLVQPGGSLRLSCAASGYTFSSYWIEWVRQAPGKGLEWIGEILPGGGDTNYNEIFKGRATFSADTSKNTAYLQMNSLRAEDTAVYYCTRRVPIRLDYWGQGTLVTVSSTRIQNPDPAVYQLRDSKSSDKSVCLFTDFDSQTNVSQSKDSDVYITDKTVLDMRSMDFKSNSAVAWSNKSDFACANAFNNSIIPEDTFFPSPESSCGTQSFGLLDPKLCYLLDGILFIYGVILTALFLRVKFSRSADAPAYQQGQNQLYNELNLGRREEYDVLDKRRGRDPEMGGKPRRKNPQEGLYNELQKDKMAEAYSEIGMKGERRRGKGHDGLYQGLSTATKDTYDALHMQALPPRRAKRSGSGVKQTLNFDLLKLAGDVESNPGPSRMYRMQLLSCIALSLALVTNSAPTSSSTKKTQLQLEHLLLDLQMILNGINNYKNPKLTRMLTFKFYMPKKATELKHLQCLEEELKPLEEVLNLAQSKNFHLRPRDLISNINVIVLELKGSETTFMCEYADETATIVEFLNRWITFCQSIISTLTARKIEVMYPPPYLDNEKSNGTIIHVKGKHLCPSPLFPGPSKPFWVLVVVGGVLACYSLLVTVAFIIFWVRSKRS

SEQ ID NO: 2315 - protein, 867 aa, synthetic construct
MALPVTALLLPLALLLHAARPDIQMTQSPSSLSASVGDRVTITCKASDHINNWLAWYQQKPGQAPKLLIYGATTLETGVPSRFSGSGSGTDYTLTISSLQPEDFATYYCQQSWNTPWTFGQGTKLEIKRLEARSEDRYRNPKEDLKNVFPPEVAVFEPSEAEISHTQKATLVCLATGFYPDHVELSWWVNGKEVHSGVCTDPQPLKEQPALNDSRYCLSSRLRVSATFWQNPRNHFRCQVQFYGLSENDEWTQDRAKPVTQIVSAEAWGRADCGFTSESYQQGVLSATILYEILLGKATLYAVLVSALVLMAMVKRKDSRGRAKRSGSGATNFSLLKQAGDVEENPGPTSMDWIWRILFLVGAATGAHSFEQVQLQQPGAELVKPGASVKMSCKASGYAFSSYWINWMKQKPGQGLEWIGQIYPGDGDTNYNGKFKGRATLTADTSSSTAYMQLSSLTSEDSAVYFCARSITTVVGCAMDYWGQGTSVTVSSTRIQNPDPAVYQLRDSKSSDKSVCLFTDFDSQTNVSQSKDSDVYITDKCVLDMRSMDFKSNSAVAWSNKSDFACANAFNNSIIPEDTFFPSPESSCDVKLVEKSFETDTNLNFQNLSVIGFRILLLKVAGFNLLMTLRLWSSRAKRSGSGVKQTLNFDLLKLAGDVESNPGPSRGHMTEYKPTVRLATRDDVPRAVRTLAAAFADYPATRHTVDPDRHIERVTELQELFLTRVGLDIGKVWVADDGAAVAVWTTPESVEAGAVFAEIGPRMAELSGSRLAAQQQMEGLLAPHRPKEPAWFLATVGVSPDHQGKGLGSAVVLPGVEAAERAGVPAFLETSAPRNLPFYERLGFTVTADVEVPEGPRTWCMTRKPGA

SEQ ID NO: 2316 - protein, 963 aa, synthetic construct
MALPVTALLLPLALLLHAARPDIQMTQSPSSLSASVGDRVTITCKASDHINNWLAWYQQKPGQAPKLLIYGATTLETGVPSRFSGSGSGTDYTLTISSLQPEDFATYYCQQSWNTPWTFGQGTKLEIKRLEARSEDRYRNPKEDLKNVFPPEVAVFEPSEAEISHTQKATLVCLATGFYPDHVELSWWVNGKEVHSGVSTDPQPLKEQPALNDSRYCLSSRLRVSATFWQNPRNHFRCQVQFYGLSENDEWTQDRAKPVTQIVSAEAWGRADCGSQSFGLLDPKLCYLLDGILFIYGVILTALFLRVKFSRSADAPAYQQGQNQLYNELNLGRREEYDVLDKRRGRDPEMGGKPRRKNPQEGLYNELQKDKMAEAYSEIGMKGERRRGKGHDGLYQGLSTATKDTYDALHMQALPPRRAKRSGSGATNFSLLKQAGDVEENPGPTSMDWIWRILFLVGAATGAHSFEQVQLQQPGAELVKPGASVKMSCKASGYAFSSYWINWMKQKPGQGLEWIGQIYPGDGDTNYNGKFKGRATLTADTSSSTAYMQLSSLTSEDSAVYFCARSITTVVGCAMDYWGQGTSVTVSSTRIQNPDPAVYQLRDSKSSDKSVCLFTDFDSQTNVSQSKDSDVYITDKCVLDMRSMDFKSNSAVAWSNKSDFACANAFNNSIIPEDTFFPSPESSCDVKLVEKSFETDTNLNFQNLSVIGFRILLLKVAGFNLLMTLRLWSSRAKRSGSGVKQTLNFDLLKLAGDVESNPGPSRGHMTEYKPTVRLATRDDVPRAVRTLAAAFADYPATRHTVDPDRHIERVTELQELFLTRVGLDIGKVWVADDGAAVAVWTTPESVEAGAVFAEIGPRMAELSGSRLAAQQQMEGLLAPHRPKEPAWFLATVGVSPDHQGKGLGSAVVLPGVEAAERAGVPAFLETSAPRNLPFYERLGFTVTADVEVPEGPRTWCMTRKPGA

SEQ ID NO: 2317 - protein, 963 aa, synthetic construct; identical to SEQ ID NO: 2316

SEQ ID NO: 2318 - protein, 634 aa, synthetic construct
MALPVTALLLPLALLLHAARPDIQMTQSPSSLSASVGDRVTITCKASDHINNWLAWYQQKPGQAPKLLIYGATTLETGVPSRFSGSGSGTDYTLTISSLQPEDFATYYCQQSWNTPWTFGQGTKLEIKRLEARSEDRYRNPKEDLKNVFPPEVAVFEPSEAEISHTQKATLVCLATGFYPDHVELSWWVNGKEVHSGVCTDPQPLKEQPALNDSRYCLSSRLRVSATFWQNPRNHFRCQVQFYGLSENDEWTQDRAKPVTQIVSAEAWGRADCGFTSESYQQGVLSATILYEILLGKATLYAVLVSALVLMAMVKRKDSRGRAKRSGSGATNFSLLKQAGDVEENPGPTSMDWIWRILFLVGAATGAHSFEQVQLQQPGAELVKPGASVKMSCKASGYAFSSYWINWMKQKPGQGLEWIGQIYPGDGDTNYNGKFKGRATLTADTSSSTAYMQLSSLTSEDSAVYFCARSITTVVGCAMDYWGQGTSVTVSSTRIQNPDPAVYQLRDSKSSDKSVCLFTDFDSQTNVSQSKDSDVYITDKCVLDMRSMDFKSNSAVAWSNKSDFACANAFNNSIIPEDTFFPSPESSCDVKLVEKSFETDTNLNFQNLSVIGFRILLLKVAGFNLLMTLRLWSS

SEQ ID NO: 2319 - protein, 730 aa, synthetic construct
MALPVTALLLPLALLLHAARPDIQMTQSPSSLSASVGDRVTITCKASDHINNWLAWYQQKPGQAPKLLIYGATTLETGVPSRFSGSGSGTDYTLTISSLQPEDFATYYCQQSWNTPWTFGQGTKLEIKRLEARSEDRYRNPKEDLKNVFPPEVAVFEPSEAEISHTQKATLVCLATGFYPDHVELSWWVNGKEVHSGVSTDPQPLKEQPALNDSRYCLSSRLRVSATFWQNPRNHFRCQVQFYGLSENDEWTQDRAKPVTQIVSAEAWGRADCGSQSFGLLDPKLCYLLDGILFIYGVILTALFLRVKFSRSADAPAYQQGQNQLYNELNLGRREEYDVLDKRRGRDPEMGGKPRRKNPQEGLYNELQKDKMAEAYSEIGMKGERRRGKGHDGLYQGLSTATKDTYDALHMQALPPRMAKRSGSGATNFSLLKQAGDVEENPGPTSMDWIWRILFLVGAATGAHSFEQVQLQQPGAELVKPGASVKMSCKASGYAFSSYWINWMKQKPGQGLEWIGQIYPGDGDTNYNGKFKGRATLTADTSSSTAYMQLSSLTSEDSAVYFCARSITTVVGCAMDYWGQGTSVTVSSTRIQNPDPAVYQLRDSKSSDKSVCLFTDFDSQTNVSQSKDSDVYITDKCVLDMRSMDFKSNSAVAWSNKSDFACANAFNNSIIPEDTFFPSPESSCDVKLVEKSFETDTNLNFQNLSVIGFRILLLKVAGFNLLMTLRLWSS

SEQ ID NO: 2320 - protein, 634 aa, synthetic construct
MALPVTALLLPLALLLHAARPDIQMTQSPSSLSASVGDRVTITCKASDHINNWLAWYQQKPGQAPKLLIYGATTLETGVPSRFSGSGSGTDYTLTISSLQPEDFATYYCQQSWNTPWTFGQGTKLEIKRLEARSEDRYRNPKEDLKNVFPPEVAVFEPSEAEISHTQKATLVCLATGFYPDHVELSWWVNGKEVHSGVCTDPQPLKEQPALNDSRYCLSSRLRVSATFWQNPRNHFRCQVQFYGLSENDEWTQDRAKPVTQIVSAEAWGRADCGFTSESYQQGVLSATILYEILLGKATLYAVLVSALVLMAMVKRKDSRGRAKRSGSGATNFSLLKQAGDVEENPGPTSMDWIWRILFLVGAATGAHSFEQVQLQQPGAELVKPGASVKMSCKASGYAFNSYWINWMKQKPGQGLEWIGQIYPGDGDTNYNGKFKGRATLTADTSSSTAYMQLSSLTSEDSAVYFCARSITTVVGCAMDYWGQGTSVTVSSTRIQNPDPAVYQLRDSKSSDKSVCLFTDFDSQTNVSQSKDSDVYITDKCVLDMRSMDFKSNSAVAWSNKSDFACANAFNNSIIPEDTFFPSPESSCDVKLVEKSFETDTNLNFQNLSVIGFRILLLKVAGFNLLMTLRLWSS

SEQ ID NO: 2321 - protein, 730 aa, synthetic construct
MALPVTALLLPLALLLHAARPDIQMTQSPSSLSASVGDRVTITCKASDHINNWLAWYQQKPGQAPKLLIYGATTLETGVPSRFSGSGSGTDYTLTISSLQPEDFATYYCQQSWNTPWTFGQGTKLEIKRLEARSEDRYRNPKEDLKNVFPPEVAVFEPSEAEISHTQKATLVCLATGFYPDHVELSWWVNGKEVHSGVSTDPQPLKEQPALNDSRYCLSSRLRVSATFWQNPRNHFRCQVQFYGLSENDEWTQDRAKPVTQIVSAEAWGRADCGSQSFGLLDPKLCYLLDGILFIYGVILTALFLRVKFSRSADAPAYQQGQNQLYNELNLGRREEYDVLDKRRGRDPEMGGKPRRKNPQEGLYNELQKDKMAEAYSEIGMKGERRRGKGHDGLYQGLSTATKDTYDALHMQALPPRRAKRSGSGATNFSLLKQAGDVEENPGPTSMDWIWRILFLVGAATGAHSFEQVQLQQPGAELVKPGASVKMSCKASGYAFNSYWINWMKQKPGQGLEWIGQIYPGDGDTNYNGKFKGRATLTADTSSSTAYMQLSSLTSEDSAVYFCARSITTVVGCAMDYWGQGTSVTVSSTRIQNPDPAVYQLRDSKSSDKSVCLFTDFDSQTNVSQSKDSDVYITDKCVLDMRSMDFKSNSAVAWSNKSDFACANAFNNSIIPEDTFFPSPESSCDVKLVEKSFETDTNLNFQNLSVIGFRILLLKVAGFNLLMTLRLWSS

SEQ ID NO: 2322 - protein, 730 aa, synthetic construct; identical to SEQ ID NO: 2321

SEQ ID NO: 2323 - protein, 630 aa, synthetic construct
MALPVTALLLPLALLLHAARPDIQMTQSPSSLSASVGDRVTITCKASDHINNWLAWYQQKPGQAPKLLIYGATTLETGVPSRFSGSGSGTDYTLTISSLQPEDFATYYCQQSWNTPWTFGQGTKLEIKRLEARSEDRYRNPKEDLKNVFPPEVAVFEPSEAEISHTQKATLVCLATGFYPDHVELSWWVNGKEVHSGVCTDPQPLKEQPALNDSRYCLSSRLRVSATFWQNPRNHFRCQVQFYGLSENDEWTQDRAKPVTQIVSAEAWGRADCGFTSESYQQGVLSATILYEILLGKATLYAVLVSALVLMAMVKRKDSRGRAKRSGSGATNFSLLKQAGDVEENPGPTSMDWIWRILFLVGAATGAHSFEQVQLQQPGAELVKPGASVKMSCKASGYAFSSYWINWMKQKPGQGLEWIGQIYPGDGDTNYNGKFKGRATLTADTSSSTAYMQLSSLTSEDSAVYFCARSITTVVGCAMDYWGQGTSVTVSSTRIQNPDPAVYQLRDSKSSDKSVCLFTDFDSQTNVSQSKDSDVYITDKTVLDMRSMDFKSNSAVAWSNKSDFACANAFNNSIIPEDTFFPSPESSCGTITQGLAVPTISSFFPPGYQVSFCLVMVLLFAVDTGLYFSV

SEQ ID NO: 2324 - protein, 726 aa, synthetic construct
MALPVTALLLPLALLLHAARPDIQMTQSPSSLSASVGDRVTITCKASDHINNWLAWYQQKPGQAPKLLIYGATTLETGVPSRFSGSGSGTDYTLTISSLQPEDFATYYCQQSWNTPWTFGQGTKLEIKRLEARSEDRYRNPKEDLKNVFPPEVAVFEPSEAEISHTQKATLVCLATGFYPDHVELSWWVNGKEVHSGVSTDPQPLKEQPALNDSRYCLSSRLRVSATFWQNPRNHFRCQVQFYGLSENDEWTQDRAKPVTQIVSAEAWGRADCGSQSFGLLDPKLCYLLDGILFIYGVILTALFLRVKFSRSADAPAYQQGQNQLYNELNLGRREEYDVLDKRRGRDPEMGGKPRRKNPQEGLYNELQKDKMAEAYSEIGMKGERRRGKGHDGLYQGLSTATKDTYDALHMQALPPRRAKRSGSGATNFSLLKQAGDVEENPGPTSMDWIWRILFLVGAATGAHSFEQVQLQQPGAELVKPGASVKMSCKASGYAFSSYWINWMKQKPGQGLEWIGQIYPGDGDTNYNGKFKGRATLTADTSSSTAYMQLSSLTSEDSAVYFCARSITTVVGCAMDYWGQGTSVTVSSTRIQNPDPAVYQLRDSKSSDKSVCLFTDFDSQTNVSQSKDSDVYITDKTVLDMRSMDFKSNSAVAWSNKSDFACANAFNNSIIPEDTFFPSPESSCGTITQGLAVPTISSFFPPGYQVSFCLVMVLLFAVDTGLYFSV

SEQ ID NO: 2325 - protein, 726 aa, synthetic construct; identical to SEQ ID NO: 2324

SEQ ID NO: 2326 - protein, 733 aa, synthetic construct
MALPVTALLLPLALLLHAARPSYVLTQPPSVSVAPGQTARITCGGNNIGSKSVHWYQQPPGQAPVVVVYDDSDRPSGIPERFSGSNSGNTATLTISRVEAGDEAVYYCQVWDSSSDHVVFGGGTKLTVLLEARSEDRYRNPKEDLKNVFPPEVAVFEPSEAEISHTQKATLVCLATGFYPDHVELSWWVNGKEVHSGVCTDPQPLKEQPALNDSRYCLSSRLRVSATFWQNPRNHFRCQVQFYGLSENDEWTQDRAKPVTQIVSAEAWGRADCGFTSESYQQGVLSATILYEILLGKATLYAVLVSALVLMAMVKRKDSRGRAKRSGSGATNFSLLKQAGDVEENPGPTSMDWIWRILFLVGAATGAHSFEQLQLQESGPGLVKPSETLSLTCTVSGGSISSGSYFWGWIRQPPGKGLEWIGSIYYSGITYYNPSLKSRVTISVDTSKNQFSLKLSSVTAADTAVYYCARHDGAVAGLFDYWGQGTLVTVSSATRIQNPDPAVYQLRDSKSSDKSVCLFTDFDSQTNVSQSKDSDVYITDKTVLDMRSMDFKSNSAVAWSNKSDFACANAFNNSIIPEDTFFPSPESSCGTQSFGLLDPKLCYLLDGILFIYGVILTALFLRVKFSRSADAPAYQQGQNQLYNELNLGRREEYDVLDKRRGRDPEMGGKPRRKNPQEGLYNELQKDKMAEAYSEIGMKGERRRGKGHDGLYQGLSTATKDTYDALHMQALPPR

SEQ ID NO: 2327 - protein, 829 aa, synthetic construct
MALPVTALLLPLALLLHAARPSYVLTQPPSVSVAPGQTARITCGGNNIGSKSVHWYQQPPGQAPVVVVYDDSDRPSGIPERFSGSNSGNTATLTISRVEAGDEAVYYCQVWDSSSDHVVFGGGTKLTVLLEARSEDRYRNPKEDLKNVFPPEVAVFEPSEAEISHTQKATLVCLATGFYPDHVELSWWVNGKEVHSGVSTDPQPLKEQPALNDSRYCLSSRLRVSATFWQNPRNHFRCQVQFYGLSENDEWTQDRAKPVTQIVSAEAWGRADCGSQSFGLLDPKLCYLLDGILFIYGVILTALFLRVKFSRSADAPAYQQGQNQLYNELNLGRREEYDVLDKRRGRDPEMGGKPRRKNPQEGLYNELQKDKMAEAYSEIGMKGERRRGKGHDGLYQGLSTATKDTYDALHMQALPPRRAKRSGSGATNFSLLKQAGDVEENPGPTSMDWIWRILFLVGAATGAHSFEQLQLQESGPGLVKPSETLSLTCTVSGGSISSGSYFWGWIRQPPGKGLEWIGSIYYSGITYYNPSLKSRVTISVDTSKNQFSLKLSSVTAADTAVYYCARHDGAVAGLFDYWGQGTLVTVSSATRIQNPDPAVYQLRDSKSSDKSVCLFTDFDSQTNVSQSKDSDVYITDKTVLDMRSMDFKSNSAVAWSNKSDFACANAFNNSIIPEDTFFPSPESSCGTQSFGLLDPKLCYLLDGILFIYGVILTALFLRVKFSRSADAPAYQQGQNQLYNELNLGRREEYDVLDKRRGRDPEMGGKPRRKNPQEGLYNELQKDKMAEAYSEIGMKGERRRGKGHDGLYQGLSTATKDTYDALHMQALPPR

SEQ ID NO: 2328 - protein, 829 aa, synthetic construct; identical to SEQ ID NO: 2327

SEQ ID NO: 2329 - protein, 633 aa, synthetic construct
MALPVTALLLPLALLLHAARPDIQMTQSPSSLSASVGDRVTITCKASDHINNWLAWYQQKPGQAPKLLIYGATTLETGVPSRFSGSGSGTDYTLTISSLQPEDFATYYCQQSWNTPWTFGQGTKLEIKRLEDLKNVFPPEVAVFEPSEAEISHTQKATLVCLATGFYPDHVELSWWVNGKEVHSGVCTDPQPLKEQPALNDSRYCLSSRLRVSATFWQNPRNHFRCQVQFYGLSENDEWTQDRAKPVTQIVSAEAWGRADCGFTSESYQQGVLSATILYEILLGKATLYAVLVSALVLMAMVKRKDSRGRAKRSGSGATNFSLLKQAGDVEENPGPTSMDWIWRILFLVGAATGAHSFEQVQLQQPGAELVKPGASVKMSCKASGYAFSSYWINWMKQKPGQGLEWIGQIYPGDGDTNYNGKFKGRATLTADTSSSTAYMQLSSLTSEDSAVYFCARSITTVVGCAMDYWGQGTSVTVSSTRARSEDRYRNPKIQNPDPAVYQLRDSKSSDKSVCLFTDFDSQTNVSQSKDSDVYITDKCVLDMRSMDFKSNSAVAWSNKSDFACANAFNNSIIPEDTFFPSPESSCDVKLVEKSFETDTNLNFQNLSVIGFRILLLKVAGFNLLMTLRLWSS

SEQ ID NO: 2330 - protein, 629 aa, synthetic construct
MALPVTALLLPLALLLHAARPDIQMTQSPSSLSASVGDRVTITCKASDHINNWLAWYQQKPGQAPKLLIYGATTLETGVPSRFSGSGSGTDYTLTISSLQPEDFATYYCQQSWNTPWTFGQGTKLEIKRLEDLKNVFPPEVAVFEPSEAEISHTQKATLVCLATGFYPDHVELSWWVNGKEVHSGVCTDPQPLKEQPALNDSRYCLSSRLRVSATFWQNPRNHFRCQVQFYGLSENDEWTQDRAKPVTQIVSAEAWGRADCGFTSESYQQGVLSATILYEILLGKATLYAVLVSALVLMAMVKRKDSRGRAKRSGSGATNFSLLKQAGDVEENPGPTSMDWIWRILFLVGAATGAHSFEQVQLQQPGAELVKPGASVKMSCKASGYAFSSYWINWMKQKPGQGLEWIGQIYPGDGDTNYNGKFKGRATLTADTSSSTAYMQLSSLTSEDSAVYFCARSITTVVGCAMDYWGQGTSVTVSSTRARSEDRYRNPKIQNPDPAVYQLRDSKSSDKSVCLFTDFDSQTNVSQSKDSDVYITDKTVLDMRSMDFKSNSAVAWSNKSDFACANAFNNSIIPEDTFFPSPESSCGTITQGLAVPTISSFFPPGYQVSFCLVMVLLFAVDTGLYFSV

SEQ ID NO: 2331 - protein, 731 aa, synthetic construct
MALPVTALLLPLALLLHAARPDIQMTQSPSSLSASVGDRVTITCKASDHINNWLAWYQQKPGQAPKLLIYGATTLETGVPSRFSGSGSGTDYTLTISSLQPEDFATYYCQQSWNTPWTFGQGTKLEIKRLEDLKNVFPPEVAVFEPSEAEISHTQKATLVCLATGFYPDHVELSWWVNGKEVHSGVCTDPQPLKEQPALNDSRYCLSSRLRVSATFWQNPRNHFRCQVQFYGLSENDEWTQDRAKPVTQIVSAEAWGRADCGFTSESYQQGVLSATILYEILLGKATLYAVLVSALVLMAMVKRKDSRGRAKRSGSGATNFSLLKQAGDVEENPGPTSMDWIWRILFLVGAATGAHSFEQVQLQQPGAELVKPGASVKMSCKASGYAFSSYWINWMKQKPGQGLEWIGQIYPGDGDTNYNGKFKGRATLTADTSSSTAYMQLSSLTSEDSAVYFCARSITTVVGCAMDYWGQGTSVTVSSTRARSEDRYRNPKIQNPDPAVYQLRDSKSSDKSVCLFTDFDSQTNVSQSKDSDVYITDKTVLDMRSMDFKSNSAVAWSNKSDFACANAFNNSIIPEDTFFPSPESSCGTQSFGLLDPKLCYLLDGILFIYGVILTALFLRVKFSRSADAPAYQQGQNQLYNELNLGRREEYDVLDKRRGRDPEMGGKPRRKNPQEGLYNELQKDKMAEAYSEIGMKGERRRGKGHDGLYQGLSTATKDTYDALHMQALPPR

SEQ ID NO: 2332 - protein, 706 aa, synthetic construct
MALPVTALLLPLALLLHAARPDIQMTQSPSSLSASVGDRVTITCKASDHINNWLAWYQQKPGQAPKLLIYGATTLETGVPSRFSGSGSGTDYTLTISSLQPEDFATYYCQQSWNTPWTFGQGTKLEIKRLEDLKNVFPPEVAVFEPSEAEISHTQKATLVCLATGFYPDHVELSWWVNGKEVHSGVCTDPQPLKEQPALNDSRYCLSSRLRVSATFWQNPRNHFRCQVQFYGLSENDEWTQDRAKPVTQIVSAEAWGRADCGFTSESYQQGVLSATILYEILLGKATLYAVLVSALVLMAMVKRKDSRGRAKRSGSGATNFSLLKQAGDVEENPGPTSMDWIWRILFLVGAATGAHSFEQVQLQQPGAELVKPGASVKMSCKASGYAFSSYWINWMKQKPGQGLEWIGQIYPGDGDTNYNGKFKGRATLTADTSSSTAYMQLSSLTSEDSAVYFCARSITTVVGCAMDYWGQGTSVTVSSTRARSEDRYRNPKAKPTIASQPLSLRPEACRPAAGGAVHTRGLDFACDIYIWAPLAGTCGVLLLSLVITLYCKRGRKKLLYIFKQPFMRPVQTTQEEDGCSCRFPEEEEGGCELRVKFSRSADAPAYQQGQNQLYNELNLGRREEYDVLDKRRGRDPEMGGKPRRKNPQEGLYNELQKDKMAEAYSEIGMKGERRRGKGHDGLYQGLSTATKDTYDALHMQALPPR

SEQ ID NO: 2333 - protein, 629 aa, synthetic construct
MALPVTALLLPLALLLHAARPDIQMTQSPSSLSASVGDRVTITCKASDHINNWLAWYQQKPGQAPKLLIYGATTLETGVPSRFSGSGSGTDYTLTISSLQPEDFATYYCQQSWNTPWTFGQGTKLEIKRLEDLKNVFPPEVAVFEPSEAEISHTQKATLVCLATGFYPDHVELSWWVNGKEVHSGVCTDPQPLKEQPALNDSRYCLSSRLRVSATFWQNPRNHFRCQVQFYGLSENDEWTQDRAKPVTQIVSAEAWGRADCGFTSESYQQGVLSATILYEILLGKATLYAVLVSALVLMAMVKRKDSRGRAKRSGSGATNFSLLKQAGDVEENPGPTSMDWIWRILFLVGAATGAHSFEQVQLQQPGAELVKPGASVKMSCKASGYAFNSYWINWMKQKPGQGLEWIGQIYPGDGDTNYNGKFKGRATLTADTSSSTAYMQLSSLTSEDSAVYFCARSITTVVGCAMDYWGQGTSVTVSSTRARSEDRYRNPKIQNPDPAVYQLRDSKSSDKSVCLFTDFDSQTNVSQSKDSDVYITDKTVLDMRSMDFKSNSAVAWSNKSDFACANAFNNSIIPEDTFFPSPESSCGTITQGLAVPTISSFFPPGYQVSFCLVMVLLFAVDTGLYFSV

SEQ ID NO: 2334 - protein, 731 aa, synthetic construct
MALPVTALLLPLALLLHAARPDIQMTQSPSSLSASVGDRVTITCKASDHINNWLAWYQQKPGQAPKLLIYGATTLETGVPSRFSGSGSGTDYTLTISSLQPEDFATYYCQQSWNTPWTFGQGTKLEIKRLEDLKNVFPPEVAVFEPSEAEISHTQKATLVCLATGFYPDHVELSWWVNGKEVHSGVCTDPQPLKEQPALNDSRYCLSSRLRVSATFWQNPRNHFRCQVQFYGLSENDEWTQDRAKPVTQIVSAEAWGRADCGFTSESYQQGVLSATILYEILLGKATLYAVLVSALVLMAMVKRKDSRGRAKRSGSGATNFSLLKQAGDVEENPGPTSMDWIWRILFLVGAATGAHSFEQVQLQQPGAELVKPGASVKMSCKASGYAFNSYWINWMKQKPGQGLEWIGQIYPGDGDTNYNGKFKGRATLTADTSSSTAYMQLSSLTSEDSAVYFCARSITTVVGCAMDYWGQGTSVTVSSTRARSEDRYRNPKIQNPDPAVYQLRDSKSSDKSVCLFTDFDSQTNVSQSKDSDVYITDKTVLDMRSMDFKSNSAVAWSNKSDFACANAFNNSIIPEDTFFPSPESSCGTQSFGLLDPKLCYLLDGILFIYGVILTALFLRVKFSRSADAPAYQQGQNQLYNELNLGRREEYDVLDKRRGRDPEMGGKPRRKNPQEGLYNELQKDKMAEAYSEIGMKGERRRGKGHDGLYQGLSTATKDTYDALHMQALPPR

SEQ ID NO: 2335 - protein, 729 aa, synthetic construct
MALPVTALLLPLALLLHAARPDIQMTQSPSSLSASVGDRVTITCKASDHINNWLAWYQQKPGQAPKLLIYGATTLETGVPSRFSGSGSGTDYTLTISSLQPEDFATYYCQQSWNTPWTFGQGTKLEIKRLEDLKNVFPPEVAVFEPSEAEISHTQKATLVCLATGFYPDHVELSWWVNGKEVHSGVSTDPQPLKEQPALNDSRYCLSSRLRVSATFWQNPRNHFRCQVQFYGLSENDEWTQDRAKPVTQIVSAEAWGRADCGSQSFGLLDPKLCYLLDGILFIYGVILTALFLRVKFSRSADAPAYQQGQNQLYNELNLGRREEYDVLDKRRGRDPEMGGKPRRKNPQEGLYNELQKDKMAEAYSEIGMKGERRRGKGHDGLYQGLSTATKDTYDALHMQALPPRRAKRSGSGATNFSLLKQAGDVEENPGPTSMDWIWRILFLVGAATGAHSFEQVQLQQPGAELVKPGASVKMSCKASGYAFSSYWINWMKQKPGQGLEWIGQIYPGDGDTNYNGKFKGRATLTADTSSSTAYMQLSSLTSEDSAVYFCARSITTVVGCAMDYWGQGTSVTVSSTRARSEDRYRNPKIQNPDPAVYQLRDSKSSDKSVCLFTDFDSQTNVSQSKDSDVYITDKCVLDMRSMDFKSNSAVAWSNKSDFACANAFNNSIIPEDTFFPSPESSCDVKLVEKSFETDTNLNFQNLSVIGFRILLLKVAGFNLLMTLRLWSS

SEQ ID NO: 2336 - protein, 725 aa, synthetic construct
MALPVTALLLPLALLLHAARPDIQMTQSPSSLSASVGDRVTITCKASDHINNWLAWYQQKPGQAPKLLIYGATTLETGVPSRFSGSGSGTDYTLTISSLQPEDFATYYCQQSWNTPWTFGQGTKLEIKRLEDLKNVFPPEVAVFEPSEAEISHTQKATLVCLATGFYPDHVELSWWVNGKEVHSGVSTDPQPLKEQPALNDSRYCLSSRLRVSATFWQNPRNHFRCQVQFYGLSENDEWTQDRAKPVTQIVSAEAWGRADCGSQSFGLLDPKLCYLLDGILFIYGVILTALFLRVKFSRSADAPAYQQGQNQLYNELNLGRREEYDVLDKRRGRDPEMGGKPRRKNPQEGLYNELQKDKMAEAYSEIGMKGERRRGKGHDGLYQGLSTATKDTYDALHMQALPPRRAKRSGSGATNFSLLKQAGDVEENPGPTSMDWIWRILFLVGAATGAHSFEQVQLQQPGAELVKPGASVKMSCKASGYAFSSYWINWMKQKPGQGLEWIGQIYPGDGDTNYNGKFKGRATLTADTSSSTAYMQLSSLTSEDSAVYFCARSITTVVGCAMDYWGQGTSVTVSSTRARSEDRYRNPKIQNPDPAVYQLRDSKSSDKSVCLFTDFDSQTNVSQSKDSDVYITDKTVLDMRSMDFKSNSAVAWSNKSDFACANAFNNSIIPEDTFFPSPESSCGTITQGLAVPTISSFFPPGYQVSFCLVMVLLFAVDTGLYFSV

SEQ ID NO: 2337 - protein, 827 aa, synthetic construct
MALPVTALLLPLALLLHAARPDIQMTQSPSSLSASVGDRVTITCKASDHINNWLAWYQQKPGQAPKLLIYGATTLETGVPSRFSGSGSGTDYTLTISSLQPEDFATYYCQQSWNTPWTFGQGTKLEIKRLEDLKNVFPPEVAVFEPSEAEISHTQKATLVCLATGFYPDHVELSWWVNGKEVHSGVSTDPQPLKEQPALNDSRYCLSSRLRVSATFWQNPRNHFRCQVQFYGLSENDEWTQDRAKPVTQIVSAEAWGRADCGSQSFGLLDPKLCYLLDGILFIYGVILTALFLRVKFSRSADAPAYQQGQNQLYNELNLGRREEYDVLDKRRGRDPEMGGKPRRKNPQEGLYNELQKDKMAEAYSEIGMKGERRRGKGHDGLYQGLSTATKDTYDALHMQALPPRRAKRSGSGATNFSLLKQAGDVEENPGPTSMDWIWRILFLVGAATGAHSFEQVQLQQPGAELVKPGASVKMSCKASGYAFSSYWINWMKQKPGQGLEWIGQIYPGDGDTNYNGKFKGRATLTADTSSSTAYMQLSSLTSEDSAVYFCARSITTVVGCAMDYWGQGTSVTVSSTRARSEDRYRNPKIQNPDPAVYQLRDSKSSDKSVCLFTDFDSQTNVSQSKDSDVYITDKTVLDMRSMDFKSNSAVAWSNKSDFACANAFNNSIIPEDTFFPSPESSCGTQSFGLLDPKLCYLLDGILFIYGVILTALFLRVKFSRSADAPAYQQGQNQLYNELNLGRREEYDVLDKRRGRDPEMGGKPRRKNPQEGLYNELQKDKMAEAYSEIGMKGERRRGKGHDGLYQGLSTATKDTYDALHMQALPPR

SEQ ID NO: 2338 - protein, 802 aa, synthetic construct
MALPVTALLLPLALLLHAARPDIQMTQSPSSLSASVGDRVTITCKASDHINNWLAWYQQKPGQAPKLLIYGATTLETGVPSRFSGSGSGTDYTLTISSLQPEDFATYYCQQSWNTPWTFGQGTKLEIKRLEDLKNVFPPEVAVFEPSEAEISHTQKATLVCLATGFYPDHVELSWWVNGKEVHSGVSTDPQPLKEQPALNDSRYCLSSRLRVSATFWQNPRNHFRCQVQFYGLSENDEWTQDRAKPVTQIVSAEAWGRADCGSQSFGLLDPKLCYLLDGILFIYGVILTALFLRVKFSRSADAPAYQQGQNQLYNELNLGRREEYDVLDKRRGRDPEMGGKPRRKNPQEGLYNELQKDKMAEAYSEIGMKGERRRGKGHDGLYQGLSTATKDTYDALHMQALPPRRAKRSGSGATNFSLLKQAGDVEENPGPTSMDWIWRILFLVGAATGAHSFEQVQLQQPGAELVKPGASVKMSCKASGYAFSSYWINWMKQKPGQGLEWIGQIYPGDGDTNYNGKFKGRATLTADTSSSTAYMQLSSLTSEDSAVYFCARSITTVVGCAMDYWGQGTSVTVSSTRARSEDRYRNPKAKPTIASQPLSLRPEACRPAAGGAVHTRGLDFACDIYIWAPLAGTCGVLLLSLVITLYCKRGRKKLLYIFKQPFMRPVQTTQEEDGCSCRFPEEEEGGCELRVKFSRSADAPAYQQGQNQLYNELNLGRREEYDVLDKRRGRDPEMGGKPRRKNPQEGLYNELQKDKMAEAYSEIGMKGERRRGKGHDGLYQGLSTATKDTYDALHMQALPPR

SEQ ID NO: 2339 - protein, 828 aa, synthetic construct
MALPVTALLLPLALLLHAARPSYVLTQPPSVSVAPGQTARITCGGNNIGSKSVHWYQQPPGQAPVVVVYDDSDRPSGIPERFSGSNSGNTATLTISRVEAGDEAVYYCQVWDSSSDHVVFGGGTKLTVLLEDLKNVFPPEVAVFEPSEAEISHTQKATLVCLATGFYPDHVELSWWVNGKEVHSGVSTDPQPLKEQPALNDSRYCLSSRLRVSATFWQNPRNHFRCQVQFYGLSENDEWTQDRAKPVTQIVSAEAWGRADCGSQSFGLLDPKLCYLLDGILFIYGVILTALFLRVKFSRSADAPAYQQGQNQLYNELNLGRREEYDVLDKRRGRDPEMGGKPRRKNPQEGLYNELQKDKMAEAYSEIGMKGERRRGKGHDGLYQGLSTATKDTYDALHMQALPPRRAKRSGSGATNFSLLKQAGDVEENPGPTSMDWIWRILFLVGAATGAHSFEQLQLQESGPGLVKPSETLSLTCTVSGGSISSGSYFWGWIRQPPGKGLEWIGSIYYSGITYYNPSLKSRVTISVDTSKNQFSLKLSSVTAADTAVYYCARHDGAVAGLFDYWGQGTLVTVSSATRARSEDRYRNPKIQNPDPAVYQLRDSKSSDKSVCLFTDFDSQTNVSQSKDSDVYITDKTVLDMRSMDFKSNSAVAWSNKSDFACANAFNNSIIPEDTFFPSPESSCGTQSFGLLDPKLCYLLDGILFIYGVILTALFLRVKFSRSADAPAYQQGQNQLYNELNLGRREEYDVLDKRRGRDPEMGGKPRRKNPQEGLYNELQKDKMAEAYSEIGMKGERRRGKGHDGLYQGLSTATKDTYDALHMQALPPR

SEQ ID NO: 2340 - protein, 418 aa, synthetic construct
MALPVTALLLPLALLLHAARPDIQMTQSPSSLSASVGDRVTITCKASDHINNWLAWYQQKPGQAPKLLIYGATTLETGVPSRFSGSGSGTDYTLTISSLQPEDFATYYCQQSWNTPWTFGQGTKLEIKRGGGGSGGGGSGGGGSQVQLQQPGAELVKPGASVKMSCKASGYAFSSYWINWMKQKPGQGLEWIGQIYPGDGDTNYNGKFKGRATLTADTSSSTAYMQLSSLTSEDSAVYFCARSITTVVGCAMDYWGQGTSVTVSSTRARSEDRYRNPKIQNPDPAVYQLRDSKSSDKSVCLFTDFDSQTNVSQSKDSDVYITDKCVLDMRSMDFKSNSAVAWSNKSDFACANAFNNSIIPEDTFFPSPESSCDVKLVEKSFETDTNLNFQNLSVIGFRILLLKVAGFNLLMTLRLWSS

SEQ ID NO: 2341 - protein, 554 aa, synthetic construct
MALPVTALLLPLALLLHAARPDIQMTQSPSSLSASVGDRVTITCKASDHINNWLAWYQQKPGQAPKLLIYGATTLETGVPSRFSGSGSGTDYTLTISSLQPEDFATYYCQQSWNTPWTFGQGTKLEIKRLEGARSEDRYRNPKGSAGSFEQVQLQQPGAELVKPGASVKMSCKASGYAFSSYWINWMKQKPGQGLEWIGQIYPGDGDTNYNGKFKGRATLTADTSSSTAYMQLSSLTSEDSAVYFCARSITTVVGCAMDYWGQGTSVTVSSTRIQNPDPAVYQLRDSKSSDKSVCLFTDFDSQTNVSQSKDSDVYITDKTVLDMRSMDFKSNSAVAWSNKSDFACANAFNNSIIPEDTFFPSPESSCGTQSFGLLDPKLCYLLDGILFIYGVILTALFLKRGRKKLLYIFKQPFMRPVQTTQEEDGCSCRFPEEEEGGCELRVKFSRSADAPAYQQGQNQLYNELNLGRREEYDVLDKRRGRDPEMGGKPQRRKNPQEGLYNELQKDKMAEAYSEIGMKGERRRGKGHDGLYQGLSTATKDTYDALHMQALPPR

SEQ ID NO: 2342 - protein, 857 aa, synthetic construct
MALPVTALLLPLALLLHAARPSYVLTQPPSVSVAPGQTARITCGGNNIGGKSVHWYQQPPGQAPVVVVYDDSDRPSGIPERFSGSNSGNTATLTISRVEAGDEAVYYCQVWDSSSDHVVFGGGTKLTVLLEDLKHVFPPEVAVFEPSDAEIWHTQKATLVCLATGFYPDHVELSWWVNGKEVHSGVSTDPQPLKEQPALNDSRYCLSSRLRVSATFWQNPRNHFRCQVQFYGLSENDEWTQDRAKPVTQIVSAEAWGRADCGFTSESYQQGVLSATILYLLLLLKSVVYFAIITCCLLRRTAFCCNGEKSRAKRSGSGATNFSLLKQAGDVEENPGPTSMDWIWRILFLVGAATGAHSFEQLQLQESGPGLVKPSETLSLTCTVSGGSISSSSYFWGWIRQPPGKGLEWIGSIYYSGITYYNPSLKSRVTISVDTSKNQFSLKLSSVTAADTAVYYCARHDGAVAGLFDYWGQGTLVTVSSATRIQNPDPAVYQLRDSKSSDKSVCLFTDFDSQTNVSQSKDSDVYITDKCVLDMRSMDFKSNSAVAWSNKSDFACANAFNNSIIPEDTFFPSPESSCDVKLVEKSFETDTNLNFQNLSVLGLRMLFAKTVAVNFLLTAKLFFLRAKRSGSGVKQTLNFDLLKLAGDVESNPGPSRGHMTEYKPTVRLATRDDVPRAVRTLAAAFADYPATRHTVDPDRHIERVTELQELFLTRVGLDIGKVWVADDGAAVAVWTTPESVEAGAVFAEIGPRMAELSGSRLAAQQQMEGLLAPHRPKEPAWFLATVGVSPDHQGKGLGSAVVLPGVEAAERAGVPAFLETSAPRNLPFYERLGFTVTADVEVPEGPRTWCMTRKPGA

SEQ ID NO: 2343 - protein, 623 aa, synthetic construct
MALPVTALLLPLALLLHAARPDIQLTQSPSSLSASVGDRVTITCKASQSVDYDGDSFLNWYQQKPGKAPKLLIYAASNLESGVPSRFSGSGSGTDFTLTISSLQPEDFATYYCQQSNEDPLTFGQGTKVEIKRLEDLKHVFPPEVAVFEPSDAEIWHTQKATLVCLATGFYPDHVELSWWVNGKEVHSGVSTDPQPLKEQPALNDSRYCLSSRLRVSATFWQNPRNHFRCQVQFYGLSENDEWTQDRAKPVTQIVSAEAWGRADCGFTSESYQQGVLSATILYLLLLLKSVVYFAIITCCLLRRTAFCCNGEKSRAKRSGSGATNFSLLKQAGDVEENPGPTSMDWIWRILFLVGAATGAHSFEEVQLVESGGGLVQPGGSLRLSCAASGYTFTSYWIEWVRQAPGKGLEWIGEILPGGGDTNYNEIFKGRATFSADTSKNTAYLQMNSLRAEDTAVYYCTRRVPIRLDYWGQGTLVTVSSTRIQNPDPAVYQLRDSKSSDKSVCLFTDFDSQTNVSQSKDSDVYITDKCVLDMRSMDFKSNSAVAWSNKSDFACANAFNNSIIPEDTFFPSPESSCDVKLVEKSFETDTNLNFQNLSVIGFRILLLKVAGFNLLMTLRLWSS

SEQ ID NO: 2344 - protein, 496 aa, synthetic construct
MALPVTALLLPLALLLHAARPDIQMTQSPSSLSASVGDRVTITCKASDHINNWLAWYQQKPGQAPKLLIYGATTLETGVPSRFSGSGSGTDYTLTISSLQPEDFATYYCQQSWNTPWTFGQGTKLEIKRLEGGSARSEDRYRNPKGGSFEQVQLQQPGAELVKPGASVKMSCKASGYAFSSYWINWMKQKPGQGLEWIGQIYPGDGDTNYNGKFKGRATLTADTSSSTAYMQLSSLTSEDSAVYFCARSITTVVGCAMDYWGQGTSVTVSSTRTTTPAPRPPTPAPTIASQPLSLRPEACRPAAGGAVHTRGLDFACDIYIWAPLAGTCGVLLLSLVITLYCKRGRKKLLYIFKQPFMRPVQTTQEEDGCSCRFPEEEEGGCELRVKFSRSADAPAYQQGQNQLYNELNLGRREEYDVLDKRRGRDPEMGGKPRRKNPQEGLYNELQKDKMAEAYSEIGMKGERRRGKGHDGLYQGLSTATKDTYDALHMQALPPR

SEQ ID NO: 2345 - protein, 658 aa, synthetic construct
MALPVTALLLPLALLLHAARPDIQMTQSPSSLSASVGDRVTITCKASDHINNWLAWYQQKPGQAPKLLIYGATTLETGVPSRFSGSGSGTDYTLTISSLQPEDFATYYCQQSWNTPWTFGQGTKLEIKRLEIQNPDPAVYQLRDSKSSDKSVCLFTDFDSQTNVSQSKDSDVYITDKCVLDMRSMDFKSNSAVAWSNKSDFACANAFNNSIIPEDTFFPSSDVPCDVKLVEKSFETDTNLNFQNLSVIGFRILLLKVAGFNLLMTLRLWSSRAKRSGSGVKQTLNFDLLKLAGDVESNPGPTSATMDWIWRILFLVGAATGAHSGPARSEDRYRNPKGSGGGGSGGGGSGGGGSFEQVQLQQPGAELVKPGASVKMSCKASGYAFSSYWINWMKQKPGQGLEWIGQIYPGDGDTNYNGKFKGRATLTADTSSSTAYMQLSSLTSEDSAVYFCARSITTVVGCAMDYWGQGTSVTVSSTREDLKNVFPPEVAVFEPSKAEIAHTQKATLVCLATGFYPDHVELSWWVNGKEVHSGVCTDPQPLKEQPALNDSRYCLSSRLRVSATFWQNPRNHFRCQVQFYGLSENDEWTQDRAKPVTQIVSAEAWGRADCGITSASYHQGVLSATILYEILLGKATLYAVLVSALVLMAMVKRKDSRG

SEQ ID NO: 2346 - protein, 642 aa, synthetic construct
MALPVTALLLPLALLLHAARPDDIQLTQSPSSLSASVGDRVTITCKASQSVDYEGDSFLNWYQQKPGKAPKLLIYAASNLESGVPSRFSGSGSGTDFTLTISSLQPEDFATYYCQQSNEDPLTFGQGTKVEIKRLEGQPKANPTVTLFPPSSEELQANKATLVCLISDFYPGAVTVAWKADGSPVKAGVETTKPSKQSNNKYAASSYLSLTPEQWKSHRSYSCQVTHEGSTVEKTVAPTECSGSLGEPQLCYILDAILFLYGIVLTLLYCRLKIQVRKAAITSYEKSDGVYTGLSTRNQETYETLKHEKPPQRAKRSGSGATNFSLLKQAGDVEENPGPTSMDWIWRILFLVGAATGAHSFEEVQLVESGGGLVQPGGSLRLSCAASGYTFSSYWIEWVRQAPGKGLEWIGEILPGGGDTNYNEIFKGRATFSADTSKNTAYLQMNSLRAEDTAVYYCTRRVPIRLDYWGQGTLVTVSSTRIQNPDPAVYQLRDSKSSDKSVCLFTDFDSQTNVSQSKDSDVYITDKTVLDMRSMDFKSNSAVAWSNKSDFACANAFNNSIIPEDTFFPSPESSCGTITQGLAVSTISSFFPPGYQVSFCLVMVLLFAVDTGLYFSVKTNIRSSTRDWKDHKFKWRKDPQDK

SEQ ID NO: 2347 - protein, 973 aa, synthetic construct
MALPVTALLLPLALLLHAARPDIQMTQSPSSLSASVGDRVTITCKASDHINNWLAWYQQKPGQAPKLLIYGATTLETGVPSRFSGSGSGTDYTLTISSLQPEDFATYYCQQSWNTPWTFGQGTKLEIKRLEDLKNVFPPEVAVFEPSEAEISHTQKATLVCLATGFYPDHVELSWWVNGKEVHSGVSTDPQPLKEQPALNDSRYCLSSRLRVSATFWQNPRNHFRCQVQFYGLSENDEWTQDRAKPVTQIVSAEAWGRADCGSQSFGLLDPKLCYLLDGILFIYGVILTALFLRVKFSRSADAPAYQQGQNQLYNELNLGRREEYDVLDKRRGRDPEMGGKPRRKNPQEGLYNELQKDKMAEAYSEIGMKGERRRGKGHDGLYQGLSTATKDTYDALHMQALPPRRAKRSGSGATNFSLLKQAGDVEENPGPTSMDWIWRILFLVGAATGAHSFEQVQLQQPGAELVKPGASVKMSCKASGYAFSSYWINWMKQKPGQGLEWIGQIYPGDGDTNYNGKFKGRATLTADTSSSTAYMQLSSLTSEDSAVYFCARSITTVVGCAMDYWGQGTSVTVSSTRIQNPDPAVYQLRDSKSSDKSVCLFTDFDSQTNVSQSKDSDVYITDKTVLDMRSMDFKSNSAVAWSNKSDFACANAFNNSIIPEDTFFPSPESSCGTQSFGLLDPKLCYLLDGILFIYGVILTALFLRVKFSRSADAPAYQQGQNQLYNELNLGRREEYDVLDKRRGRDPEMGGKPRRKNPQEGLYNELQKDKMAEAYSEIGMKGERRRGKGHDGLYQGLSTATKDTYDALHMQALPPRRAKRSGSGVKQTLNFDLLKLAGDVESNPGPSRMARLALSPVPSHWMVALLLLLSAEPVPAARSEDRYRNPKGFSTLAQLKQRNTLKDGIIMIQTLLIILFIIVPIFLLLDKDDSKAGMEEDHTYEGLDIDQTATYEDIVTLRTGEVKWSVGEHPGQE

SEQ ID NO: 2348 - protein, 1077 aa, synthetic construct
MALPVTALLLPLALLLHAARPDIQMTQSPSSLSASVGDRVTITCKASDHINNWLAWYQQKPGQAPKLLIYGATTLETGVPSRFSGSGSGTDYTLTISSLQPEDFATYYCQQSWNTPWTFGQGTKLEIKRLEDLKNVFPPEVAVFEPSEAEISHTQKATLVCLATGFYPDHVELSWWVNGKEVHSGVSTDPQPLKEQPALNDSRYCLSSRLRVSATFWQNPRNHFRCQVQFYGLSENDEWTQDRAKPVTQIVSAEAWGRADCGSQSFGLLDPKLCYLLDGILFIYGVILTALFLRVKFSRSADAPAYQQGQNQLYNELNLGRREEYDVLDKRRGRDPEMGGKPRRKNPQEGLYNELQKDKMAEAYSEIGMKGERRRGKGHDGLYQGLSTATKDTYDALHMQALPPRRAKRSGSGATNFSLLKQAGDVEENPGPTSMDWIWRILFLVGAATGAHSFEQVQLQQPGAELVKPGASVKMSCKASGYAFSSYWINWMKQKPGQGLEWIGQIYPGDGDTNYNGKFKGRATLTADTSSSTAYMQLSSLTSEDSAVYFCARSITTVVGCAMDYWGQGTSVTVSSTRIQNPDPAVYQLRDSKSSDKSVCLFTDFDSQTNVSQSKDSDVYITDKTVLDMRSMDFKSNSAVAWSNKSDFACANAFNNSIIPEDTFFPSPESSCGTQSFGLLDPKLCYLLDGILFIYGVILTALFLRVKFSRSADAPAYQQGQNQLYNELNLGRREEYDVLDKRRGRDPEMGGKPRRKNPQEGLYNELQKDKMAEAYSEIGMKGERRRGKGHDGLYQGLSTATKDTYDALHMQALPPRRAKRSGSGVKQTLNFDLLKLAGDVESNPGPSRMARLALSPVPSHWMVALLLLLSAEPVPAARSEDRYRNPKGSACSRIWQSPRFIARKRGFTVKMHCYMNSASGNVSWLWKQEMDENPQQLKLEKGRMEESQNESLATLTIQGIRFEDNGIYFCQQKCNNTSEVYQGCGTELRVMGFSTLAQLKQRNTLKDGIIMIQTLLIILFIIVPIFLLLDKDDSKAGMEEDHTYEGLDIDQTATYEDIVTLRTGEVKWSVGEHPGQE

SEQ ID NO: 2349 - protein, 1018 aa, synthetic construct
MALPVTALLLPLALLLHAARPDIQMTQSPSSLSASVGDRVTITCKASDHINNWLAWYQQKPGQAPKLLIYGATTLETGVPSRFSGSGSGTDYTLTISSLQPEDFATYYCQQSWNTPWTFGQGTKLEIKRLEDLKNVFPPEVAVFEPSEAEISHTQKATLVCLATGFYPDHVELSWWVNGKEVHSGVSTDPQPLKEQPALNDSRYCLSSRLRVSATFWQNPRNHFRCQVQFYGLSENDEWTQDRAKPVTQIVSAEAWGRADCGSQSFGLLDPKLCYLLDGILFIYGVILTALFLRVKFSRSADAPAYQQGQNQLYNELNLGRREEYDVLDKRRGRDPEMGGKPRRKNPQEGLYNELQKDKMAEAYSEIGMKGERRRGKGHDGLYQGLSTATKDTYDALHMQALPPRRAKRSGSGATNFSLLKQAGDVEENPGPTSMDWIWRILFLVGAATGAHSFEQVQLQQPGAELVKPGASVKMSCKASGYAFSSYWINWMKQKPGQGLEWIGQIYPGDGDTNYNGKFKGRATLTADTSSSTAYMQLSSLTSEDSAVYFCARSITTVVGCAMDYWGQGTSVTVSSTRIQNPDPAVYQLRDSKSSDKSVCLFTDFDSQTNVSQSKDSDVYITDKTVLDMRSMDFKSNSAVAWSNKSDFACANAFNNSIIPEDTFFPSPESSCGTQSFGLLDPKLCYLLDGILFIYGVILTALFLRVKFSRSADAPAYQQGQNQLYNELNLGRREEYDVLDKRRGRDPEMGGKPRRKNPQEGLYNELQKDKMAEAYSEIGMKGERRRGKGHDGLYQGLSTATKDTYDALHMQALPPRRAKRSGSGVKQTLNFDLLKLAGDVESNPGPSRMALPVTALLLPLALLLHAARPARSEDRYRNPKGSACKGGGGSELPTQGTFSNVSTNVSPAKPTTTACARSEDRYRNPKGSACKGGGGSPAPRPPTPAPTIASQPLSLRPEACRPAAGGAVHTRGLDFACDIYIWAPLAGTCGVLLLSLVITLYCNHRNRRRVCKCPRPVV

SEQ ID NO: 2350 - protein, 653 aa, synthetic construct
MALPVTALLLPLALLLHAARPEVQLLETGGGLVQPGGSRGLSCEGSGFTFSGFWMSWVRQTPGKTLEWIGDINSDGSSINYAPSIKDRFTIFRDNDKSILYLQMTNVRSEDTGTYFCVTTYGDYWGQGTTLTVSSASLEDLKNVFPPEVAVFEPSEAEISHTQKATLVCLATGFYPDHVELSWWVNGKEVHSGVCTDPQPLKEQPALNDSRYCLSSRLRVSATFWQNPRNHFRCQVQFYGLSENDEWTQDRAKPVTQIVSAEAWGRADCGFTSESYQQGVLSATILYEILLGKATLYAVLVSALVLMAMVKRKDSRGRAKRSGSGATNFSLLKQAGDVEENPGPTSATMDWIWRILFLVGAATGAHSGPARSEDRYRNPKGSGGGGSGGGGSGGGGSFEDIVMTQSQKFMSTSVGDRVSVTCKASQNVGSHVGWYQQKSGQSPKALIYSASNRYIGVPDRFTGSGSGTDFTLTISNVQSEDLAEYFCQQYHIYPYTFGGGTRLEIKRTVAATRIQNPDPAVYQLRDSKSSDKSVCLFTDFDSQTNVSQSKDSDVYITDKCVLDMRSMDFKSNSAVAWSNKSDFACANAFNNSIIPEDTFFPSPESSCDVKLVEKSFETDTNLNFQNLSVIGFRILLLKVAGFNLLMTLRLWSS

SEQ ID NO: 2351 - protein, 840 aa, synthetic construct
MALPVTALLLPLALLLHAARPSYVLTQPPSVSVAPGQTARITCGGNNIGSKSVHWYQQPPGQAPVVVVYDDSDRPSGIPERFSGSNSGNTATLTISRVEAGDEAVYYCQVWDSSSDHVVFGGGTKLTVLLEARSEDRYRNPKEDLKNVFPPEVAVFEPSEAEISHTQKATLVCLATGFYPDHVELSWWVNGKEVHSGVSTDPQPLKEQPALNDSRYCLSSRLRVSATFWQNPRNHFRCQVQFYGLSENDEWTQDRAKPVTQIVSAEAWGRADCGSQSFGLLDPKLCYLLDGILFIYGVILTALFLRVKFSRSADAPAYQQGQNQLYNELNLGRREEYDVLDKRRGRDPEMGGKPRRKNPQEGLYNELQKDKMAEAYSEIGMKGERRRGKGHDGLYQGLSTATKDTYDALHMQALPPRRAKRSGSGATNFSLLKQAGDVEENPGPTSMDWIWRILFLVGAATGAHSFEQLQLQESGPGLVKPSETLSLTCTVSGGSISSGSYFWGWIRQPPGKGLEWIGSIYYSGITYYNPSLKSRVTISVDTSKNQFSLKLSSVTAADTAVYYCARHDGAVAGLFDYWGQGTLVTVSSATRARSEDRYRNPKIQNPDPAVYQLRDSKSSDKSVCLFTDFDSQTNVSQSKDSDVYITDKTVLDMRSMDFKSNSAVAWSNKSDFACANAFNNSIIPEDTFFPSPESSCGTQSFGLLDPKLCYLLDGILFIYGVILTALFLRVKFSRSADAPAYQQGQNQLYNELNLGRREEYDVLDKRRGRDPEMGGKPRRKNPQEGLYNELQKDKMAEAYSEIGMKGERRRGKGHDGLYQGLSTATKDTYDALHMQALPPR

SEQ ID NO: 2352 - protein, 645 aa, synthetic construct
MALPVTALLLPLALLLHAARPDIQMTQSPSSLSASVGDRVTITCKASDHINNWLAWYQQKPGQAPKLLIYGATTLETGVPSRFSGSGSGTDYTLTISSLQPEDFATYYCQQSWNTPWTFGQGTKLEIKRLEARSEDRYRNPKEDLKNVFPPEVAVFEPSEAEISHTQKATLVCLATGFYPDHVELSWWVNGKEVHSGVCTDPQPLKEQPALNDSRYCLSSRLRVSATFWQNPRNHFRCQVQFYGLSENDEWTQDRAKPVTQIVSAEAWGRADCGFTSESYQQGVLSATILYEILLGKATLYAVLVSALVLMAMVKRKDSRGRAKRSGSGATNFSLLKQAGDVEENPGPTSMDWIWRILFLVGAATGAHSFEQVQLQQPGAELVKPGASVKMSCKASGYAFSSYWINWMKQKPGQGLEWIGQIYPGDGDTNYNGKFKGRATLTADTSSSTAYMQLSSLTSEDSAVYFCARSITTVVGCAMDYWGQGTSVTVSSTRARSEDRYRNPKIQNPDPAVYQLRDSKSSDKSVCLFTDFDSQTNVSQSKDSDVYITDKCVLDMRSMDFKSNSAVAWSNKSDFACANAFNNSIIPEDTFFPSPESSCDVKLVEKSFETDTNLNFQNLSVIGFRILLLKVAGFNLLMTLRLWSS

SEQ ID NO: 2353 - protein, 1027 aa, synthetic construct
MALPVTALLLPLALLLHAARPACEVQLLESGGGLIQPGGSLRLSCAASGFTFSSHAMTWVRQAPGKGLEWVSAISGSGDYTHYADSVKGRFTISRDNSKNTVYLQMNSLRAEDSAVYYCAKDEDGGSLLGHRGQGTLVTVSSGTGGGGSGGGGSGGGGSEFDIQMTQSPSSLSASVGDRVTITCKASDHINNWLAWYQQKPGQAPKLLIYGATTLETGVPSRFSGSGSGTDYTLTISSLQPEDFATYYCQQSWNTPWTFGQGTKLEIKRLEDLKNVFPPEVAVFEPSEAEISHTQKATLVCLATGFYPDHVELSWWVNGKEVHSGVCTDPQPLKEQPALNDSRYCLSSRLRVSATFWQNPRNHFRCQVQFYGLSENDEWTQDRAKPVTQIVSAEAWGRADCGFTSESYQQGVLSATILYEILLGKATLYAVLVSALVLMAMVKRKDSRGRAKRSGSGATNFSLLKQAGDVEENPGPTSATMDWIWRILFLVGAATGAHSGPARSEDRYRNPKGSGGGGSGGGGSGGGGSFEQVQLQQPGAELVKPGASVKMSCKASGYAFSSYWINWMKQKPGQGLEWIGQIYPGDGDTNYNGKFKGRATLTADTSSSTAYMQLSSLTSEDSAVYFCARSITTVVGCAMDYWGQGTSVTVSSTRIQNPDPAVYQLRDSKSSDKSVCLFTDFDSQTNVSQSKDSDVYITDKCVLDMRSMDFKSNSAVAWSNKSDFACANAFNNSIIPEDTFFPSPESSCDVKLVEKSFETDTNLNFQNLSVIGFRILLLKVAGFNLLMTLRLWSSRAKRSGSGVKQTLNFDLLKLAGDVESNPGPSRGHMTEYKPTVRLATRDDVPRAVRTLAAAFADYPATRHTVDPDRHIERVTELQELFLTRVGLDIGKVWVADDGAAVAVWTTPESVEAGAVFAEIGPRMAELSGSRLAAQQQMEGLLAPHRPKEPAWFLATVGVSPDHQGKGLGSAVVLPGVEAAERAGVPAFLETSAPRNLPFYERLGFTVTADVEVPEGPRTWCMTRKPGA

SEQ ID NO: 2354 - protein, 931 aa, synthetic construct
MALPVTALLLPLALLLHAARPDIQMTQSPSSLSASVGDRVTITCKASDHINNWLAWYQQKPGQAPKLLIYGATTLETGVPSRFSGSGSGTDYTLTISSLQPEDFATYYCQQSWNTPWTFGQGTKLEIKRLEDLKNVFPPEVAVFEPSEAEISHTQKATLVCLATGFYPDHVELSWWVNGKEVHSGVCTDPQPLKEQPALNDSRYCLSSRLRVSATFWQNPRNHFRCQVQFYGLSENDEWTQDRAKPVTQIVSAEAWGRADCGFTSESYQQGVLSATILYEILLGKATLYAVLVSALVLMAMVKRKDSRGRAKRSGSGATNFSLLKQAGDVEENPGPTSATMALPVTALLLPLALLLHAARPARSEDRYRNPKGSACKGGGGSELPTQGTFSNVSTNVSPAKPTTTACARSEDRYRNPKGSACSGSGPLGIAGIFEQVQLQQPGAELVKPGASVKMSCKASGYAFSSYWINWMKQKPGQGLEWIGQIYPGDGDTNYNGKFKGRATLTADTSSSTAYMQLSSLTSEDSAVYFCARSITTVVGCAMDYWGQGTSVTVSSTRIQNPDPAVYQLRDSKSSDKSVCLFTDFDSQTNVSQSKDSDVYITDKCVLDMRSMDFKSNSAVAWSNKSDFACANAFNNSIIPEDTFFPSPESSCDVKLVEKSFETDTNLNFQNLSVIGFRILLLKVAGFNLLMTLRLWSSRAKRSGSGVKQTLNFDLLKLAGDVESNPGPSRGHMTEYKPTVRLATRDDVPRAVRTLAAAFADYPATRHTVDPDRHIERVTELQELFLTRVGLDIGKVWVADDGAAVAVWTTPESVEAGAVFAEIGPRMAELSGSRLAAQQQMEGLLAPHRPKEPAWFLATVGVSPDHQGKGLGSAVVLPGVEAAERAGVPAFLETSAPRNLPFYERLGFTVTADVEVPEGPRTWCMTRKPGA

SEQ ID NO: 2355 - protein, 887 aa, synthetic construct; identical to SEQ ID NO: 2311

SEQ ID NO: 2356 - protein, 998 aa, synthetic construct
MALPVTALLLPLALLLHAARPDIQMTQSPSSLSASVGDRVTITCKASDHINNWLAWYQQKPGQAPKLLIYGATTLETGVPSRFSGSGSGTDYTLTISSLQPEDFATYYCQQSWNTPWTFGQGTKLEIKRLEDLKNVFPPEVAVFEPSEAEISHTQKATLVCLATGFYPDHVELSWWVNGKEVHSGVCTDPQPLKEQPALNDSRYCLSSRLRVSATFWQNPRNHFRCQVQFYGLSENDEWTQDRAKPVTQIVSAEAWGRADCGFTSESYQQGVLSATILYEILLGKATLYAVLVSALVLMAMVKRKDSRGRAKRSGSGATNFSLLKQAGDVEENPGPTSATMDWIWRILFLVGAATGAHSGPQVQLQESGPGLVKPSQTLSLTCTVSGGSITTGEFYWNWFRQPPGKGLEWMGAIAASGSTTYSPSFESRTSISRDTSKNQFSLKLSSVTAADTAVYYCGRSFGVAAVTTGQNRGQGTLVTVSSGSGGGGSGGGGSGGGGSFEQVQLQQPGAELVKPGASVKMSCKASGYAFSSYWINWMKQKPGQGLEWIGQIYPGDGDTNYNGKFKGRATLTADTSSSTAYMQLSSLTSEDSAVYFCARSITTVVGCAMDYWGQGTSVTVSSTRIQNPDPAVYQLRDSKSSDKSVCLFTDFDSQTNVSQSKDSDVYITDKCVLDMRSMDFKSNSAVAWSNKSDFACANAFNNSIIPEDTFFPSPESSCDVKLVEKSFETDTNLNFQNLSVIGFRILLLKVAGFNLLMTLRLWSSRAKRSGSGVKQTLNFDLLKLAGDVESNPGPSRGHMTEYKPTVRLATRDDVPRAVRTLAAAFADYPATRHTVDPDRHIERVTELQELFLTRVGLDIGKVWVADDGAAVAVWTTPESVEAGAVFAEIGPRMAELSGSRLAAQQQMEGLLAPHRPKEPAWFLATVGVSPDHQGKGLGSAVVLPGVEAAERAGVPAFLETSAPRNLPFYERLGFTVTADVEVPEGPRTWCMTRKPGA

SEQ ID NO: 2357 - protein, 869 aa, synthetic construct
MALPVTALLLPLALLLHAARPDIQMTQSPSSLSASVGDRVTITCKASDHINNWLAWYQQKPGQAPKLLIYGATTLETGVPSRFSGSGSGTDYTLTISSLQPEDFATYYCQQSWNTPWTFGQGTKLEIKRLEDLKNVFPPEVAVFEPSEAEISHTQKATLVCLATGFYPDHVELSWWVNGKEVHSGVSTDPQPLKEQPALNDSRYCLSSRLRVSATFWQNPRNHFRCQVQFYGLSENDEWTQDRAKPVTQIVSAEAWGRADCGFTSESYQQGVLSAYYMYLLLLLKSVVYFAIITCCLLRRTAFCCNGEKSRAKRSGSGATNFSLLKQAGDVEENPGPTSATMDWIWRILFLVGAATGAHSARSEDRYRNPKFEQVQLQQPGAELVKPGASVKMSCKASGYAFSSYWINWMKQKPGQGLEWIGQIYPGDGDTNYNGKFKGRATLTADTSSSTAYMQLSSLTSEDSAVYFCARSITTVVGCAMDYWGQGTSVTVSSTRIQNPDPAVYQLRDSKSSDKSVCLFTDFDSQTNVSQSKDSDVYITDKCVLDMRSMDFKSNSAVAWSNKSDFACANAFNNSIIPEDTFFPSPESSCDVKLVEKSFETDTNLNFQNLSVIGFRILLLKVAGFNLLMTLRLWSSRAKRSGSGVKQTLNFDLLKLAGDVESNPGPSRGHMTEYKPTVRLATRDDVPRAVRTLAAAFADYPATRHTVDPDRHIERVTELQELFLTRVGLDIGKVWVADDGAAVAVWTTPESVEAGAVFAEIGPRMAELSGSRLAAQQQMEGLLAPHRPKEPAWFLATVGVSPDHQGKGLGSAVVLPGVEAAERAGVPAFLETSAPRNLPFYERLGFTVTADVEVPEGPRTWCMTRKPGA

SEQ ID NO: 2358 - protein, 897 aa, synthetic construct
MALPVTALLLPLALLLHAARPDIQMTQSPSSLSASVGDRVTITCKASDHINNWLAWYQQKPGQAPKLLIYGATTLETGVPSRFSGSGSGTDYTLTISSLQPEDFATYYCQQSWNTPWTFGQGTKLEIKRLEGQPKANPTVTLFPPSSEELQANKATLVCLISDFYPGAVTVAWKADGSPVKAGVETTKPSKQSNNKYAASSYLSLTPEQWKSHRSYSCQVTHEGSTVEKTVAPTECSGSPIKTDVITMDPKDNCSKDANDTLLLQLTNTSATILYEILLGKATLYAVLVSALVLMAMVKRKDSRGRAKRSGSGATNFSLLKQAGDVEENPGPTSATMDWIWRILFLVGAATGAHSARSEDRYRNPKFEQVQLQQPGAELVKPGASVKMSCKASGYAFSSYWINWMKQKPGQGLEWIGQIYPGDGDTNYNGKFKGRATLTADTSSSTAYMQLSSLTSEDSAVYFCARSITTVVGCAMDYWGQGTSVTVSSTRASTKGPSVFPLAPSSKSTSGGTAALGCLVKDYFPEPVTVSWNSGALTSGVHTFPAVLQSSGLYSLSSVVTVPSSSLGTQTYICNVNHKPSNTKVDKRVEPKSCGTEVKTDSTDHVKPKETENTKQPSKSCHKPKAIVHTEKVNMMSLTVLGFRILLLKVAGFNLLMTLRLWSSRAKRSGSGVKQTLNFDLLKLAGDVESNPGPSRGHMTEYKPTVRLATRDDVPRAVRTLAAAFADYPATRHTVDPDRHIERVTELQELFLTRVGLDIGKVWVADDGAAVAVWTTPESVEAGAVFAEIGPRMAELSGSRLAAQQQMEGLLAPHRPKEPAWFLATVGVSPDHQGKGLGSAVVLPGVEAAERAGVPAFLETSAPRNLPFYERLGFTVTADVEVPEGPRTWCMTRKPGA

SEQ ID NO: 2359 - protein, 888 aa, synthetic construct
MALPVTALLLPLALLLHAARPDIQMTQSPSSLSASVGDRVTITCKASDHINNWLAWYQQKPGQAPKLLIYGATTLETGVPSRFSGSGSGTDYTLTISSLQPEDFATYYCQQSWNTPWTFGQGTKLEIKRLEDLKNVFPPEVAVFEPSEAEISHTQKATLVCLATGFYPDHVELSWWVNGKEVHSGVSTDPQPLKEQPALNDSRYCLSSRLRVSATFWQNPRNHFRCQVQFYGLSENDEWTQDRAKPVTQIVSAEAWGRADCGFTSESYQQGVLSAYYMYLLLLLKSVVYFAIITCCLLRRTAFCCNGEKSRAKRSGSGATNFSLLKQAGDVEENPGPTSATMDWIWRILFLVGAATGAHSGPARSEDRYRNPKGSGGGGSGGGGSGGGGSFEQVQLQQPGAELVKPGASVKMSCKASGYAFSSYWINWMKQKPGQGLEWIGQIYPGDGDTNYNGKFKGRATLTADTSSSTAYMQLSSLTSEDSAVYFCARSITTVVGCAMDYWGQGTSVTVSSTRIQNPDPAVYQLRDSKSSDKSVCLFTDFDSQTNVSQSKDSDVYITDKCVLDMRSMDFKSNSAVAWSNKSDFACANAFNNSIIPEDTFFPSPESSCDVKLVEKSFETDTNLNFQNLSVIGFRILLLKVAGFNLLMTLRLWSSRAKRSGSGVKQTLNFDLLKLAGDVESNPGPSRGHMTEYKPTVRLATRDDVPRAVRTLAAAFADYPATRHTVDPDRHIERVTELQELFLTRVGLDIGKVWVADDGAAVAVWTTPESVEAGAVFAEIGPRMAELSGSRLAAQQQMEGLLAPHRPKEPAWFLATVGVSPDHQGKGLGSAVVLPGVEAAERAGVPAFLETSAPRNLPFYERLGFTVTADVEVPEGPRTWCMTRKPGA

SEQ ID NO: 2360 - protein, 916 aa, synthetic construct
MALPVTALLLPLALLLHAARPDIQMTQSPSSLSASVGDRVTITCKASDHINNWLAWYQQKPGQAPKLLIYGATTLETGVPSRFSGSGSGTDYTLTISSLQPEDFATYYCQQSWNTPWTFGQGTKLEIKRLEGQPKANPTVTLFPPSSEELQANKATLVCLISDFYPGAVTVAWKADGSPVKAGVETTKPSKQSNNKYAASSYLSLTPEQWKSHRSYSCQVTHEGSTVEKTVAPTECSGSPIKTDVITMDPKDNCSKDANDTLLLQLTNTSATILYEILLGKATLYAVLVSALVLMAMVKRKDSRGRAKRSGSGATNFSLLKQAGDVEENPGPTSATMDWIWRILFLVGAATGAHSGPARSEDRYRNPKGSGGGGSGGGGSGGGGSFEQVQLQQPGAELVKPGASVKMSCKASGYAFSSYWINWMKQKPGQGLEWIGQIYPGDGDTNYNGKFKGRATLTADTSSSTAYMQLSSLTSEDSAVYFCARSITTVVGCAMDYWGQGTSVTVSSTRASTKGPSVFPLAPSSKSTSGGTAALGCLVKDYFPEPVTVSWNSGALTSGVHTFPAVLQSSGLYSLSSVVTVPSSSLGTQTYICNVNHKPSNTKVDKRVEPKSCGTEVKTDSTDHVKPKETENTKQPSKSCHKPKAIVHTEKVNMMSLTVLGFRILLLKVAGFNLLMTLRLWSSRAKRSGSGVKQTLNFDLLKLAGDVESNPGPSRGHMTEYKPTVRLATRDDVPRAVRTLAAAFADYPATRHTVDPDRHIERVTELQELFLTRVGLDIGKVWVADDGAAVAVWTTPESVEAGAVFAEIGPRMAELSGSRLAAQQQMEGLLAPHRPKEPAWFLATVGVSPDHQGKGLGSAVVLPGVEAAERAGVPAFLETSAPRNLPFYERLGFTVTADVEVPEGPRTWCMTRKPGA

SEQ ID NO: 2361 - protein, 888 aa, synthetic construct; identical to SEQ ID NO: 2359

SEQ ID NO: 2362 - protein, 916 aa, synthetic construct; identical to SEQ ID NO: 2360

SEQ ID NO: 2363 - protein, 856 aa, synthetic construct
MALPVTALLLPLALLLHAARPDIQMTQSPSSLSASVGDRVTITCKASDHINNWLAWYQQKPGQAPKLLIYGATTLETGVPSRFSGSGSGTDYTLTISSLQPEDFATYYCQQSWNTPWTFGQGTKLEIKRLEDLKNVFPPEVAVFEPSEAEISHTQKATLVCLATGFYPDHVELSWWVNGKEVHSGVSTDPQPLKEQPALNDSRYCLSSRLRVSATFWQNPRNHFRCQVQFYGLSENDEWTQDRAKPVTQIVSAEAWGRADCGFTSESYQQGVLSAYYMYLLLLLKSVVYFAIITCCLLRRTAFCCNGEKSRAKRSGSGATNFSLLKQAGDVEENPGPTSMDWIWRILFLVGAATGAHSFEQVQLQQPGAELVKPGASVKMSCKASGYAFSSYWINWMKQKPGQGLEWIGQIYPGDGDTNYNGKFKGRATLTADTSSSTAYMQLSSLTSEDSAVYFCARSITTVVGCAMDYWGQGTSVTVSSTRIQNPDPAVYQLRDSKSSDKSVCLFTDFDSQTNVSQSKDSDVYITDKTVLDMRSMDFKSNSAVAWSNKSDFACANAFNNSIIPEDTFFPSPESSCDVKLVEKSFETDTNLNFQNLTVLGLRMLFAKTVAVNFLLTAKLFFLRAKRSGSGVKQTLNFDLLKLAGDVESNPGPSRGHMTEYKPTVRLATRDDVPRAVRTLAAAFADYPATRHTVDPDRHIERVTELQELFLTRVGLDIGKVWVADDGAAVAVWTTPESVEAGAVFAEIGPRMAELSGSRLAAQQQMEGLLAPHRPKEPAWFLATVGVSPDHQGKGLGSAVVLPGVEAAERAGVPAFLETSAPRNLPFYERLGFTVTADVEVPEGPRTWCMTRKPGA

SEQ ID NO: 2364 - protein, 855 aa, synthetic construct
MALPVTALLLPLALLLHAARPDDIQLTQSPSSLSASVGDRVTITCKASQSVDYEGDSFLNWYQQKPGKAPKLLIYAASNLESGVPSRFSGSGSGTDFTLTISSLQPEDFATYYCQQSNEDPLTFGQGTKVEIKRLEGQPKANPTVTLFPPSSEELQANKATLVCLISDFYPGAVTVAWKADGSPVKAGVETTKPSKQSNNKYAASSYLSLTPEQWKSHRSYSCQVTHEGSTVEKTVAPTECSPIKTDVITMDPKDNCSKDANDTLLLQLTNTSAYYMYLLLLLKSVVYFAIITCCLLRRTAFCCNGEKSRAKRSGSGATNFSLLKQAGDVEENPGPTSMDWIWRILFLVGAATGAHSFEQVQLQQPGAELVKPGASVKMSCKASGYAFNSYWINWMKQKPGQGLEWIGQIYPGDGDTNYNGKFKGRATLTADTSSSTAYMQLSSLTSEDSAVYFCARSITTVVGCAMDYWGQGTSVTVSSTRIQNPDPAVYQLRDSKSSDKSVCLFTDFDSQTNVSQSKDSDVYITDKCVLDMRSMDFKSNSAVAWSNKSDFACANAFNNSIIPEDTFFPSPESSCDVKLVEKSFETDTNLNFQNLSVIGFRILLLKVAGFNLLMTLRLWSSRAKRSGSGVKQTLNFDLLKLAGDVESNPGPSRGHMTEYKPTVRLATRDDVPRAVRTLAAAFADYPATRHTVDPDRHIERVTELQELFLTRVGLDIGKVWVADDGAAVAVWTTPESVEAGAVFAEIGPRMAELSGSRLAAQQQMEGLLAPHRPKEPAWFLATVGVSPDHQGKGLGSAVVLPGVEAAERAGVPAFLETSAPRNLPFYERLGFTVTADVEVPEGPRTWCMTRKPGA

SEQ ID NO: 2365 - protein, 857 aa, synthetic construct
MALPVTALLLPLALLLHAARPSYVLTQPPSVSVAPGQTARITCGGNNIGGKSVHWYQQPPGQAPVVVVYDDSDRPSGIPERFSGSNSGNTATLTISRVEAGDEAVYYCQVWDSSSDHVVFGGGTKLTVLLEDLKNVFPPEVAVFEPSEAEISHTQKATLVCLATGFYPDHVELSWWVNGKEVHSGVCTDPQPLKEQPALNDSRYCLSSRLRVSATFWQNPRNHFRCQVQFYGLSENDEWTQDRAKPVTQIVSAEAWGRADCGFTSESYQQGVLSAYYMYLLLLLKSVVYFAIITCCLLRRTAFCCNGEKSRAKRSGSGATNFSLLKQAGDVEENPGPTSMDWIWRILFLVGAATGAHSFEQLQLQESGPGLVKPSETLSLTCTVSGGSISSSSYFWGWIRQPPGKGLEWIGSIYYSGITYYNPSLKSRVTISVDTSKNQFSLKLSSVTAADTAVYYCARHDGAVAGLFDYWGQGTLVTVSSATRIQNPDPAVYQLRDSKSSDKSVCLFTDFDSQTNVSQSKDSDVYITDKCVLDMRSMDFKSNSAVAWSNKSDFACANAFNNSIIPEDTFFPSPESSCDVKLVEKSFETDTNLNFQNLSVIGFRILLLKVAGFNLLMTLRLWSSRAKRSGSGVKQTLNFDLLKLAGDVESNPGPSRGHMTEYKPTVRLATRDDVPRAVRTLAAAFADYPATRHTVDPDRHIERVTELQELFLTRVGLDIGKVWVADDGAAVAVWTTPESVEAGAVFAEIGPRMAELSGSRLAAQQQMEGLLAPHRPKEPAWFLATVGVSPDHQGKGLGSAVVLPGVEAAERAGVPAFLETSAPRNLPFYERLGFTVTADVEVPEGPRTWCMTRKPGA

SEQ ID NO: 2366 - protein, 857 aa, synthetic construct
MALPVTALLLPLALLLHAARPSYVLTQPPSVSVAPGQTARITCGGNNIGSKSVHWYQQPPGQAPVVVVYDDSDRPSGIPERFSGSNSGNTATLTISRVEAGDEAVYYCQVWDSSSDHVVFGGGTKLTVLLEDLKNVFPPEVAVFEPSEAEISHTQKATLVCLATGFYPDHVELSWWVNGKEVHSGVCTDPQPLKEQPALNDSRYCLSSRLRVSATFWQNPRNHFRCQVQFYGLSENDEWTQDRAKPVTQIVSAEAWGRADCGFTSESYQQGVLSAYYMYLLLLLKSVVYFAIITCCLLRRTAFCCNGEKSRAKRSGSGATNFSLLKQAGDVEENPGPTSMDWIWRILFLVGAATGAHSFEQLQLQESGPGLVKPSETLSLTCTVSGGSISSGSYFWGWIRQPPGKGLEWIGSIYYSGITYYNPSLKSRVTISVDTSKNQFSLKLSSVTAADTAVYYCARHDGAVAGLFDYWGQGTLVTVSSATRIQNPDPAVYQLRDSKSSDKSVCLFTDFDSQTNVSQSKDSDVYITDKCVLDMRSMDFKSNSAVAWSNKSDFACANAFNNSIIPEDTFFPSPESSCDVKLVEKSFETDTNLNFQNLSVIGFRILLLKVAGFNLLMTLRLWSSRAKRSGSGVKQTLNFDLLKLAGDVESNPGPSRGHMTEYKPTVRLATRDDVPRAVRTLAAAFADYPATRHTVDPDRHIERVTELQELFLTRVGLDIGKVWVADDGAAVAVWTTPESVEAGAVFAEIGPRMAELSGSRLAAQQQMEGLLAPHRPKEPAWFLATVGVSPDHQGKGLGSAVVLPGVEAAERAGVPAFLETSAPRNLPFYERLGFTVTADVEVPEGPRTWCMTRKPGA

SEQ ID NO: 2367 - protein, 850 aa, synthetic construct
MALPVTALLLPLALLLHAARPSYVLTQPPSVSVAPGQTARITCGGNNIGGKSVHWYQQPPGQAPVVVVYDDSDRPSGIPERFSGSNSGNTATLTISRVEAGDEAVYYCQVWDSSSDHVVFGGGTKLTVLLEDKQLDADVSPKPTIFLPSIAETKLQKAGTYLCLLEKFFPDVIKIHWQEKKSNTILGSQEGNTMKTNDTYMKFSWLTVPEKSLDKEHRCIVRHENNKNGVDQEIIFPPIKTDVITMDPKDNCSKDANDTLLLQLTNTSAYYMYEILLGKATLYAVLVSALVLMAMVKRKDSRGRAKRSGSGATNFSLLKQAGDVEENPGPTSMDWIWRILFLVGAATGAHSFEQLQLQESGPGLVKPSETLSLTCTVSGGSISSSSYFWGWIRQPPGKGLEWIGSIYYSGITYYNPSLKSRVTISVDTSKNQFSLKLSSVTAADTAVYYCARHDGAVAGLFDYWGQGTLVTVSSATRIQNPDPAVYQLRDSKSSDKSVCLFTDFDSQTNVSQSKDSDVYITDKCVLDMRSMDFKSNSAVAWSNKSDFACANAFNNSIIPEDTFFPSPESSCDVKLVEKSFETDTNLNFQNLSVIGFRILLLKVAGFNLLMTLRLWSSRAKRSGSGVKQTLNFDLLKLAGDVESNPGPSRGHMTEYKPTVRLATRDDVPRAVRTLAAAFADYPATRHTVDPDRHIERVTELQELFLTRVGLDIGKVWVADDGAAVAVWTTPESVEAGAVFAEIGPRMAELSGSRLAAQQQMEGLLAPHRPKEPAWFLATVGVSPDHQGKGLGSAVVLPGVEAAERAGVPAFLETSAPRNLPFYERLGFTVTADVEVPEGPRTWCMTRKPGA

SEQ ID NO: 2368 - protein, 884 aa, synthetic construct
MALPVTALLLPLALLLHAARPDIQMTQSPSSLSASVGDRVTITCKASDHINNWLAWYQQKPGQAPKLLIYGATTLETGVPSRFSGSGSGTDYTLTISSLQPEDFATYYCQQSWNTPWTFGQGTKLEIKRLEDLKNVFPPEVAVFEPSEAEISHTQKATLVCLATGFYPDHVELSWWVNGKEVHSGVCTDPQPLKEQPALNDSRYCLSSRLRVSATFWQNPRNHFRCQVQFYGLSENDEWTQDRAKPVTQIVSAEAWGRADCGFTSESYQQGVLSATILYEILLGKATLYAVLVSALVLMAMVKRKDSRGRAKRSGSGATNFSLLKQAGDVEENPGPTSATMDWIWRILFLVGAATGAHSGPARSEDRYRGSGGGGSGGGGSGGGGSFEQVQLQQPGAELVKPGASVKMSCKASGYAFSSYWINWMKQKPGQGLEWIGQIYPGDGDTNYNGKFKGRATLTADTSSSTAYMQLSSLTSEDSAVYFCARSITTVVGCAMDYWGQGTSVTVSSTRIQNPDPAVYQLRDSKSSDKSVCLFTDFDSQTNVSQSKDSDVYITDKCVLDMRSMDFKSNSAVAWSNKSDFACANAFNNSIIPEDTFFPSPESSCDVKLVEKSFETDTNLNFQNLSVIGFRILLLKVAGFNLLMTLRLWSSRAKRSGSGVKQTLNFDLLKLAGDVESNPGPSRGHMTEYKPTVRLATRDDVPRAVRTLAAAFADYPATRHTVDPDRHIERVTELQELFLTRVGLDIGKVWVADDGAAVAVWTTPESVEAGAVFAEIGPRMAELSGSRLAAQQQMEGLLAPHRPKEPAWFLATVGVSPDHQGKGLGSAVVLPGVEAAERAGVPAFLETSAPRNLPFYERLGFTVTADVEVPEGPRTWCMTRKPGA

SEQ ID NO: 2369 - protein, 885 aa, synthetic construct
MALPVTALLLPLALLLHAARPDIQMTQSPSSLSASVGDRVTITCKASDHINNWLAWYQQKPGQAPKLLIYGATTLETGVPSRFSGSGSGTDYTLTISSLQPEDFATYYCQQSWNTPWTFGQGTKLEIKRLEDLKNVFPPEVAVFEPSEAEISHTQKATLVCLATGFYPDHVELSWWVNGKEVHSGVCTDPQPLKEQPALNDSRYCLSSRLRVSATFWQNPRNHFRCQVQFYGLSENDEWTQDRAKPVTQIVSAEAWGRADCGFTSESYQQGVLSATILYEILLGKATLYAVLVSALVLMAMVKRKDSRGRAKRSGSGATNFSLLKQAGDVEENPGPTSATMDWIWRILFLVGAATGAHSGPARSEDRYRNGSGGGGSGGGGSGGGGSFEQVQLQQPGAELVKPGASVKMSCKASGYAFSSYWINWMKQKPGQGLEWIGQIYPGDGDTNYNGKFKGRATLTADTSSSTAYMQLSSLTSEDSAVYFCARSITTVVGCAMDYWGQGTSVTVSSTRIQNPDPAVYQLRDSKSSDKSVCLFTDFDSQTNVSQSKDSDVYITDKCVLDMRSMDFKSNSAVAWSNKSDFACANAFNNSIIPEDTFFPSPESSCDVKLVEKSFETDTNLNFQNLSVIGFRILLLKVAGFNLLMTLRLWSSRAKRSGSGVKQTLNFDLLKLAGDVESNPGPSRGHMTEYKPTVRLATRDDVPRAVRTLAAAFADYPATRHTVDPDRHIERVTELQELFLTRVGLDIGKVWVADDGAAVAVWTTPESVEAGAVFAEIGPRMAELSGSRLAAQQQMEGLLAPHRPKEPAWFLATVGVSPDHQGKGLGSAVVLPGVEAAERAGVPAFLETSAPRNLPFYERLGFTVTADVEVPEGPRTWCMTRKPGA

SEQ ID NO: 2370 - protein, 877 aa, synthetic construct
MALPVTALLLPLALLLHAARPDIQMTQSPSSLSASVGDRVTITCKASDHINNWLAWYQQKPGQAPKLLIYGATTLETGVPSRFSGSGSGTDYTLTISSLQPEDFATYYCQQSWNTPWTFGQGTKLEIKRLEDLKNVFPPEVAVFEPSEAEISHTQKATLVCLATGFYPDHVELSWWVNGKEVHSGVCTDPQPLKEQPALNDSRYCLSSRLRVSATFWQNPRNHFRCQVQFYGLSENDEWTQDRAKPVTQIVSAEAWGRADCGFTSESYQQGVLSATILYEILLGKATLYAVLVSALVLMAMVKRKDSRGRAKRSGSGATNFSLLKQAGDVEENPGPTSATMDWIWRILFLVGAATGAHSGPARSEDRYRNHAGSGGGGSFEQVQLQQPGAELVKPGASVKMSCKASGYAFSSYWINWMKQKPGQGLEWIGQIYPGDGDTNYNGKFKGRATLTADTSSSTAYMQLSSLTSEDSAVYFCARSITTVVGCAMDYWGQGTSVTVSSTRIQNPDPAVYQLRDSKSSDKSVCLFTDFDSQTNVSQSKDSDVYITDKCVLDMRSMDFKSNSAVAWSNKSDFACANAFNNSIIPEDTFFPSPESSCDVKLVEKSFETDTNLNFQNLSVIGFRILLLKVAGFNLLMTLRLWSSRAKRSGSGVKQTLNFDLLKLAGDVESNPGPSRGHMTEYKPTVRLATRDDVPRAVRTLAAAFADYPATRHTVDPDRHIERVTELQELFLTRVGLDIGKVWVADDGAAVAVWTTPESVEAGAVFAEIGPRMAELSGSRLAAQQQMEGLLAPHRPKEPAWFLATVGVSPDHQGKGLGSAVVLPGVEAAERAGVPAFLETSAPRNLPFYERLGFTVTADVEVPEGPRTWCMTRKPGA

SEQ ID NO: 2371 - protein, 887 aa, synthetic construct
MALPVTALLLPLALLLHAARPDIQMTQSPSSLSASVGDRVTITCKASDHINNWLAWYQQKPGQAPKLLIYGATTLETGVPSRFSGSGSGTDYTLTISSLQPEDFATYYCQQSWNTPWTFGQGTKLEIKRLEDLKNVFPPEVAVFEPSEAEISHTQKATLVCLATGFYPDHVELSWWVNGKEVHSGVCTDPQPLKEQPALNDSRYCLSSRLRVSATFWQNPRNHFRCQVQFYGLSENDEWTQDRAKPVTQIVSAEAWGRADCGFTSESYQQGVLSATILYEILLGKATLYAVLVSALVLMAMVKRKDSRGRAKRSGSGATNFSLLKQAGDVEENPGPTSATMDWIWRILFLVGAATGAHSGPARSEDRYRNPRGSGGGGSGGGGSGGGGSFEQVQLQQPGAELVKPGASVKMSCKASGYAFSSYWINWMKQKPGQGLEWIGQIYPGDGDTNYNGKFKGRATLTADTSSSTAYMQLSSLTSEDSAVYFCARSITTVVGCAMDYWGQGTSVTVSSTRIQNPDPAVYQLRDSKSSDKSVCLFTDFDSQTNVSQSKDSDVYITDKCVLDMRSMDFKSNSAVAWSNKSDFACANAFNNSIIPEDTFFPSPESSCDVKLVEKSFETDTNLNFQNLSVIGFRILLLKVAGFNLLMTLRLWSSRAKRSGSGVKQTLNFDLLKLAGDVESNPGPSRGHMTEYKPTVRLATRDDVPRAVRTLAAAFADYPATRHTVDPDRHIERVTELQELFLTRVGLDIGKVWVADDGAAVAVWTTPESVEAGAVFAEIGPRMAELSGSRLAAQQQMEGLLAPHRPKEPAWFLATVGVSPDHQGKGLGSAVVLPGVEAAERAGVPAFLETSAPRNLPFYERLGFTVTADVEVPEGPRTWCMTRKPGA

SEQ ID NO: 2372 - protein, 887 aa, synthetic construct
MALPVTALLLPLALLLHAARPDIQMTQSPSSLSASVGDRVTITCKASDHINNWLAWYQQKPGQAPKLLIYGATTLETGVPSRFSGSGSGTDYTLTISSLQPEDFATYYCQQSWNTPWTFGQGTKLEIKRLEDLKNVFPPEVAVFEPSEAEISHTQKATLVCLATGFYPDHVELSWWVNGKEVHSGVCTDPQPLKEQPALNDSRYCLSSRLRVSATFWQNPRNHFRCQVQFYGLSENDEWTQDRAKPVTQIVSAEAWGRADCGFTSESYQQGVLSATILYEILLGKATLYAVLVSALVLMAMVKRKDSRGRAKRSGSGATNFSLLKQAGDVEENPGPTSATMDWIWRILFLVGAATGAHSGPARSEDRYRNLSGSGGGGSGGGGSGGGGSFEQVQLQQPGAELVKPGASVKMSCKASGYAFSSYWINWMKQKPGQGLEWIGQIYPGDGDTNYNGKFKGRATLTADTSSSTAYMQLSSLTSEDSAVYFCARSITTVVGCAMDYWGQGTSVTVSSTRIQNPDPAVYQLRDSKSSDKSVCLFTDFDSQTNVSQSKDSDVYITDKCVLDMRSMDFKSNSAVAWSNKSDFACANAFNNSIIPEDTFFPSPESSCDVKLVEKSFETDTNLNFQNLSVIGFRILLLKVAGFNLLMTLRLWSSRAKRSGSGVKQTLNFDLLKLAGDVESNPGPSRGHMTEYKPTVRLATRDDVPRAVRTLAAAFADYPATRHTVDPDRHIERVTELQELFLTRVGLDIGKVWVADDGAAVAVWTTPESVEAGAVFAEIGPRMAELSGSRLAAQQQMEGLLAPHRPKEPAWFLATVGVSPDHQGKGLGSAVVLPGVEAAERAGVPAFLETSAPRNLPFYERLGFTVTADVEVPEGPRTWCMTRKPGA

SEQ ID NO: 2373 - protein, 887 aa, synthetic construct
MALPVTALLLPLALLLHAARPDIQMTQSPSSLSASVGDRVTITCKASDHINNWLAWYQQKPGQAPKLLIYGATTLETGVPSRFSGSGSGTDYTLTISSLQPEDFATYYCQQSWNTPWTFGQGTKLEIKRLEDLKNVFPPEVAVFEPSEAEISHTQKATLVCLATGFYPDHVELSWWVNGKEVHSGVCTDPQPLKEQPALNDSRYCLSSRLRVSATFWQNPRNHFRCQVQFYGLSENDEWTQDRAKPVTQIVSAEAWGRADCGFTSESYQQGVLSATILYEILLGKATLYAVLVSALVLMAMVKRKDSRGRAKRSGSGATNFSLLKQAGDVEENPGPTSATMDWIWRILFLVGAATGAHSGPARSEDRYRNLIGSGGGGSGGGGSGGGGSFEQVQLQQPGAELVKPGASVKMSCKASGYAFSSYWINWMKQKPGQGLEWIGQIYPGDGDTNYNGKFKGRATLTADTSSSTAYMQLSSLTSEDSAVYFCARSITTVVGCAMDYWGQGTSVTVSSTRIQNPDPAVYQLRDSKSSDKSVCLFTDFDSQTNVSQSKDSDVYITDKCVLDMRSMDFKSNSAVAWSNKSDFACANAFNNSIIPEDTFFPSPESSCDVKLVEKSFETDTNLNFQNLSVIGFRILLLKVAGFNLLMTLRLWSSRAKRSGSGVKQTLNFDLLKLAGDVESNPGPSRGHMTEYKPTVRLATRDDVPRAVRTLAAAFADYPATRHTVDPDRHIERVTELQELFLTRVGLDIGKVWVADDGAAVAVWTTPESVEAGAVFAEIGPRMAELSGSRLAAQQQMEGLLAPHRPKEPAWFLATVGVSPDHQGKGLGSAVVLPGVEAAERAGVPAFLETSAPRNLPFYERLGFTVTADVEVPEGPRTWCMTRKPGA

SEQ ID NO: 2374 - protein, 887 aa, synthetic construct; identical to SEQ ID NO: 2372

SEQ ID NO: 2375 - protein, 887 aa, synthetic construct; identical to SEQ ID NO: 2373

SEQ ID NO: 2376 - protein, 600 aa, synthetic construct
MALPVTALLLPLALLLHAARPDIQMTQSPSSLSASVGDRVTITCKASDHINNWLAWYQQKPGQAPKLLIYGATTLETGVPSRFSGSGSGTDYTLTISSLQPEDFATYYCQQSWNTPWTFGQGTKLEIKRLEDLKNVFPPEVAVFEPSEAEISHTQKATLVCLATGFYPDHVELSWWVNGKEVHSGVCTDPQPLKEQPALNDSRYCLSSRLRVSATFWQNPRNHFRCQVQFYGLSENDEWTQDRAKPVTQIVSAEAWGRADCGFTSESYQQGVLSATILYEILLGKATLYAVLVSALVLMAMVKRKDSRGRAKRSGSGATNFSLLKQAGDVEENPGPTSATMDWIWRILFLVGAATGAHSGPARSEDRYRNHVGSGVKQTLNFDLLKLAGDVESNPGPSRGHMTEYKPTVRLATRDDVPRAVRTLAAAFADYPATRHTVDPDRHIERVTELQELFLTRVGLDIGKVWVADDGAAVAVWTTPESVEAGAVFAEIGPRMAELSGSRLAAQQQMEGLLAPHRPKEPAWFLATVGVSPDHQGKGLGSAVVLPGVEAAERAGVPAFLETSAPRNLPFYERLGFTVTADVEVPEGPRTWCMTRKPGA

SEQ ID NO: 2377 - protein, 600 aa, synthetic construct
MALPVTALLLPLALLLHAARPDIQMTQSPSSLSASVGDRVTITCKASDHINNWLAWYQQKPGQAPKLLIYGATTLETGVPSRFSGSGSGTDYTLTISSLQPEDFATYYCQQSWNTPWTFGQGTKLEIKRLEDLKNVFPPEVAVFEPSEAEISHTQKATLVCLATGFYPDHVELSWWVNGKEVHSGVCTDPQPLKEQPALNDSRYCLSSRLRVSATFWQNPRNHFRCQVQFYGLSENDEWTQDRAKPVTQIVSAEAWGRADCGFTSESYQQGVLSATILYEILLGKATLYAVLVSALVLMAMVKRKDSRGRAKRSGSGATNFSLLKQAGDVEENPGPTSATMDWIWRILFLVGAATGAHSGPARSEDRYRNHDGSGVKQTLNFDLLKLAGDVESNPGPSRGHMTEYKPTVRLATRDDVPRAVRTLAAAFADYPATRHTVDPDRHIERVTELQELFLTRVGLDIGKVWVADDGAAVAVWTTPESVEAGAVFAEIGPRMAELSGSRLAAQQQMEGLLAPHRPKEPAWFLATVGVSPDHQGKGLGSAVVLPGVEAAERAGVPAFLETSAPRNLPFYERLGFTVTADVEVPEGPRTWCMTRKPGA

SEQ ID NO: 2378 - protein, 755 aa, synthetic construct
MALPVTALLLPLALLLHAARPDIQLTQSPSSLSASVGDRVTITCKASQSVDYDGDSFLNWYQQKPGKAPKLLIYAASNLESGVPSRFSGSGSGTDFTLTISSLQPEDFATYYCQQSNEDPLTFGQGTKVEIKRLEDLKNVFPPEVAVFEPSEAEISHTQKATLVCLATGFYPDHVELSWWVNGKEVHSGVSTDPQPLKEQPALNDSRYCLSSRLRVSATFWQNPRNHFRCQVQFYGLSENDEWTQDRAKPVTQIVSAEAWGRADCGSQSFGLLDPKLCYLLDGILFIYGVILTALFLRVKFSRSADAPAYQQGQNQLYNELNLGRREEYDVLDKRRGRDPEMGGKPRRKNPQEGLYNELQKDKMAEAYSEIGMKGERRRGKGHDGLYQGLSTATKDTYDALHMQALPPRRAKRSGSGATNFSLLKQAGDVEENPGPTSMDWIWRILFLVGAATGAHSFEEVQLVESGGGLVQPGGSLRLSCAASGYTFTSYWIEWVRQAPGKGLEWIGEILPGGGDTNYNEIFKGRATFSADTSKNTAYLQMNSLRAEDTAVYYCTRRVPIRLDYWGQGTLVTVSSTRIQNPDPAVYQLRDSKSSDKSVCLFTDFDSQTNVSQSKDSDVYITDKTVLDMRSMDFKSNSAVAWSNKSDFACANAFNNSIIPEDTFFPSPESSCGTITQGLAVSTISSFFPPGYQVSFCLVMVLLFAVDTGLYFSVRSKRSRLLHSDYMNMTPRRPGPTRKHYQPYAPPRDFAAYRS

SEQ ID NO: 2379 - protein, 781 aa, synthetic construct
MALPVTALLLPLALLLHAARPDIQLTQSPSSLSASVGDRVTITCKASQSVDYDGDSFLNWYQQKPGKAPKLLIYAASNLESGVPSRFSGSGSGTDFTLTISSLQPEDFATYYCQQSNEDPLTFGQGTKVEIKRLEDLKNVFPPEVAVFEPSEAEISHTQKATLVCLATGFYPDHVELSWWVNGKEVHSGVSTDPQPLKEQPALNDSRYCLSSRLRVSATFWQNPRNHFRCQVQFYGLSENDEWTQDRAKPVTQIVSAEAWGRADCGSQSFGLLDPKLCYLLDGILFIYGVILTALFLRVKFSRSADAPAYQQGQNQLYNELNLGRREEYDVLDKRRGRDPEMGGKPRRKNPQEGLYNELQKDKMAEAYSEIGMKGERRRGKGHDGLYQGLSTATKDTYDALHMQALPPRRAKRSGSGATNFSLLKQAGDVEENPGPTSMDWIWRILFLVGAATGAHSFEEVQLVESGGGLVQPGGSLRLSCAASGYTFTSYWIEWVRQAPGKGLEWIGEILPGGGDTNYNEIFKGRATFSADTSKNTAYLQMNSLRAEDTAVYYCTRRVPIRLDYWGQGTLVTVSSTRIQNPDPAVYQLRDSKSSDKSVCLFTDFDSQTNVSQSKDSDVYITDKTVLDMRSMDFKSNSAVAWSNKSDFACANAFNNSIIPEDTFFPSPESSCGTITQGLAVSTISSFFPPGYQVSFCLVMVLLFAVDTGLYFSVKTNIRSSTRDWKDHKFKWRKDPQDKKRGRKKLLYIFKQPFMRPVQTTQEEDGCSCRFPEEEEGGCEL

SEQ ID NO: 2380 - protein, 623 aa, synthetic construct; identical to SEQ ID NO: 2272

SEQ ID NO: 2381 - protein, 622 aa, synthetic construct; identical to SEQ ID NO: 2282

SEQ ID NO: 2382 - protein, 666 aa, synthetic construct
MALPVTALLLPLALLLHAARPQVQLQQSGPGLVKPSQTLSLTCAISGDSVSSNRAAWNWIRQSPSRGLQWLGRTYYRSKWYNDYAVSLRSRITINPVTSKNQVALHMNSVTPEDTAVYYCARAGIVVVPGPETFYYYDHGLDVWGQGTTVTVSSLEDLKNVFPPEVAVFEPSEAEISHTQKATLVCLATGFYPDHVELSWWVNGKEVHSGVCTDPQPLKEQPALNDSRYCLSSRLRVSATFWQNPRNHFRCQVQFYGLSENDEWTQDRAKPVTQIVSAEAWGRADCGFTSESYQQGVLSATILYEILLGKATLYAVLVSALVLMAMVKRKDSRGRAKRSGSGATNFSLLKQAGDVEENPGPTSATMDWIWRILFLVGAATGAHSGPARSEDRYRNPKGSGGGGSGGGGSGGGGSFEDIQMTQSPSSLSASVGDRVTITCRASQSIRNYLNWYQQKPGKAPELLIHAASSLQSGVPSRFSGSGSGTDFTLTISSLQPEDFASYYCQQSYSAPPITFGQGTRLEIKTRIQNPDPAVYQLRDSKSSDKSVCLFTDFDSQTNVSQSKDSDVYITDKCVLDMRSMDFKSNSAVAWSNKSDFACANAFNNSIIPEDTFFPSPESSCDVKLVEKSFETDTNLNFQNLSVIGFRILLLKVAGFNLLMTLRLWSS

SEQ ID NO: 2383 - protein, 757 aa, synthetic construct
MALPVTALLLPLALLLHAARPEVQLVESGGGLVQPGGSLRLSCAASGFASDYYIIGWFRQAPGKEREGVSCISSRYANTNYADSVKGRFTISRDNAKNTVYLQMNSLKPEDTAVYYCAADTRRYTCPDIATMHRNFDSWGQGTLVTVSSGTDIQMTQSPSSLSASVGDRVTITCRASQDVNTAVAWYQQKPGKAPKLLIYSASFLYSGVPSRFSGSRSGTDFTLTISSLQPEDFATYYCQQHYTTPPTFGQGTKVEIKRTLEIQNPDPAVYQLRDSKSSDKSVCLFTDFDSQTNVSQSKDSDVYITDKCVLDMRSMDFKSNSAVAWSNKSDFACANAFNNSIIPEDTFFPSPESSCDVKLVEKSFETDTNLNFQNLSVIGFRILLLKVAGFNLLMTLRLWSSSSRAKRSGSGVKQTLNFDLLKLAGDVESNPGPTSMDWIWRILFLVGAATGAHSFEVQLVESGGGLVQPGGSLRLSCAASGFNIKDTYIHWVRQAPGKGLEWVARIYPTNGYTRYADSVKGRFTISADTSKNTAYLQMNSLRAEDTAVYYCSRWGGAGAYAMDVWGQGTLVTVSSTREDLKNVFPPEVAVFEPSEAEISHTQKATLVCLATGFYPDHVELSWWVNGKEVHSGVCTDPQPLKEQPALNDSRYCLSSRLRVSATFWQNPRNHFRCQVQFYGLSENDEWTQDRAKPVTQIVSAEAWGRADCGFTSESYQQGVLSATILYEILLGKATLYAVLVSALVLMAMVKRKDSRG

SEQ ID NO: 2384 - protein, 670 aa, synthetic construct
MALPVTALLLPLALLLHAARPACRARSEDRYRNPKGSAGTGGGGSGGGGSGGGGSEFDIQMTQSPSSLSASVGDRVTITCKASDHINNWLAWYQQKPGQAPKLLIYGATTLETGVPSRFSGSGSGTDYTLTISSLQPEDFATYYCQQSWNTPWTFGQGTKLEIKRLEDLKNVFPPEVAVFEPSEAEISHTQKATLVCLATGFYPDHVELSWWVNGKEVHSGVCTDPQPLKEQPALNDSRYCLSSRLRVSATFWQNPRNHFRCQVQFYGLSENDEWTQDRAKPVTQIVSAEAWGRADCGFTSESYQQGVLSATILYEILLGKATLYAVLVSALVLMAMVKRKDSRGRAKRSGSGATNFSLLKQAGDVEENPGPTSATMDWIWRILFLVGAATGAHSARSEDRYRNPKFEVQLVESGGGLVQPGGSLRLSCAASGYAFSNYWVNWVRQAPGKGLEWVAQIYPGDGDTNYNGKFKGRFTISRDNSKNTLYLQMNSLRAEDTAVYYCARSITTVVGCAMDYWGQGTLVTVSSTRIQNPDPAVYQLRDSKSSDKSVCLFTDFDSQTNVSQSKDSDVYITDKCVLDMRSMDFKSNSAVAWSNKSDFACANAFNNSIIPEDTFFPSPESSCDVKLVEKSFETDTNLNFQNLSVIGFRILLLKVAGFNLLMTLRLWSS

SEQ ID NO: 2385 - protein, 663 aa, synthetic construct
MALPVTALLLPLALLLHAARPDIVMTQSPDSLAVSLGERATINCKSSQSLLNSGNQKNYLAWYQQKPGQPPKLLIYWGSTRSTGVPDRFSGSGSGTDFTLTISSLQAEDVAVYYCQNDYTYPFTFGQGTKLEIKLEIQNPDPAVYQLRDSKSSDKSVCLFTDFDSQTNVSQSKDSDVYITDKCVLDMRSMDFKSNSAVAWSNKSDFACANAFNNSIIPEDTFFPSPESSCDVKLVEKSFETDTNLNFQNLSVIGFRILLLKVAGFNLLMTLRLWSSSSRAKRSGSGVKQTLNFDLLKLAGDVESNPGPTSATMDWIWRILFLVGAATGAHSGPARSEDRYRNPKGSGGGGSGGGGSGGGGSFEQVQLVQSGAEVKKPGASVKVSCKASGYTFTSFWLNWVRQAPGQGLEWMGNIYPSDSYTVYNQKFKDRVTMTRDTSTSTVYMELSSLRSEDTAVYYCARTWRGNSFDYWGQGTTVTVSSTREDLKNVFPPEVAVFEPSEAEISHTQKATLVCLATGFYPDHVELSWWVNGKEVHSGVCTDPQPLKEQPALNDSRYCLSSRLRVSATFWQNPRNHFRCQVQFYGLSENDEWTQDRAKPVTQIVSAEAWGRADCGFTSESYQQGVLSAYYMYLLLLLKSVVYFAIITCCLLRRTAFCCNGEKS

SEQ ID NO: 2386 - protein, 663 aa, synthetic construct; identical to SEQ ID NO: 2385

SEQ ID NO: 2387 - protein, 662 aa, synthetic construct
MALPVTALLLPLALLLHAARPDIVMTQSPDSLAVSLGERATINCKSSQSLLNSGNNKNYVTWYQQKPGQPPKLLIYWGSTRSTGVPDRFSGSGSGTDFTLTISSLQAEDVAVYYCQNDYTYPFTFGQGTKLEIKLEIQNPDPAVYQLRDSKSSDKSVCLFTDFDSQTNVSQSKDSDVYITDKCVLDMRSMDFKSNSAVAWSNKSDFACANAFNNSIIPEDTFFPSPESSCDVKLVEKSFETDTNLNFQNLSVIGFRILLLKVAGFNLLMTLRLWSSSSRAKRSGSGVKQTLNFDLLKLAGDVESNPGPTSATMDWIWRILFLVGAATGAHSGPARSEDRYRNPKGSGGGGSGGGGSGGGGSFEQVQLVQSGAEVKKPGASVKVSCKASGYTFTSFWLNWVRQAPGQGLEWMGNIYPSDSYTVYNQKFKDRVTMTRDTSTSTVYMELSSLRSEDTAVYYCARTWRGNSFDYWGQGTTVTVSSTREDLKNVFPPEVAVFEPSEAEISHTQKATLVCLATGFYPDHVELSWWVNGKEVHSGVCTDPQPLKEQPALNDSRYCLSSRLRVSATFWQNPRNHFRCQVQFYGLSENDEWTQDRAKPVTQIVSAEAWGRADCGFTSESYQQGVLSATILYEILLGKATLYAVLVSALVLMAMVKRKDSRG

SEQ ID NO: 2388 - protein, 681 aa, synthetic construct
MALPVTALLLPLALLLHAARPACARSEDRYRNPKGTQVQLQQSGPGLVKPSQTLSLTCAISGDSVSSNRAAWNWIRQSPSRGLQWLGRTYYRSKWYNDYAVSLRSRITINPVTSKNQVALHMNSVTPEDTAVYYCARAGIVVVPGPETFYYYDHGLDVWGQGTTVTVSSLEDLKNVFPPEVAVFEPSEAEISHTQKATLVCLATGFYPDHVELSWWVNGKEVHSGVCTDPQPLKEQPALNDSRYCLSSRLRVSATFWQNPRNHFRCQVQFYGLSENDEWTQDRAKPVTQIVSAEAWGRADCGFTSESYQQGVLSATILYEILLGKATLYAVLVSALVLMAMVKRKDSRGRAKRSGSGATNFSLLKQAGDVEENPGPTSATMDWIWRILFLVGAATGAHSGPARSEDRYRNPKGSGGGGSGGGGSGGGGSFEDIQMTQSPSSLSASVGDRVTITCRASQSIRNYLNWYQQKPGKAPELLIHAASSLQSGVPSRFSGSGSGTDFTLTISSLQPEDFASYYCQQSYSAPPITFGQGTRLEIKTRIQNPDPAVYQLRDSKSSDKSVCLFTDFDSQTNVSQSKDSDVYITDKCVLDMRSMDFKSNSAVAWSNKSDFACANAFNNSIIPEDTFFPSPESSCDVKLVEKSFETDTNLNFQNLSVIGFRILLLKVAGFNLLMTLRLWSS

SEQ ID NO: 2389 - protein, 675 aa, synthetic construct
MALPVTALLLPLALLLHAARPACRARSEDRYRNPKGSAGTDIVMTQSPDSLAVSLGERATINCKSSQSLLNSGNQKNYLAWYQQKPGQPPKLLIYWGSTRSTGVPDRFSGSGSGTDFTLTISSLQAEDVAVYYCQNDYTYPFTFGQGTKLEIKLEDLKNVFPPEVAVFEPSEAEISHTQKATLVCLATGFYPDHVELSWWVNGKEVHSGVCTDPQPLKEQPALNDSRYCLSSRLRVSATFWQNPRNHFRCQVQFYGLSENDEWTQDRAKPVTQIVSAEAWGRADCGFTSESYQQGVLSATILYEILLGKATLYAVLVSALVLMAMVKRKDSRGRAKRSGSGATNFSLLKQAGDVEENPGPTSATMDWIWRILFLVGAATGAHSGPARSEDRYRNPKGSGGGGSGGGGSGGGGSFEQVQLVQSGAEVKKPGASVKVSCKASGYTFTSFWLNWVRQAPGQGLEWMGNIYPSDSYTVYNQKFKDRVTMTRDTSTSTVYMELSSLRSEDTAVYYCARTWRGNSFDYWGQGTTVTVSSTRIQNPDPAVYQLRDSKSSDKSVCLFTDFDSQTNVSQSKDSDVYITDKCVLDMRSMDFKSNSAVAWSNKSDFACANAFNNSIIPEDTFFPSPESSCDVKLVEKSFETDTNLNFQNLSVIGFRILLLKVAGFNLLMTLRLWSS

SEQ ID NO: 2390 - protein, 669 aa, synthetic construct
MALPVTALLLPLALLLHAARPACARSEDRYRNPKGTQIVLTQSPAIMSVSPGEKVTMTCSASSSVNYMHWFQQKPGTSPKLWVYSTSNLASGVPARFSGSGSGTSYSLTISSMEAEDAATYYCQQRSIYPPWTFGGGTKLEIKLEIQNPDPAVYQLRDSKSSDKSVCLFTDFDSQTNVSQSKDSDVYITDKCVLDMRSMDFKSNSAVAWSNKSDFACANAFNNSIIPEDTFFPSPESSCDVKLVEKSFETDTNLNFQNLSVIGFRILLLKVAGFNLLMTLRLWSSSSRAKRSGSGVKQTLNFDLLKLAGDVESNPGPTSATMDWIWRILFLVGAATGAHSGPARSEDRYRNPKGSGGGGSGGGGSGGGGSFEVQLQQSGPELVKPGASVKISCKASGYSFTGYTMNWVKQSHGKNLEWIGLINPYNGGTSYNQKFKAKATLTVDKSSSTAYMQLKSLTSEDSAVYYCARDYGYVLDYWGQGTSVTVSSTREDLKNVFPPEVAVFEPSEAEISHTQKATLVCLATGFYPDHVELSWWVNGKEVHSGVCTDPQPLKEQPALNDSRYCLSSRLRVSATFWQNPRNHFRCQVQFYGLSENDEWTQDRAKPVTQIVSAEAWGRADCGFTSESYQQGVLSATILYEILLGKATLYAVLVSALVLMAMVKRKDSRG

SEQ ID NO: 2391 - protein, 618 aa, synthetic construct
MALPVTALLLPLALLLHAARPDIQMTQSPSSLSASVGDRVTITCKASQSVSNDVTWYQQKPGQAPKLLIYSASNRYSGVPARFSGSGYGTEFTFTISSVQSEDFAVYFCQQDYSSFGQGTKLEIKRLEDLKNVFPPEVAVFEPSEAEISHTQKATLVCLATGFYPDHVELSWWVNGKEVHSGVCTDPQPLKEQPALNDSRYCLSSRLRVSATFWQNPRNHFRCQVQFYGLSENDEWTQDRAKPVTQIVSAEAWGRADCGFTSESYQQGVLSAYYMYLLLLLKSVVYFAIITCCLLRRTAFCCNGEKSRAKRSGSGATNFSLLKQAGDVEENPGPTSMDWIWRILFLVGAATGAHSFEQVQLVESGPGVVQPGRSLRISCAVSGFSVTNYGVHWVRQPPGKGLEWLGVIWAGGITNYNSAFMSRLTISKDNSKNTVYLQMNSLRAEDTAMYYCASRGGHYGYALDYWGQGTLVTVSSTRIQNPDPAVYQLRDSKSSDKSVCLFTDFDSQTNVSQSKDSDVYITDKCVLDMRSMDFKSNSAVAWSNKSDFACANAFNNSIIPEDTFFPSPESSCDVKLVEKSFETDTNLNFQNLSVIGFRILLLKVAGFNLLMTLRLWSS

SEQ ID NO: 2392 - protein, 611 aa, synthetic construct
MALPVTALLLPLALLLHAARPDIQLTQSPSTLSASMGDRVTITCSASSSVRFIHWYQQKPGKAPKRLIYDTSKLASGVPSRFSGSGSGTDFTLTISSLQPEDFATYYCQQWGSSPFTFGQGTKVEIKLEDLKNVFPPEVAVFEPSEAEISHTQKATLVCLATGFYPDHVELSWWVNGKEVHSGVCTDPQPLKEQPALNDSRYCLSSRLRVSATFWQNPRNHFRCQVQFYGLSENDEWTQDRAKPVTQIVSAEAWGRADCGFTSESYQQGVLSAYYMYLLLLLKSVVYFAIITCCLLRRTAFCCNGEKSRAKRSGSGATNFSLLKQAGDVEENPGPTSMDWIWRILFLVGAATGAHSFEVQLVEYGGGLVQPGGSLRLSCAASGFNIKDYYIHWVRQAPGKGLEWVAWIDPENGDTEFVPKFQGRATMSADTSKNTAYLQMNSLRAEDTAVYYCKTGGFWGQGTLVTVSSTRIQNPDPAVYQLRDSKSSDKSVCLFTDFDSQTNVSQSKDSDVYITDKCVLDMRSMDFKSNSAVAWSNKSDFACANAFNNSIIPEDTFFPSPESSCDVKLVEKSFETDTNLNFQNLSVIGFRILLLKVAGFNLLMTLRLWSS

SEQ ID NO: 2393 - protein, 616 aa, synthetic construct
MALPVTALLLPLALLLHAARPDIQMTQSPSSLSASVGDRVTITCKASQDVGTAVDWYQQKPGKAPKLLIYWASTRHTGVPSRFSGSGSGTDFTLTISSLQPEDFATYYCQQYNSYPLTFGQGTKVEIKRLEDLKNVFPPEVAVFEPSEAEISHTQKATLVCLATGFYPDHVELSWWVNGKEVHSGVCTDPQPLKEQPALNDSRYCLSSRLRVSATFWQNPRNHFRCQVQFYGLSENDEWTQDRAKPVTQIVSAEAWGRADCGFTSESYQQGVLSAYYMYLLLLLKSVVYFAIITCCLLRRTAFCCNGEKSRAKRSGSGATNFSLLKQAGDVEENPGPTSMDWIWRILFLVGAATGAHSFEVQLVESGGGLVQPGGSLRLSCAASGYTFTEYTIHWVRQAPGKGLEWVANINPNNGGTTYNQKFEDRFTISRDNSKNTLYLQMNSLRAEDTAVYYCARGWNFDYWGQGTLVTVSSTRIQNPDPAVYQLRDSKSSDKSVCLFTDFDSQTNVSQSKDSDVYITDKCVLDMRSMDFKSNSAVAWSNKSDFACANAFNNSIIPEDTFFPSPESSCDVKLVEKSFETDTNLNFQNLSVIGFRILLLKVAGFNLLMTLRLWSS

SEQ ID NO: 2394 - protein, 650 aa, synthetic construct
MALPVTALLLPLALLLHAARPACARSEDRYRNPKGTQVQLQQSGPGLVKPSQTLSLTCAISGDSVSSNRAAWNWIRQSPSRGLQWLGRTYYRSKWYNDYAVSLRSRITINPVTSKNQVALHMNSVTPEDTAVYYCARAGIVVVPGPETFYYYDHGLDVWGQGTTVTVSSLEDLKNVFPPEVAVFEPSEAEISHTQKATLVCLATGFYPDHVELSWWVNGKEVHSGVCTDPQPLKEQPALNDSRYCLSSRLRVSATFWQNPRNHFRCQVQFYGLSENDEWTQDRAKPVTQIVSAEAWGRADCGFTSESYQQGVLSAYYMYLLLLLKSVVYFAIITCCLLRRTAFCCNGEKSRAKRSGSGATNFSLLKQAGDVEENPGPTSMDWIWRILFLVGAATGAHSFEDIQMTQSPSSLSASVGDRVTITCRASQSIRNYLNWYQQKPGKAPELLIHAASSLQSGVPSRFSGSGSGTDFTLTISSLQPEDFASYYCQQSYSAPPITFGQGTRLEIKTRIQNPDPAVYQLRDSKSSDKSVCLFTDFDSQTNVSQSKDSDVYITDKCVLDMRSMDFKSNSAVAWSNKSDFACANAFNNSIIPEDTFFPSPESSCDVKLVEKSFETDTNLNFQNLSVIGFRILLLKVAGFNLLMTLRLWSS

SEQ ID NO: 2395 - protein, 644 aa, synthetic construct
MALPVTALLLPLALLLHAARPACRARSEDRYRNPKGSAGTDIVMTQSPDSLAVSLGERATINCKSSQSLLNSGNQKNYLAWYQQKPGQPPKLLIYWGSTRSTGVPDRFSGSGSGTDFTLTISSLQAEDVAVYYCQNDYTYPFTFGQGTKLEIKLEDLKNVFPPEVAVFEPSEAEISHTQKATLVCLATGFYPDHVELSWWVNGKEVHSGVCTDPQPLKEQPALNDSRYCLSSRLRVSATFWQNPRNHFRCQVQFYGLSENDEWTQDRAKPVTQIVSAEAWGRADCGFTSESYQQGVLSAYYMYLLLLLKSVVYFAIITCCLLRRTAFCCNGEKSRAKRSGSGATNFSLLKQAGDVEENPGPTSMDWIWRILFLVGAATGAHSFEQVQLVQSGAEVKKPGASVKVSCKASGYTFTSFWLNWVRQAPGQGLEWMGNIYPSDSYTVYNQKFKDRVTMTRDTSTSTVYMELSSLRSEDTAVYYCARTWRGNSFDYWGQGTTVTVSSTRIQNPDPAVYQLRDSKSSDKSVCLFTDFDSQTNVSQSKDSDVYITDKCVLDMRSMDFKSNSAVAWSNKSDFACANAFNNSIIPEDTFFPSPESSCDVKLVEKSFETDTNLNFQNLSVIGFRILLLKVAGFNLLMTLRLWSS

SEQ ID NO: 2396 - protein, 640 aa, synthetic construct
MALPVTALLLPLALLLHAARPACARSEDRYRNPKGTDIVMTQSPDSLAVSLGERATINCKSSQSLLNSGNQKNYLAWYQQKPGQPPKLLIYWGSTRSTGVPDRFSGSGSGTDFTLTISSLQAEDVAVYYCQNDYTYPFTFGQGTKLEIKLEDLKNVFPPEVAVFEPSEAEISHTQKATLVCLATGFYPDHVELSWWVNGKEVHSGVCTDPQPLKEQPALNDSRYCLSSRLRVSATFWQNPRNHFRCQVQFYGLSENDEWTQDRAKPVTQIVSAEAWGRADCGFTSESYQQGVLSAYYMYLLLLLKSVVYFAIITCCLLRRTAFCCNGEKSRAKRSGSGATNFSLLKQAGDVEENPGPTSMDWIWRILFLVGAATGAHSFEQVQLVQSGAEVKKPGASVKVSCKASGYTFTSFWLNWVRQAPGQGLEWMGNIYPSDSYTVYNQKFKDRVTMTRDTSTSTVYMELSSLRSEDTAVYYCARTWRGNSFDYWGQGTTVTVSSTRIQNPDPAVYQLRDSKSSDKSVCLFTDFDSQTNVSQSKDSDVYITDKCVLDMRSMDFKSNSAVAWSNKSDFACANAFNNSIIPEDTFFPSPESSCDVKLVEKSFETDTNLNFQNLSVIGFRILLLKVAGFNLLMTLRLWSS

SEQ ID NO: 2397 - protein, 622 aa, synthetic construct
MALPVTALLLPLALLLHAARPDIQMTQSPSSLSASVGDRVTITCKASDHINNWLAWYQQKPGQAPKLLIYGATTLETGVPSRFSGSGSGTDYTLTISSLQPEDFATYYCQQSWNTPWTFGQGTKLEIKRLEDLKNVFPPEVAVFEPSEAEISHTQKATLVCLATGFYPDHVELSWWVNGKEVHSGVCTDPQPLKEQPALNDSRYCLSSRLRVSATFWQNPRNHFRCQVQFYGLSENDEWTQDRAKPVTQIVSAEAWGRADCDVKLVEKSFETDTNLNFQNLSVIGFRILLLKVAGFNLLMTLRLWSSRAKRSGSGATNFSLLKQAGDVEENPGPTSMDWIWRILFLVGAATGAHSFEQVQLQQPGAELVKPGASVKMSCKASGYAFSSYWINWMKQKPGQGLEWIGQIYPGDGDTNYNGKFKGRATLTADTSSSTAYMQLSSLTSEDSAVYFCARSITTVVGCAMDYWGQGTSVTVSSTRIQNPDPAVYQLRDSKSSDKSVCLFTDFDSQTNVSQSKDSDVYITDKCVLDMRSMDFKSNSAVAWSNKSDFACANAFNNSIIPEDTFFPSPESSCGFTSESYQQGVLSATILYEILLGKATLYAVLVSALVLMAMVKRKDSRG

SEQ ID NO: 2398 - protein, 658 aa, synthetic construct
MALPVTALLLPLALLLHAARPARSEDRYRNPKEFQVQLQQSGPGLVKPSQTLSLTCAISGDSVSSNRAAWNWIRQSPSRGLQWLGRTYYRSKWYNDYAVSLRSRITINPVTSKNQVALHMNSVTPEDTAVYYCARAGIVVVPGPETFYYYDHGLDVWGQGTTVTVSSLEDLKNVFPPEVAVFEPSEAEISHTQKATLVCLATGFYPDHVELSWWVNGKEVHSGVCTDPQPLKEQPALNDSRYCLSSRLRVSATFWQNPRNHFRCQVQFYGLSENDEWTQDRAKPVTQIVSAEAWGRADCGFTSESYQQGVLSATILYEILLGKATLYAVLVSALVLMAMVKRKDSRGRAKRSGSGATNFSLLKQAGDVEENPGPTSMDWIWRILFLVGAATGAHSFEDIQMTQSPSSLSASVGDRVTITCRASQSIRNYLNWYQQKPGKAPELLIHAASSLQSGVPSRFSGSGSGTDFTLTISSLQPEDFASYYCQQSYSAPPITFGQGTRLEIKTRARSEDRYRNPKIQNPDPAVYQLRDSKSSDKSVCLFTDFDSQTNVSQSKDSDVYITDKCVLDMRSMDFKSNSAVAWSNKSDFACANAFNNSIIPEDTFFPSPESSCDVKLVEKSFETDTNLNFQNLSVIGFRILLLKVAGFNLLMTLRLWSS

SEQ ID NO: 2399 - protein, 641 aa, synthetic construct
MALPVTALLLPLALLLHAARPARSEDRYRNPKEFDIQMTQSPSSLSASVGDRVTITCRASQDISNYLNWYQQKPGKAPKLLIYYTSRLHSGVPSRFSGSGSGTDFTLTISSLQPEDFATYYCQQGNTLPYTFGQGTKVEIKRLEDLKNVFPPEVAVFEPSEAEISHTQKATLVCLATGFYPDHVELSWWVNGKEVHSGVCTDPQPLKEQPALNDSRYCLSSRLRVSATFWQNPRNHFRCQVQFYGLSENDEWTQDRAKPVTQIVSAEAWGRADCGFTSESYQQGVLSATILYEILLGKATLYAVLVSALVLMAMVKRKDSRGRAKRSGSGATNFSLLKQAGDVEENPGPTSMDWIWRILFLVGAATGAHSFEVQLVESGGGLVQPGGSLRLSCAASGFTFSDYFMSWVRQAPGKGLEWVATISNGGTYTYYPDSVKGRFTISRDNSKNTLYLQMNSLRAEDTAVYYCARFDGYIFDYWGQGTLVTVSSTRARSEDRYRNPKIQNPDPAVYQLRDSKSSDKSVCLFTDFDSQTNVSQSKDSDVYITDKCVLDMRSMDFKSNSAVAWSNKSDFACANAFNNSIIPEDTFFPSPESSCDVKLVEKSFETDTNLNFQNLSVIGFRILLLKVAGFNLLMTLRLWSS

SEQ ID NO: 2400 - protein, 657 aa, synthetic construct
MALPVTALLLPLALLLHAARPSYVLTQPPSVSVAPGQTARITCGGNNIGSKSVHWYQQPPGQAPVVVVYDDSDRPSGIPERFSGSNSGNTATLTISRVEAGDEAVYYCQVWDSSSDHVVFGGGTKLTVLLEARSEDRYRNPKEDLKNVFPPEVAVFEPSEAEISHTQKATLVCLATGFYPDHVELSWWVNGKEVHSGVCTDPQPLKEQPALNDSRYCLSSRLRVSATFWQNPRNHFRCQVQFYGLSENDEWTQDRAKPVTQIVSAEAWGRADCGFTSESYQQGVLSATILYEILLGKATLYAVLVSALVLMAMVKRKDSRGRAKRSGSGATNFSLLKQAGDVEENPGPTSMDWIWRILFLVGAATGAHSARSEDRYRNPKFEQLQLQESGPGLVKPSETLSLTCTVSGGSISSGSYFWGWIRQPPGKGLEWIGSIYYSGITYYNPSLKSRVTISVDTSKNQFSLKLSSVTAADTAVYYCARHDGAVAGLFDYWGQGTLVTVSSATRARSEDRYRNPKIQNPDPAVYQLRDSKSSDKSVCLFTDFDSQTNVSQSKDSDVYITDKCVLDMRSMDFKSNSAVAWSNKSDFACANAFNNSIIPEDTFFPSPESSCDVKLVEKSFETDTNLNFQNLSVIGFRILLLKVAGFNLLMTLRLWSS

SEQ ID NO: 2401 - protein, 653 aa, synthetic construct
MALPVTALLLPLALLLHAARPACRARSEDRYRNPKGSAGTQVQLQQSGPGLVKPSQTLSLTCAISGDSVSSNRAAWNWIRQSPSRGLQWLGRTYYRSKWYNDYAVSLRSRITINPVTSKNQVALHMNSVTPEDTAVYYCARAGIVVVPGPETFYYYDHGLDVWGQGTTVTVSSLEDLKNVFPPEVAVFEPSEAEISHTQKATLVCLATGFYPDHVELSWWVNGKEVHSGVCTDPQPLKEQPALNDSRYCLSSRLRVSATFWQNPRNHFRCQVQFYGLSENDEWTQDRAKPVTQIVSAEAWGRADCGFTSESYQQGVLSATILYEILLGKATLYAVLVSALVLMAMVKRKDSRGRAKRCGSGATNFSLLKQAGDVEENPGPTSMDWIWRILFLVGAATGAHSFEDIQMTQSPSSLSASVGDRVTITCRASQSIRNYLNWYQQKPGKAPELLIHAASSLQSGVPSRFSGSGSGTDFTLTISSLQPEDFASYYCQQSYSAPPITFGQGTRLEIKTRIQNPDPAVYQLRDSKSSDKSVCLFTDFDSQTNVSQSKDSDVYITDKCVLDMRSMDFKSNSAVAWSNKSDFACANAFNNSIIPEDTFFPSPESSCDVKLVEKSFETDTNLNFQNLSVIGFRILLLKVAGFNLLMTLRLWSS

SEQ ID NO: 2402 - protein, 649 aa, synthetic construct
MALPVTALLLPLALLLHAARPACARSEDRYRNPKGTQVQLQQSGPGLVKPSQTLSLTCAISGDSVSSNRAAWNWIRQSPSRGLQWLGRTYYRSKWYNDYAVSLRSRITINPVTSKNQVALHMNSVTPEDTAVYYCARAGIVVVPGPETFYYYDHGLDVWGQGTTVTVSSLEDLKNVFPPEVAVFEPSEAEISHTQKATLVCLATGFYPDHVELSWWVNGKEVHSGVCTDPQPLKEQPALNDSRYCLSSRLRVSATFWQNPRNHFRCQVQFYGLSENDEWTQDRAKPVTQIVSAEAWGRADCGFTSESYQQGVLSATILYEILLGKATLYAVLVSALVLMAMVKRKDSRGRAKRSGSGATNFSLLKQAGDVEENPGPTSMDWIWRILFLVGAATGAHSFEDIQMTQSPSSLSASVGDRVTITCRASQSIRNYLNWYQQKPGKAPELLIHAASSLQSGVPSRFSGSGSGTDFTLTISSLQPEDFASYYCQQSYSAPPITFGQGTRLEIKTRIQNPDPAVYQLRDSKSSDKSVCLFTDFDSQTNVSQSKDSDVYITDKCVLDMRSMDFKSNSAVAWSNKSDFACANAFNNSIIPEDTFFPSPESSCDVKLVEKSFETDTNLNFQNLSVIGFRILLLKVAGFNLLMTLRLWSS

SEQ ID NO: 2403 - protein, 643 aa, synthetic construct
MALPVTALLLPLALLLHAARPACRARSEDRYRNPKGSAGTDIVMTQSPDSLAVSLGERATINCKSSQSLLNSGNQKNYLAWYQQKPGQPPKLLIYWGSTRSTGVPDRFSGSGSGTDFTLTISSLQAEDVAVYYCQNDYTYPFTFGQGTKLEIKLEDLKNVFPPEVAVFEPSEAEISHTQKATLVCLATGFYPDHVELSWWVNGKEVHSGVCTDPQPLKEQPALNDSRYCLSSRLRVSATFWQNPRNHFRCQVQFYGLSENDEWTQDRAKPVTQIVSAEAWGRADCGFTSESYQQGVLSATILYEILLGKATLYAVLVSALVLMAMVKRKDSRGRAKRSGSGATNFSLLKQAGDVEENPGPTSMDWIWRILFLVGAATGAHSFEQVQLVQSGAEVKKPGASVKVSCKASGYTFTSFWLNWVRQAPGQGLEWMGNIYPSDSYTVYNQKFKDRVTMTRDTSTSTVYMELSSLRSEDTAVYYCARTWRGNSFDYWGQGTTVTVSSTRIQNPDPAVYQLRDSKSSDKSVCLFTDFDSQTNVSQSKDSDVYITDKCVLDMRSMDFKSNSAVAWSNKSDFACANAFNNSIIPEDTFFPSPESSCDVKLVEKSFETDTNLNFQNLSVIGFRILLLKVAGFNLLMTLRLWSS

SEQ ID NO: 2404 - protein, 639 aa, synthetic construct
MALPVTALLLPLALLLHAARPACARSEDRYRNPKGTDIVMTQSPDSLAVSLGERATINCKSSQSLLNSGNQKNYLAWYQQKPGQPPKLLIYWGSTRSTGVPDRFSGSGSGTDFTLTISSLQAEDVAVYYCQNDYTYPFTFGQGTKLEIKLEDLKNVFPPEVAVFEPSEAEISHTQKATLVCLATGFYPDHVELSWWVNGKEVHSGVCTDPQPLKEQPALNDSRYCLSSRLRVSATFWQNPRNHFRCQVQFYGLSENDEWTQDRAKPVTQIVSAEAWGRADCGFTSESYQQGVLSATILYEILLGKATLYAVLVSALVLMAMVKRKDSRGRAKRSGSGATNFSLLKQAGDVEENPGPTSMDWIWRILFLVGAATGAHSFEQVQLVQSGAEVKKPGASVKVSCKASGYTFTSFWLNWVRQAPGQGLEWMGNIYPSDSYTVYNQKFKDRVTMTRDTSTSTVYMELSSLRSEDTAVYYCARTWRGNSFDYWGQGTTVTVSSTRIQNPDPAVYQLRDSKSSDKSVCLFTDFDSQTNVSQSKDSDVYITDKCVLDMRSMDFKSNSAVAWSNKSDFACANAFNNSIIPEDTFFPSPESSCDVKLVEKSFETDTNLNFQNLSVIGFRILLLKVAGFNLLMTLRLWSS

SEQ ID NO: 2405 - protein, 930 aa, synthetic construct
MALPVTALLLPLALLLHAARPDIQMTQSPSSLSASVGDRVTITCKASDHINNWLAWYQQKPGQAPKLLIYGATTLETGVPSRFSGSGSGTDYTLTISSLQPEDFATYYCQQSWNTPWTFGQGTKLEIKRLEDLKNVFPPEVAVFEPSEAEISHTQKATLVCLATGFYPDHVELSWWVNGKEVHSGVCTDPQPLKEQPALNDSRYCLSSRLRVSATFWQNPRNHFRCQVQFYGLSENDEWTQDRAKPVTQIVSAEAWGRADCGFTSESYQQGVLSATILYEILLGKATLYAVLVSALVLMAMVKRKDSRGRAKRSGSGATNFSLLKQAGDVEENPGPTSATMALPVTALLLPLALLLHAARPARSEDRYRNPKGSGGSELPTQGTFSNVSTNVSPAKPTTTACARSEDRYRNPKGSGSGGGGSGGGGSGGGGSFEQVQLQQPGAELVKPGASVKMSCKASGYAFSSYWINWMKQKPGQGLEWIGQIYPGDGDTNYNGKFKGRATLTADTSSSTAYMQLSSLTSEDSAVYFCARSITTVVGCAMDYWGQGTSVTVSSTRIQNPDPAVYQLRDSKSSDKSVCLFTDFDSQTNVSQSKDSDVYITDKCVLDMRSMDFKSNSAVAWSNKSDFACANAFNNSIIPEDTFFPSPESSCDVKLVEKSFETDTNLNFQNLSVIGFRILLLKVAGFNLLMTLRLWSSRAKRSGSGVKQTLNFDLLKLAGDVESNPGPSRGHMTEYKPTVRLATRDDVPRAVRTLAAAFADYPATRHTVDPDRHIERVTELQELFLTRVGLDIGKVWVADDGAAVAVWTTPESVEAGAVFAEIGPRMAELSGSRLAAQQQMEGLLAPHRPKEPAWFLATVGVSPDHQGKGLGSAVVLPGVEAAERAGVPAFLETSAPRNLPFYERLGFTVTADVEVPEGPRTWCMTRKPGA

SEQ ID NO: 2406 - protein, 641 aa, synthetic construct
MALPVTALLLPLALLLHAARPDIQLTQSPSSLSASVGDRVTITCKASQSVDYDGDSFLNWYQQKPGKAPKLLIYAASNLESGVPSRFSGSGSGTDFTLTISSLQPEDFATYYCQQSNEDPLTFGQGTKVEIKRLEGQPKANPTVTLFPPSSEELQANKATLVCLISDFYPGAVTVAWKADGSPVKAGVETTKPSKQSNNKYAASSYLSLTPEQWKSHRSYSCQVTHEGSTVEKTVAPTECSGSLGEPQLCYILDAILFLYGIVLTLLYCRLKIQVRKAAITSYEKSDGVYTGLSTRNQETYETLKHEKPPQRAKRSGSGATNFSLLKQAGDVEENPGPTSMDWIWRILFLVGAATGAHSFEEVQLVESGGGLVQPGGSLRLSCAASGYTFTSYWIEWVRQAPGKGLEWIGEILPGGGDTNYNEIFKGRATFSADTSKNTAYLQMNSLRAEDTAVYYCTRRVPIRLDYWGQGTLVTVSSTRIQNPDPAVYQLRDSKSSDKSVCLFTDFDSQTNVSQSKDSDVYITDKTVLDMRSMDFKSNSAVAWSNKSDFACANAFNNSIIPEDTFFPSPESSCGTITQGLAVSTISSFFPPGYQVSFCLVMVLLFAVDTGLYFSVKTNIRSSTRDWKDHKFKWRKDPQDK

SEQ ID NO: 2407 - protein, 622 aa, synthetic construct; identical to SEQ ID NO: 2273

SEQ ID NO: 2408 - protein, 741 aa, synthetic construct
MALPVTALLLPLALLLHAARPDIQMTQSPSSLSASVGDRVTITCKASQDVGTAVDWYQQKPGKAPKLLIYWASTRHTGVPSRFSGSGSGTDFTLTISSLQPEDFATYYCQQYNSYPLTFGQGTKVEIKRLEDLKNVFPPEVAVFEPSEAEISHTQKATLVCLATGFYPDHVELSWWVNGKEVHSGVSTDPQPLKEQPALNDSRYCLSSRLRVSATFWQNPRNHFRCQVQFYGLSENDEWTQDRAKPVTQIVSAEAWGRADCGSQSFGLLDPKLCYLLDGILFIYGVILTALFLRVKFSRSADAPAYQQGQNQLYNELNLGRREEYDVLDKRRGRDPEMGGKPRRKNPQEGLYNELQKDKMAEAYSEIGMKGERRRGKGHDGLYQGLSTATKDTYDALHMQALPPRRAKRSGSGATNFSLLKQAGDVEENPGPTSMDWIWRILFLVGAATGAHSFEVQLVESGGGLVQPGGSLRLSCAASGYTFTEYTIHWVRQAPGKGLEWVANINPNNGGTTYNQKFEDRFTISRDNSKNTLYLQMNSLRAEDTAVYYCARGWNFDYWGQGTLVTVSSTRASTKGPSVFPLAPSSKSTSGGTAALGCLVKDYFPEPVTVSWNSGALTSGVHTFPAVLQSSGLYSLSSVVTVPSSSLGTQTYICNVNHKPSNTKVDKRVEPKSCGTITQGLAVSTISSFFPPGYQVSFCLVMVLLFAVDTGLYFSVKTNIRSSTRDWKDHKFKWRKDPQDK

SEQ ID NO: 2409 - protein, 690 aa, synthetic construct
MALPVTALLLPLALLLHAARPACRARSEDRYRNPKGSAGTGGGGSGGGGSGGGGSEFDIQMTQSPSSLSASVGDRVTITCKASDHINNWLAWYQQKPGQAPKLLIYGATTLETGVPSRFSGSGSGTDYTLTISSLQPEDFATYYCQQSWNTPWTFGQGTKLEIKRLEDLKNVFPPEVAVFEPSEAEISHTQKATLVCLATGFYPDHVELSWWVNGKEVHSGVCTDPQPLKEQPALNDSRYCLSSRLRVSATFWQNPRNHFRCQVQFYGLSENDEWTQDRAKPVTQIVSAEAWGRADCGFTSESYQQGVLSATILYEILLGKATLYAVLVSALVLMAMVKRKDSRGRAKRSGSGATNFSLLKQAGDVEENPGPTSATMDWIWRILFLVGAATGAHSGPARSEDRYRNPKGSGGGGSGGGGSGGGGSFEQVQLQQPGAELVKPGASVKMSCKASGYAFSSYWINWMKQKPGQGLEWIGQIYPGDGDTNYNGKFKGRATLTADTSSSTAYMQLSSLTSEDSAVYFCARSITTVVGCAMDYWGQGTSVTVSSTRIQNPDPAVYQLRDSKSSDKSVCLFTDFDSQTNVSQSKDSDVYITDKCVLDMRSMDFKSNSAVAWSNKSDFACANAFNNSIIPEDTFFPSPESSCDVKLVEKSFETDTNLNFQNLSVIGFRILLLKVAGFNLLMTLRLWSS

SEQ ID NO: 2410 - protein, 666 aa, synthetic construct; identical to SEQ ID NO: 2382

SEQ ID NO: 2411 - protein, 619 aa, synthetic construct
MALPVTALLLPLALLLHAARPDVVMTQSPSSLSASVGDRVTITCMASEDIYIRLAWYQQKPGNAPKLLIYAATSLETGVPSRFSGSGSGTDFTLTISSLQPEDFATYYCQQYWSSPWTFGGGTKVEIKLEDLKNVFPPEVAVFEPSEAEISHTQKATLVCLATGFYPDHVELSWWVNGKEVHSGVCTDPQPLKEQPALNDSRYCLSSRLRVSATFWQNPRNHFRCQVQFYGLSENDEWTQDRAKPVTQIVSAEAWGRADCGFTSESYQQGVLSAYYMYLLLLLKSVVYFAIITCCLLRRTAFCCNGEKSRAKRSGSGATNFSLLKQAGDVEENPGPTSMDWIWRILFLVGAATGAHSFEQVQLQESGPGLVKPSQTLSLTCTVSGYSITSDYTWNWIRQPPGNGLEWIGYITYSGSTSYNPSLKSRVLISVDTSKNQVSLKLSSVTAADTAVYYCARLGRRYTMDYWGQGTTVTVSSTRIQNPDPAVYQLRDSKSSDKSVCLFTDFDSQTNVSQSKDSDVYITDKCVLDMRSMDFKSNSAVAWSNKSDFACANAFNNSIIPEDTFFPSPESSCDVKLVEKSFETDTNLNFQNLSVIGFRILLLKVAGFNLLMTLRLWSS

SEQ ID NO: 2412 - protein, 732 aa, synthetic construct
MALPVTALLLPLALLLHAARPDIQMTQSPSSLSASVGDRVTITCKASDHINNWLAWYQQKPGQAPKLLIYGATTLETGVPSRFSGSGSGTDYTLTISSLQPEDFATYYCQQSWNTPWTFGQGTKLEIKRLEGQPKANPTVTLFPPSSEELQANKATLVCLISDFYPGAVTVAWKADGSPVKAGVETTKPSKQSNNKYAASSYLSLTPEQWKSHRSYSCQVTHEGSTVEKTVAPTECSGSQSFGLLDPKLCYLLDGILFIYGVILTALFLRVKFSRSADAPAYQQGQNQLYNELNLGRREEYDVLDKRRGRDPEMGGKPQRRKNPQEGLYNELQKDKMAEAYSEIGMKGERRRGKGHDGLYQGLSTATKDTYDALHMQALPPRRAKRSGSGATNFSLLKQAGDVEENPGPTSMDWIWRILFLVGAATGAHSFEQVQLQQPGAELVKPGASVKMSCKASGYAFSSYWINWMKQKPGQGLEWIGQIYPGDGDTNYNGKFKGRATLTADTSSSTAYMQLSSLTSEDSAVYFCARSITTVVGCAMDYWGQGTSVTVSSTRASTKGPSVFPLAPCSRSTSESTAALGCLVKDYFPEPVTVSWNSGALTSGVHTFPAVLQSSGLYSLSSVVTVPSSSLGTKTYTCNVDHKPSNTKVDKRVESKYGGTQSFGLLDPKLCYLLDGILFIYGVILTALFLKRGRKKLLYIFKQPFMRPVQTTQEEDGCSCRFPEEEEGGCEL

SEQ ID NO: 2413 - protein, 802 aa, synthetic construct
MALPVTALLLPLALLLHAARPDIQMTQSPSSLSASVGDRVTITCKASDHINNWLAWYQQKPGQAPKLLIYGATTLETGVPSRFSGSGSGTDYTLTISSLQPEDFATYYCQQSWNTPWTFGQGTKLEIKRLEGQPKANPTVTLFPPSSEELQANKATLVCLISDFYPGAVTVAWKADGSPVKAGVETTKPSKQSNNKYAASSYLSLTPEQWKSHRSYSCQVTHEGSTVEKTVAPTECSGSQSFGLLDPKLCYLLDGILFIYGVILTALFLRVKFSRSADAPAYQQGQNQLYNELNLGRREEYDVLDKRRGRDPEMGGKPRRKNPQEGLYNELQKDKMAEAYSEIGMKGERRRGKGHDGLYQGLSTATKDTYDALHMQALPPRRAKRSGSGATNFSLLKQAGDVEENPGPTSMDWIWRILFLVGAATGAHSFEQVQLQQPGAELVKPGASVKMSCKASGYAFSSYWINWMKQKPGQGLEWIGQIYPGDGDTNYNGKFKGRATLTADTSSSTAYMQLSSLTSEDSAVYFCARSITTVVGCAMDYWGQGTSVTVSSTRASTKGPSVFPLAPCSRSTSESTAALGCLVKDYFPEPVTVSWNSGALTSGVHTFPAVLQSSGLYSLSSVVTVPSSSLGTKTYTCNVDHKPSNTKVDKRVESKYGGTQSFGLLDPKLCYLLDGILFIYGVILTALFLRVKFSRSADAPAYQQGQNQLYNELNLGRREEYDVLDKRRGRDPEMGGKPQRRKNPQEGLYNELQKDKMAEAYSEIGMKGERRRGKGHDGLYQGLSTATKDTYDALHMQALPPR

SEQ ID NO: 2414 - protein, 814 aa, synthetic construct
MALPVTALLLPLALLLHAARPDIQMTQSPSSLSASVGDRVTITCKASDHINNWLAWYQQKPGKAPKLLIYGATTLETGVPSRFSGSGSGTDFTLTISSLQPEDFATYYCQQSWNTPWTFGQGTKVEIKRLEGQPKANPTVTLFPPSSEELQANKATLVCLISDFYPGAVTVAWKADGSPVKAGVETTKPSKQSNNKYAASSYLSLTPEQWKSHRSYSCQVTHEGSTVEKTVAPTECSGSQSFGLLDPKLCYLLDGILFIYGVILTALFLRVKFSRSADAPAYQQGQNQLYNELNLGRREEYDVLDKRRGRDPEMGGKPRRKNPQEGLYNELQKDKMAEAYSEIGMKGERRRGKGHDGLYQGLSTATKDTYDALHMQALPPRRAKRSGSGATNFSLLKQAGDVEENPGPTSATMDWIWRILFLVGAATGAHSARSEDRYRNPKFEVQLVESGGGLVQPGGSLRLSCAASGYAFSNYWVNWVRQAPGKGLEWVAQIYPGDGDTNYNGKFKGRFTISRDNSKNTLYLQMNSLRAEDTAVYYCARSITTVVGCAMDYWGQGTLVTVSSTRASTKGPSVFPLAPSSKSTSGGTAALGCLVKDYFPEPVTVSWNSGALTSGVHTFPAVLQSSGLYSLSSVVTVPSSSLGTQTYICNVNHKPSNTKVDKRVEPKSCGTQSFGLLDPKLCYLLDGILFIYGVILTALFLRVKFSRSADAPAYQQGQNQLYNELNLGRREEYDVLDKRRGRDPEMGGKPQRRKNPQEGLYNELQKDKMAEAYSEIGMKGERRRGKGHDGLYQGLSTATKDTYDALHMQALPPR

SEQ ID NO: 2415 - protein, 632 aa, synthetic construct
MALPVTALLLPLALLLHAARPDIQMTQSPSSLSASVGDRVTITCKASDHINNWLAWYQQKPGKAPKLLIYGATTLETGVPSRFSGSGSGTDFTLTISSLQPEDFATYYCQQSWNTPWTFGQGTKVEIKRLEDLKNVFPPEVAVFEPSEAEISHTQKATLVCLATGFYPDHVELSWWVNGKEVHSGVCTDPQPLKEQPALNDSRYCLSSRLRVSATFWQNPRNHFRCQVQFYGLSENDEWTQDRAKPVTQIVSAEAWGRADCGFTSESYQQGVLSATILYEILLGKATLYAVLVSALVLMAMVKRKDSRGRAKRSGSGATNFSLLKQAGDVEENPGPTSMDWIWRILFLVGAATGAHSFEVQLVESGGGLVQPGGSLRLSCAASGYAFSSYWVNWVRQAPGKGLEWVAQIYPGDGDTNYNGKFKGRFTISRDNSKNTLYLQMNSLRAEDTAVYYCARSITTVVGCAMDYWGQGTLVTVSSTRARSEDRYRNPKIQNPDPAVYQLRDSKSSDKSVCLFTDFDSQTNVSQSKDSDVYITDKCVLDMRSMDFKSNSAVAWSNKSDFACANAFNNSIIPEDTFFPSPESSCDVKLVEKSFETDTNLNFQNLSVIGFRILLLKVAGFNLLMTLRLWSS

SEQ ID NO: 2416 - protein, 622 aa, synthetic construct
MALPVTALLLPLALLLHAARPDIQMTQSPSSLSASVGDRVTITCKASDHINNWLAWYQQKPGKAPKLLIYGATTLETGVPSRFSGSGSGTDFTLTISSLQPEDFATYYCQQSWNTPWTFGQGTKVEIKRLEDLKNVFPPEVAVFEPSEAEISHTQKATLVCLATGFYPDHVELSWWVNGKEVHSGVCTDPQPLKEQPALNDSRYCLSSRLRVSATFWQNPRNHFRCQVQFYGLSENDEWTQDRAKPVTQIVSAEAWGRADCGFTSESYQQGVLSAYYMYLLLLLKSVVYFAIITCCLLRRTAFCCNGEKSRAKRSGSGATNFSLLKQAGDVEENPGPTSMDWIWRILFLVGAATGAHSFEVQLVESGGGLVQPGGSLRLSCAASGYAFSSYWVNWVRQAPGKGLEWVAQIYPGDGDTNYNGKFKGRFTISRDNSKNTLYLQMNSLRAEDTAVYYCARSITTVVGCAMDYWGQGTLVTVSSTRIQNPDPAVYQLRDSKSSDKSVCLFTDFDSQTNVSQSKDSDVYITDKCVLDMRSMDFKSNSAVAWSNKSDFACANAFNNSIIPEDTFFPSPESSCDVKLVEKSFETDTNLNFQNLSVIGFRILLLKVAGFNLLMTLRLWSS

SEQ ID NO: 2417 - protein, 760 aa, synthetic construct
MALPVTALLLPLALLLHAARPDIQMTQSPSSLSASVGDRVTITCKASDHINNWLAWYQQKPGKAPKLLIYGATTLETGVPSRFSGSGSGTDFTLTISSLQPEDFATYYCQQSWNTPWTFGQGTKVEIKRLEDLKNVFPPEVAVFEPSEAEISHTQKATLVCLATGFYPDHVELSWWVNGKEVHSGVCTDPQPLKEQPALNDSRYCLSSRLRVSATFWQNPRNHFRCQVQFYGLSENDEWTQDRAKPVTQIVSAEAWGRADCGFTSESYQQGVLSATILYEILLGKATLYAVLVSALVLMAMVKRKDSRGRAKRSGSGATNFSLLKQAGDVEENPGPTSATMDWIWRILFLVGAATGAHSGPEVQLVESGGGLVQAGGSLRLSCAASGRTFTMGWFRQAPGKEREFVAAISLSPTLAYYADSVKGRFTISRDNAKNTVVLQMNSLKPEDTALYYCAADRKSVMSIRPDYWGQGTQVTVSSGSGGGGSGGGGSGGGGSFEVQLVESGGGLVQPGGSLRLSCAASGYAFSSYWVNWVRQAPGKGLEWVAQIYPGDGDTNYNGKFKGRFTISRDNSKNTLYLQMNSLRAEDTAVYYCARSITTVVGCAMDYWGQGTLVTVSSTRIQNPDPAVYQLRDSKSSDKSVCLFTDFDSQTNVSQSKDSDVYITDKCVLDMRSMDFKSNSAVAWSNKSDFACANAFNNSIIPEDTFFPSPESSCDVKLVEKSFETDTNLNFQNLSVIGFRILLLKVAGFNLLMTLRLWSS

SEQ ID NO: 2418 - protein, 760 aa, synthetic construct
MALPVTALLLPLALLLHAARPDIQMTQSPSSLSASVGDRVTITCKASDHINNWLAWYQQKPGKAPKLLIYGATTLETGVPSRFSGSGSGTDFTLTISSLQPEDFATYYCQQSWNTPWTFGQGTKVEIKRLEDLKNVFPPEVAVFEPSEAEISHTQKATLVCLATGFYPDHVELSWWVNGKEVHSGVCTDPQPLKEQPALNDSRYCLSSRLRVSATFWQNPRNHFRCQVQFYGLSENDEWTQDRAKPVTQIVSAEAWGRADCGFTSESYQQGVLSATILYEILLGKATLYAVLVSALVLMAMVKRKDSRGRAKRSGSGATNFSLLKQAGDVEENPGPTSATMDWIWRILFLVGAATGAHSGPEVQLVESGGGLVQAGGSLRLSCAASGRTFSMGWFRQAPGKEREFVAAITYSGGSPYYADSVKGRFTISRDNAKNTVYLQMNSLKPEDTAVYYCAANPTYGSDWNAENWGQGTQVTVSSGSGGGGSGGGGSGGGGSFEVQLVESGGGLVQPGGSLRLSCAASGYAFSSYWVNWVRQAPGKGLEWVAQIYPGDGDTNYNGKFKGRFTISRDNSKNTLYLQMNSLRAEDTAVYYCARSITTVVGCAMDYWGQGTLVTVSSTRIQNPDPAVYQLRDSKSSDKSVCLFTDFDSQTNVSQSKDSDVYITDKCVLDMRSMDFKSNSAVAWSNKSDFACANAFNNSIIPEDTFFPSPESSCDVKLVEKSFETDTNLNFQNLSVIGFRILLLKVAGFNLLMTLRLWSS

SEQ ID NO: 2419 - protein, 784 aa, synthetic construct
MALPVTALLLPLALLLHAARPDIQMTQSPSSLSASVGDRVTITCKASDHINNWLAWYQQKPGQAPKLLIYGATTLETGVPSRFSGSGSGTDYTLTISSLQPEDFATYYCQQSWNTPWTFGQGTKLEIKRLEARSEDRYRNPKEDLKNVFPPEVAVFEPSEAEISHTQKATLVCLATGFYPDHVELSWWVNGKEVHSGVCTDPQPLKEQPALNDSRYCLSSRLRVSATFWQNPRNHFRCQVQFYGLSENDEWTQDRAKPVTQIVSAEAWGRADCGFTSESYQQGVLSATILYEILLGKATLYAVLVSALVLMAMVKRKDSRGRAKRSGSGATNFSLLKQAGDVEENPGPTSATMDWIWRILFLVGAATGAHSGPEVQLVESGGGLVQAGGSLRLSCAASGRTFTMGWFRQAPGKEREFVAAISLSPTLAYYADSVKGRFTISRDNAKNTVVLQMNSLKPEDTALYYCAADRKSVMSIRPDYWGQGTQVTVSSGSGGGGSGGGGSGGGGSFEQVQLQQPGAELVKPGASVKMSCKASGYAFSSYWINWMKQKPGQGLEWIGQIYPGDGDTNYNGKFKGRATLTADTSSSTAYMQLSSLTSEDSAVYFCARSITTVVGCAMDYWGQGTSVTVSSTRARSEDRYRNPKIQNPDPAVYQLRDSKSSDKSVCLFTDFDSQTNVSQSKDSDVYITDKCVLDMRSMDFKSNSAVAWSNKSDFACANAFNNSIIPEDTFFPSPESSCDVKLVEKSFETDTNLNFQNLSVIGFRILLLKVAGFNLLMTLRLWSS

SEQ ID NO: 2420 - protein, 858 aa, synthetic construct
MALPVTALLLPLALLLHAARPDIQMTQTTSSLSASLGDRVTISCRASQDISKYLNWYQQKPDGTVKLLIYHTSRLHSGVPSRFSGSGSGTDYSLTISNLEQEDIATYFCQQGNTLPYTFGGGTKLEITLEDLKNVFPPEVAVFEPSEAEISHTQKATLVCLATGFYPDHVELSWWVNGKEVHSGVCTDPQPLKEQPALNDSRYCLSSRLRVSATFWQNPRNHFRCQVQFYGLSENDEWTQDRAKPVTQIVSAEAWGRADCGFTSESYQQGVLSAYYMYLLLLLKSVVYFAIITCCLLRRTAFCCNGEKSRAKRSGSGATNFSLLKQAGDVEENPGPTSMDWIWRILFLVGAATGAHSFEVKLQESGPGLVAPSQSLSVTCTVSGVSLPDYGVSWIRQPPRKGLEWLGVIWGSETTYYNSALKSRLTIIKDNSKSQVFLKMNSLQTDDTAIYYCAKHYYYGGSYAMDYWGQGTSVTVSSTRIQNPDPAVYQLRDSKSSDKSVCLFTDFDSQTNVSQSKDSDVYITDKCVLDMRSMDFKSNSAVAWSNKSDFACANAFNNSIIPEDTFFPSSDVPCDVKLVEKSFETDTNLNFQNLSVIGFRILLLKVAGFNLLMTLRLWSSRAKRSGSGVKQTLNFDLLKLAGDVESNPGPSRMYRMQLLSCIALSLALVTNSNWVNVISDLKKIEDLIQSMHIDATLYTESDVHPSCKVTAMKCFLLELQVISLESGDASIHDTVKNLIILANNSLSSNGNVTESGCKECEELEEKNIKEFLQSFVHIVQMFINTSKIEVMYPPPYLDNEKSNGTIIHVKGKHLCPSPLFPGPSKPFWVLVVVGGVLACYSLLVTVAFIIFWVRSKRS

SEQ ID NO: 2421 - protein, 637 aa, synthetic construct
MALPVTALLLPLALLLHAARPACARSEDRYRNPKGTQIVLTQSPAIMSVSPGEKVTMTCSASSSVNYMHWFQQKPGTSPKLWVYSTSNLASGVPARFSGSGSGTSYSLTISSMEAEDAATYYCQQRSIYPPWTFGGGTKLEIKLEIQNPDPAVYQLRDSKSSDKSVCLFTDFDSQTNVSQSKDSDVYITDKCVLDMRSMDFKSNSAVAWSNKSDFACANAFNNSIIPEDTFFPSPESSCDVKLVEKSFETDTNLNFQNLSVIGFRILLLKVAGFNLLMTLRLWSSSSRAKRSGSGVKQTLNFDLLKLAGDVESNPGPTSMDWIWRILFLVGAATGAHSFEVQLQQSGPELVKPGASVKISCKASGYSFTGYTMNWVKQSHGKNLEWIGLINPYNGGTSYNQKFKAKATLTVDKSSSTAYMQLKSLTSEDSAVYYCARDYGYVLDYWGQGTSVTVSSTREDLKNVFPPEVAVFEPSEAEISHTQKATLVCLATGFYPDHVELSWWVNGKEVHSGVCTDPQPLKEQPALNDSRYCLSSRLRVSATFWQNPRNHFRCQVQFYGLSENDEWTQDRAKPVTQIVSAEAWGRADCGFTSESYQQGVLSATILYEILLGKATLYAVLVSALVLMAMVKRKDSRG

SEQ ID NO: 2422 - protein, 645 aa, synthetic construct
MALPVTALLLPLALLLHAARPACARSEDRYRNPKGTDIVMTQSPDSLAVSLGERATINCKSSQSLLNSGNNKNYVTWYQQKPGQPPKLLIYWGSTRSTGVPDRFSGSGSGTDFTLTISSLQAEDVAVYYCQNDYTYPFTFGQGTKLEIKLEIQNPDPAVYQLRDSKSSDKSVCLFTDFDSQTNVSQSKDSDVYITDKCVLDMRSMDFKSNSAVAWSNKSDFACANAFNNSIIPEDTFFPSPESSCDVKLVEKSFETDTNLNFQNLSVIGFRILLLKVAGFNLLMTLRLWSSSSRAKRSGSGVKQTLNFDLLKLAGDVESNPGPTSMDWIWRILFLVGAATGAHSFEQVQLVQSGAEVKKPGASVKVSCKASGYTFTSFWLNWVRQAPGQGLEWMGNIYPSTSYTVYNQKFKDRVTMTRDTSTSTVYMELSSLRSEDTAVYYCARTWRGNSFDYWGQGTTVTVSSTREDLKNVFPPEVAVFEPSEAEISHTQKATLVCLATGFYPDHVELSWWVNGKEVHSGVCTDPQPLKEQPALNDSRYCLSSRLRVSATFWQNPRNHFRCQVQFYGLSENDEWTQDRAKPVTQIVSAEAWGRADCGFTSESYQQGVLSATILYEILLGKATLYAVLVSALVLMAMVKRKDSRG

SEQ ID NO: 2423 - protein, 642 aa, synthetic construct
MALPVTALLLPLALLLHAARPDIVMTQSPDSLAVSLGERATINCKSSQSLLNSGNQKNYLAWYQQKPGQPPKLLIYWGSTRSTGVPDRFSGSGSGTDFTLTISSLQAEDVAVYYCQNDYTYPFTFGQGTKLEIKLEDLKNVFPPEVAVFEPSEAEISHTQKATLVCLATGFYPDHVELSWWVNGKEVHSGVCTDPQPLKEQPALNDSRYCLSSRLRVSATFWQNPRNHFRCQVQFYGLSENDEWTQDRAKPVTQIVSAEAWGRADCGFTSESYQQGVLSATILYEILLGKATLYAVLVSALVLMAMVKRKDSRGRAKRSGSGATNFSLLKQAGDVEENPGPTSATMDWIWRILFLVGAATGAHSGPARSEDRYRNPKGSAFEQVQLVQSGAEVKKPGASVKVSCKASGYTFTSFWLNWVRQAPGQGLEWMGNIYPSDSYTVYNQKFKDRVTMTRDTSTSTVYMELSSLRSEDTAVYYCARTWRGNSFDYWGQGTTVTVSSTRIQNPDPAVYQLRDSKSSDKSVCLFTDFDSQTNVSQSKDSDVYITDKCVLDMRSMDFKSNSAVAWSNKSDFACANAFNNSIIPEDTFFPSPESSCDVKLVEKSFETDTNLNFQNLSVIGFRILLLKVAGFNLLMTLRLWSS

SEQ ID NO: 2424 - protein, 776 aa, synthetic construct
MALPVTALLLPLALLLHAARPACARSEDRYRNPKEFDIQMTQSPSSLSASVGDRVTITCKASDHINNWLAWYQQKPGQAPKLLIYGATTLETGVPSRFSGSGSGTDYTLTISSLQPEDFATYYCQQSWNTPWTFGQGTKLEIKRLEDLKNVFPPEVAVFEPSEAEISHTQKATLVCLATGFYPDHVELSWWVNGKEVHSGVCTDPQPLKEQPALNDSRYCLSSRLRVSATFWQNPRNHFRCQVQFYGLSENDEWTQDRAKPVTQIVSAEAWGRADCGFTSESYQQGVLSATILYEILLGKATLYAVLVSALVLMAMVKRKDSRGRAKRSGSGATNFSLLKQAGDVEENPGPTSATMDWIWRILFLVGAATGAHSGPEVQLVESGGGLVQAGGSLRLSCAASGRTFTMGWFRQAPGKEREFVAAISLSPTLAYYADSVKGRFTISRDNAKNTVVLQMNSLKPEDTALYYCAADRKSVMSIRPDYWGQGTQVTVSSGSGGGGSGGGGSGGGGSFEQVQLQQPGAELVKPGASVKMSCKASGYAFSSYWINWMKQKPGQGLEWIGQIYPGDGDTNYNGKFKGRATLTADTSSSTAYMQLSSLTSEDSAVYFCARSITTVVGCAMDYWGQGTSVTVSSTRIQNPDPAVYQLRDSKSSDKSVCLFTDFDSQTNVSQSKDSDVYITDKCVLDMRSMDFKSNSAVAWSNKSDFACANAFNNSIIPEDTFFPSPESSCDVKLVEKSFETDTNLNFQNLSVIGFRILLLKVAGFNLLMTLRLWSS

SEQ ID NO: 2425 - protein, 630 aa, synthetic construct
MALPVTALLLPLALLLHAARPACARSEDRYRNPKEFDIQMTQSPSSLSASVGDRVTITCKASQDVGTAVDWYQQKPGKAPKLLIYWASTRHTGVPSRFSGSGSGTDFTLTISSLQPEDFATYYCQQYNSYPLTFGQGTKVEIKRLEDLKNVFPPEVAVFEPSEAEISHTQKATLVCLATGFYPDHVELSWWVNGKEVHSGVCTDPQPLKEQPALNDSRYCLSSRLRVSATFWQNPRNHFRCQVQFYGLSENDEWTQDRAKPVTQIVSAEAWGRADCGFTSESYQQGVLSATILYEILLGKATLYAVLVSALVLMAMVKRKDSRGRAKRSGSGATNFSLLKQAGDVEENPGPTSMDWIWRILFLVGAATGAHSFEVQLVESGGGLVQPGGSLRLSCAASGFTFTDYTIHWVRQAPGKGLEWVANINPNNGGTTYNQKFEDRFTISRDNSKNTLYLQMNSLRAEDTAVYYCARGWNFDYWGQGTLVTVSSTRIQNPDPAVYQLRDSKSSDKSVCLFTDFDSQTNVSQSKDSDVYITDKCVLDMRSMDFKSNSAVAWSNKSDFACANAFNNSIIPEDTFFPSPESSCDVKLVEKSFETDTNLNFQNLSVIGFRILLLKVAGFNLLMTLRLWSS

SEQ ID NO: 2426 - protein, 793 aa, synthetic construct
MALPVTALLLPLALLLHAARPACAKSEDLYPNPKGTGGGGSGGGGSGGGGSEFDIQMTQSPSSLSASVGDRVTITCKASDHINNWLAWYQQKPGQAPKLLIYGATTLETGVPSRFSGSGSGTDYTLTISSLQPEDFATYYCQQSWNTPWTFGQGTKLEIKRLEDLKNVFPPEVAVFEPSEAEISHTQKATLVCLATGFYPDHVELSWWVNGKEVHSGVCTDPQPLKEQPALNDSRYCLSSRLRVSATFWQNPRNHFRCQVQFYGLSENDEWTQDRAKPVTQIVSAEAWGRADCGFTSESYQQGVLSATILYEILLGKATLYAVLVSALVLMAMVKRKDSRGRAKRSGSGATNFSLLKQAGDVEENPGPTSATMDWIWRILFLVGAATGAHSGPEVQLVESGGGLVQAGGSLRLSCAASGRTFTMGWFRQAPGKEREFVAAISLSPTLAYYADSVKGRFTISRDNAKNTVVLQMNSLKPEDTALYYCAADRKSVMSIRPDYWGQGTQVTVSSGSGGGGSGGGGSGGGGSFEQVQLQQPGAELVKPGASVKMSCKASGYAFSSYWINWMKQKPGQGLEWIGQIYPGDGDTNYNGKFKGRATLTADTSSSTAYMQLSSLTSEDSAVYFCARSITTVVGCAMDYWGQGTSVTVSSTRIQNPDPAVYQLRDSKSSDKSVCLFTDFDSQTNVSQSKDSDVYITDKCVLDMRSMDFKSNSAVAWSNKSDFACANAFNNSIIPEDTFFPSPESSCDVKLVEKSFETDTNLNFQNLSVIGFRILLLKVAGFNLLMTLRLWSS

SEQ ID NO: 2427 - protein, 994 aa, synthetic construct
MALPVTALLLPLALLLHAARPSYVLTQPPSVSVAPGQTARITCGGNNIGSKSVHWYQQPPGQAPVVVVYDDSDRPSGIPERFSGSNSGNTATLTISRVEAGDEAVYYCQVWDSSSDHVVFGGGTKLTVLLEDLKNVFPPEVAVFEPSEAEISHTQKATLVCLATGFYPDHVELSWWVNGKEVHSGVSTDPQPLKEQPALNDSRYCLSSRLRVSATFWQNPRNHFRCQVQFYGLSENDEWTQDRAKPVTQIVSAEAWGRADCGSQSFGLLDPKLCYLLDGILFIYGVILTALFLRVKFSRSADAPAYQQGQNQLYNELNLGRREEYDVLDKRRGRDPEMGGKPRRKNPQEGLYNELQKDKMAEAYSEIGMKGERRRGKGHDGLYQGLSTATKDTYDALHMQALPPRRAKRSGSGATNFSLLKQAGDVEENPGPTSMDWIWRILFLVGAATGAHSFEQLQLQESGPGLVKPSETLSLTCTVSGGSISSGSYFWGWIRQPPGKGLEWIGSIYYSGITYYNPSLKSRVTISVDTSKNQFSLKLSSVTAADTAVYYCARHDGAVAGLFDYWGQGTLVTVSSATRIQNPDPAVYQLRDSKSSDKSVCLFTDFDSQTNVSQSKDSDVYITDKTVLDMRSMDFKSNSAVAWSNKSDFACANAFNNSIIPEDTFFPSPESSCGTITQGLAVSTISSFFPPGYQVSFCLVMVLLFAVDTGLYFSVRSKRSRLLHSDYMNMTPRRPGPTRKHYQPYAPPRDFAAYRSRAKRSGSGVKQTLNFDLLKLAGDVESNPGPSRMYRMQLLSCIALSLALVTNSNWVNVISDLKKIEDLIQSMHIDATLYTESDVHPSCKVTAMKCFLLELQVISLESGDASIHDTVKNLIILANNSLSSNGNVTESGCKECEELEEKNIKEFLQSFVHIVQMFINTSKIEVMYPPPYLDNEKSNGTIIHVKGKHLCPSPLFPGPSKPFWVLVVVGGVLACYSLLVTVAFIIFWVRSKRS

SEQ ID NO: 2428 - protein, 1019 aa, synthetic construct
MALPVTALLLPLALLLHAARPDIQMTQSPSSLSASVGDRVTITCKASDHINNWLAWYQQKPGQAPKLLIYGATTLETGVPSRFSGSGSGTDYTLTISSLQPEDFATYYCQQSWNTPWTFGQGTKLEIKRLEDLKNVFPPEVAVFEPSEAEISHTQKATLVCLATGFYPDHVELSWWVNGKEVHSGVCTDPQPLKEQPALNDSRYCLSSRLRVSATFWQNPRNHFRCQVQFYGLSENDEWTQDRAKPVTQIVSAEAWGRADCGFTSESYQQGVLSAGSQSFGLLDPKLCYLLDGILFIYGVILTALFLRVKFSRSADAPAYQQGQNQLYNELNLGRREEYDVLDKRRGRDPEMGGKPRRKNPQEGLYNELQKDKMAEAYSEIGMKGERRRGKGHDGLYQGLSTATKDTYDALHMQALPPRRAKRSGSGATNFSLLKQAGDVEENPGPTSMDWIWRILFLVGAATGAHSFEQVQLQQPGAELVKPGASVKMSCKASGYAFSSYWINWMKQKPGQGLEWIGQIYPGDGDTNYNGKFKGRATLTADTSSSTAYMQLSSLTSEDSAVYFCARSITTVVGCAMDYWGQGTSVTVSSTRIQNPDPAVYQLRDSKSSDKSVCLFTDFDSQTNVSQSKDSDVYITDKCVLDMRSMDFKSNSAVAWSNKSDFACANAFNNSIIPEDTFFPSPESSCDVKLVEKSFETDGTITQGLAVSTISSFFPPGYQVSFCLVMVLLFAVDTGLYFSVRSKRSRLLHSDYMNMTPRRPGPTRKHYQPYAPPRDFAAYRSRAKRSGSGVKQTLNFDLLKLAGDVESNPGPSRMYRMQLLSCIALSLALVTNSNWVNVISDLKKIEDLIQSMHIDATLYTESDVHPSCKVTAMKCFLLELQVISLESGDASIHDTVKNLIILANNSLSSNGNVTESGCKECEELEEKNIKEFLQSFVHIVQMFINTSKIEVMYPPPYLDNEKSNGTIIHVKGKHLCPSPLFPGPSKPFWVLVVVGGVLACYSLLVTVAFIIFWVRSKRS

SEQ ID NO: 2429 - protein, 1133 aa, synthetic construct
MALPVTALLLPLALLLHAARPDIQMTQSPSSLSASVGDRVTITCKASDHINNWLAWYQQKPGQAPKLLIYGATTLETGVPSRFSGSGSGTDYTLTISSLQPEDFATYYCQQSWNTPWTFGQGTKLEIKRLEDLKNVFPPEVAVFEPSEAEISHTQKATLVCLATGFYPDHVELSWWVNGKEVHSGVSTDPQPLKEQPALNDSRYCLSSRLRVSATFWQNPRNHFRCQVQFYGLSENDEWTQDRAKPVTQIVSAEAWGRADCGSQSFGLLDPKLCYLLDGILFIYGVILTALFLRVKFSRSADAPAYQQGQNQLYNELNLGRREEYDVLDKRRGRDPEMGGKPRRKNPQEGLYNELQKDKMAEAYSEIGMKGERRRGKGHDGLYQGLSTATKDTYDALHMQALPPRRAKRSGSGATNFSLLKQAGDVEENPGPTSATMDWIWRILFLVGAATGAHSGPEVQLVESGGGLVQAGGSLRLSCAASGRTFSMGWFRQAPGKEREFVAAITYSGGSPYYADSVKGRFTISRDNAKNTVYLQMNSLKPEDTAVYYCAANPTYGSDWNAENWGQGTQVTVSSGSGGGGSGGGGSGGGGSFEQVQLQQPGAELVKPGASVKMSCKASGYAFSSYWINWMKQKPGQGLEWIGQIYPGDGDTNYNGKFKGRATLTADTSSSTAYMQLSSLTSEDSAVYFCARSITTVVGCAMDYWGQGTSVTVSSTRIQNPDPAVYQLRDSKSSDKSVCLFTDFDSQTNVSQSKDSDVYITDKTVLDMRSMDFKSNSAVAWSNKSDFACANAFNNSIIPEDTFFPSPESSCGTITQGLAVSTISSFFPPGYQVSFCLVMVLLFAVDTGLYFSVKRGRKKLLYIFKQPFMRPVQTTQEEDGCSCRFPEEEEGGCELRAKRSGSGVKQTLNFDLLKLAGDVESNPGPSRMYRMQLLSCIALSLALVTNSNWVNVISDLKKIEDLIQSMHIDATLYTESDVHPSCKVTAMKCFLLELQVISLESGDASIHDTVKNLIILANNSLSSNGNVTESGCKECEELEEKNIKEFLQSFVHIVQMFINTSKIEVMYPPPYLDNEKSNGTIIHVKGKHLCPSPLFPGPSKPFWVLVVVGGVLACYSLLVTVAFIIFWVRSKRS

SEQ ID NO: 2430 - protein, 813 aa, synthetic construct
MALPVTALLLPLALLLHAARPSYVLTQPPSVSVAPGQTARITCGGNNIGSKSVHWYQQPPGQAPVVVVYDDSDRPSGIPERFSGSNSGNTATLTISRVEAGDEAVYYCQVWDSSSDHVVFGGGTKLTVLLEDLKNVFPPEVAVFEPSEAEISHTQKATLVCLATGFYPDHVELSWWVNGKEVHSGVSTDPQPLKEQPALNDSRYCLSSRLRVSATFWQNPRNHFRCQVQFYGLSENDEWTQDRAKPVTQIVSAEAWGRADCGSQSFGLLDPKLCYLLDGILFIYGVILTALFLRVKFSRSADAPAYQQGQNQLYNELNLGRREEYDVLDKRRGRDPEMGGKPRRKNPQEGLYNELQKDKMAEAYSEIGMKGERRRGKGHDGLYQGLSTATKDTYDALHMQALPPRRAKRSGSGATNFSLLKQAGDVEENPGPTSMDWIWRILFLVGAATGAHSFEQLQLQESGPGLVKPSETLSLTCTVSGGSISSGSYFWGWIRQPPGKGLEWIGSIYYSGITYYNPSLKSRVTISVDTSKNQFSLKLSSVTAADTAVYYCARHDGAVAGLFDYWGQGTLVTVSSATRIQNPDPAVYQLRDSKSSDKSVCLFTDFDSQTNVSQSKDSDVYITDKTVLDMRSMDFKSNSAVAWSNKSDFACANAFNNSIIPEDTFFPSPESSCGTITQGLAVSTISSFFPPGYQVSFCLVMVLLFAVDTGLYFSVRSKRSRLLHSDYMNMTPRRPGPTRKHYQPYAPPRDFAAYRSRAKRSGSGVKQTLNFDLLKLAGDVESNPGPSRGSGARQWAERTSPTVPEKLGGGVGN

SEQ ID NO: 2431 - protein, 838 aa, synthetic construct
MALPVTALLLPLALLLHAARPDIQMTQSPSSLSASVGDRVTITCKASDHINNWLAWYQQKPGQAPKLLIYGATTLETGVPSRFSGSGSGTDYTLTISSLQPEDFATYYCQQSWNTPWTFGQGTKLEIKRLEDLKNVFPPEVAVFEPSEAEISHTQKATLVCLATGFYPDHVELSWWVNGKEVHSGVCTDPQPLKEQPALNDSRYCLSSRLRVSATFWQNPRNHFRCQVQFYGLSENDEWTQDRAKPVTQIVSAEAWGRADCGFTSESYQQGVLSAGSQSFGLLDPKLCYLLDGILFIYGVILTALFLRVKFSRSADAPAYQQGQNQLYNELNLGRREEYDVLDKRRGRDPEMGGKPRRKNPQEGLYNELQKDKMAEAYSEIGMKGERRRGKGHDGLYQGLSTATKDTYDALHMQALPPRRAKRSGSGATNFSLLKQAGDVEENPGPTSMDWIWRILFLVGAATGAHSFEQVQLQQPGAELVKPGASVKMSCKASGYAFSSYWINWMKQKPGQGLEWIGQIYPGDGDTNYNGKFKGRATLTADTSSSTAYMQLSSLTSEDSAVYFCARSITTVVGCAMDYWGQGTSVTVSSTRIQNPDPAVYQLRDSKSSDKSVCLFTDFDSQTNVSQSKDSDVYITDKCVLDMRSMDFKSNSAVAWSNKSDFACANAFNNSIIPEDTFFPSPESSCDVKLVEKSFETDGTITQGLAVSTISSFFPPGYQVSFCLVMVLLFAVDTGLYFSVRSKRSRLLHSDYMNMTPRRPGPTRKHYQPYAPPRDFAAYRSRAKRSGSGVKQTLNFDLLKLAGDVESNPGPSRGSGARQWAERTSPTVPEKLGGGVGN

SEQ ID NO: 2432 - protein, 731 aa, synthetic construct
MALPVTALLLPLALLLHAARPDIQMTQSPSSLSASVGDRVTITCKASDHINNWLAWYQQKPGQAPKLLIYGATTLETGVPSRFSGSGSGTDYTLTISSLQPEDFATYYCQQSWNTPWTFGQGTKLEIKRLEGQPKANPTVTLFPPSSEELQANKATLVCLISDFYPGAVTVAWKADGSPVKAGVETTKPSKQSNNKYAASSYLSLTPEQWKSHRSYSCQVTHEGSTVEKTVAPTECSGSQSFGLLDPKLCYLLDGILFIYGVILTALFLRVKFSRSADAPAYQQGQNQLYNELNLGRREEYDVLDKRRGRDPEMGGKPRRKNPQEGLYNELQKDKMAEAYSEIGMKGERRRGKGHDGLYQGLSTATKDTYDALHMQALPPRRAKRSGSGATNFSLLKQAGDVEENPGPTSMDWIWRILFLVGAATGAHSFEQVQLQQPGAELVKPGASVKMSCKASGYAFSSYWINWMKQKPGQGLEWIGQIYPGDGDTNYNGKFKGRATLTADTSSSTAYMQLSSLTSEDSAVYFCARSITTVVGCAMDYWGQGTSVTVSSTRASTKGPSVFPLAPSSKSTSGGTAALGCLVKDYFPEPVTVSWNSGALTSGVHTFPAVLQSSGLYSLSSVVTVPSSSLGTQTYICNVNHKPSNTKVDKRVEPKSCGTQSFGLLDPKLCYLLDGILFIYGVILTALFLKRGRKKLLYIFKQPFMRPVQTTQEEDGCSCRFPEEEEGGCEL

SEQ ID NO: 2433 - protein, 746 aa, synthetic construct
MALPVTALLLPLALLLHAARPDIQMTQSPSSLSASVGDRVTITCKASDHINNWLAWYQQKPGQAPKLLIYGATTLETGVPSRFSGSGSGTDYTLTISSLQPEDFATYYCQQSWNTPWTFGQGTKLEIKRLEDLKNVFPPEVAVFEPSEAEISHTQKATLVCLATGFYPDHVELSWWVNGKEVHSGVSTDPQPLKEQPALNDSRYCLSSRLRVSATFWQNPRNHFRCQVQFYGLSENDEWTQDRAKPVTQIVSAEAWGRADCGSQSFGLLDPKLCYLLDGILFIYGVILTALFLRVKFSRSADAPAYQQGQNQLYNELNLGRREEYDVLDKRRGRDPEMGGKPRRKNPQEGLYNELQKDKMAEAYSEIGMKGERRRGKGHDGLYQGLSTATKDTYDALHMQALPPRRAKRSGSGATNFSLLKQAGDVEENPGPTSMDWIWRILFLVGAATGAHSFEQVQLQQPGAELVKPGASVKMSCKASGYAFSSYWINWMKQKPGQGLEWIGQIYPGDGDTNYNGKFKGRATLTADTSSSTAYMQLSSLTSEDSAVYFCARSITTVVGCAMDYWGQGTSVTVSSTRIQNPDPAVYQLRDSKSSDKSVCLFTDFDSQTNVSQSKDSDVYITDKTVLDMRSMDFKSNSAVAWSNKSDFACANAFNNSIIPEDTFFPSPESSCGTQSFGLLDPKLCYLLDGILFIYGVILTALFLKRGRKKLLYIFKQPFMRPVQTTQEEDGCSCRFPEEEEGGCEL

SEQ ID NO: 2434 - protein, 783 aa, synthetic construct
MALPVTALLLPLALLLHAARPDIQMTQSPSSLSASVGDRVTITCKASDHINNWLAWYQQKPGQAPKLLIYGATTLETGVPSRFSGSGSGTDYTLTISSLQPEDFATYYCQQSWNTPWTFGQGTKLEIKRLEDLKNVFPPEVAVFEPSEAEISHTQKATLVCLATGFYPDHVELSWWVNGKEVHSGVSTDPQPLKEQPALNDSRYCLSSRLRVSATFWQNPRNHFRCQVQFYGLSENDEWTQDRAKPVTQIVSAEAWGRADCGSQSFGLLDPKLCYLLDGILFIYGVILTALFLRVKFSRSADAPAYQQGQNQLYNELNLGRREEYDVLDKRRGRDPEMGGKPRRKNPQEGLYNELQKDKMAEAYSEIGMKGERRRGKGHDGLYQGLSTATKDTYDALHMQALPPRRAKRSGSGATNFSLLKQAGDVEENPGPTSMDWIWRILFLVGAATGAHSFEQVQLQQPGAELVKPGASVKMSCKASGYAFSSYWINWMKQKPGQGLEWIGQIYPGDGDTNYNGKFKGRATLTADTSSSTAYMQLSSLTSEDSAVYFCARSITTVVGCAMDYWGQGTSVTVSSTRIQNPDPAVYQLRDSKSSDKSVCLFTDFDSQTNVSQSKDSDVYITDKTVLDMRSMDFKSNSAVAWSNKSDFACANAFNNSIIPEDTFFPSPESSCGTQSFGLLDPKLCYLLDGILFIYGVILTALFLRSKRSRLLHSDYMNMTPRRPGPTRKHYQPYAPPRDFAAYRSNLEAPVPVSGQSAHRPQSPRSWGEGSAIEPVPREGGAG

SEQ ID NO: 2435 - protein, 769 aa, synthetic construct
MALPVTALLLPLALLLHAARPDIQMTQSPSSLSASVGDRVTITCKASDHINNWLAWYQQKPGQAPKLLIYGATTLETGVPSRFSGSGSGTDYTLTISSLQPEDFATYYCQQSWNTPWTFGQGTKLEIKRLEGQPKANPTVTLFPPSSEELQANKATLVCLISDFYPGAVTVAWKADGSPVKAGVETTKPSKQSNNKYAASSYLSLTPEQWKSHRSYSCQVTHEGSTVEKTVAPTECSGSQSFGLLDPKLCYLLDGILFIYGVILTALFLRVKFSRSADAPAYQQGQNQLYNELNLGRREEYDVLDKRRGRDPEMGGKPQRRKNPQEGLYNELQKDKMAEAYSEIGMKGERRRGKGHDGLYQGLSTATKDTYDALHMQALPPRRAKRSGSGATNFSLLKQAGDVEENPGPTSMDWIWRILFLVGAATGAHSFEQVQLQQPGAELVKPGASVKMSCKASGYAFSSYWINWMKQKPGQGLEWIGQIYPGDGDTNYNGKFKGRATLTADTSSSTAYMQLSSLTSEDSAVYFCARSITTVVGCAMDYWGQGTSVTVSSTRASTKGPSVFPLAPSSKSTSGGTAALGCLVKDYFPEPVTVSWNSGALTSGVHTFPAVLQSSGLYSLSSVVTVPSSSLGTQTYICNVNHKPSNTKVDKRVEPKSCGTQSFGLLDPKLCYLLDGILFIYGVILTALFLRSKRSRLLHSDYMNMTPRRPGPTRKHYQPYAPPRDFAAYRSNLEAPVPVSGQSAHRPQSPRSWGEGSAIEPVPREGGAG

SEQ ID NO: 2436 - protein, 769 aa, synthetic construct
MALPVTALLLPLALLLHAARPDIQMTQSPSSLSASVGDRVTITCKASDHINNWLAWYQQKPGQAPKLLIYGATTLETGVPSRFSGSGSGTDYTLTISSLQPEDFATYYCQQSWNTPWTFGQGTKLEIKRLEGQPKANPTVTLFPPSSEELQANKATLVCLISDFYPGAVTVAWKADGSPVKAGVETTKPSKQSNNKYAASSYLSLTPEQWKSHRSYSCQVTHEGSTVEKTVAPTECSGSQSFGLLDPKLCYLLDGILFIYGVILTALFLRVKFSRSADAPAYQQGQNQLYNELNLGRREEYDVLDKRRGRDPEMGGKPQRRKNPQEGLYNELQKDKMAEAYSEIGMKGERRRGKGHDGLYQGLSTATKDTYDALHMQALPPRRAKRSGSGATNFSLLKQAGDVEENPGPTSMDWIWRILFLVGAATGAHSFEQVQLQQPGAELVKPGASVKMSCKASGYAFSSYWINWMKQKPGQGLEWIGQIYPGDGDTNYNGKFKGRATLTADTSSSTAYMQLSSLTSEDSAVYFCARSITTVVGCAMDYWGQGTSVTVSSTRASTKGPSVFPLAPCSRSTSESTAALGCLVKDYFPEPVTVSWNSGALTSGVHTFPAVLQSSGLYSLSSVVTVPSSSLGTKTYTCNVDHKPSNTKVDKRVESKYGGTQSFGLLDPKLCYLLDGILFIYGVILTALFLRSKRSRLLHSDYMNMTPRRPGPTRKHYQPYAPPRDFAAYRSNLEAPVPVSGQSAHRPQSPRSWGEGSAIEPVPREGGAG

SEQ ID NO: 2437 - protein, 952 aa, synthetic construct
MALPVTALLLPLALLLHAARPDIQMTQSPSSLSASVGDRVTITCKASDHINNWLAWYQQKPGQAPKLLIYGATTLETGVPSRFSGSGSGTDYTLTISSLQPEDFATYYCQQSWNTPWTFGQGTKLEIKRLEDLKNVFPPEVAVFEPSEAEISHTQKATLVCLATGFYPDHVELSWWVNGKEVHSGVSTDPQPLKEQPALNDSRYCLSSRLRVSATFWQNPRNHFRCQVQFYGLSENDEWTQDRAKPVTQIVSAEAWGRADCGSQSFGLLDPKLCYLLDGILFIYGVILTALFLRVKFSRSADAPAYQQGQNQLYNELNLGRREEYDVLDKRRGRDPEMGGKPRRKNPQEGLYNELQKDKMAEAYSEIGMKGERRRGKGHDGLYQGLSTATKDTYDALHMQALPPRRAKRSGSGATNFSLLKQAGDVEENPGPTSATMDWIWRILFLVGAATGAHSGPEVQLVESGGGLVQAGGSLRLSCAASGRTFSMGWFRQAPGKEREFVAAITYSGGSPYYADSVKGRFTISRDNAKNTVYLQMNSLKPEDTAVYYCAANPTYGSDWNAENWGQGTQVTVSSGSGGGGSGGGGSGGGGSFEQVQLQQPGAELVKPGASVKMSCKASGYAFSSYWINWMKQKPGQGLEWIGQIYPGDGDTNYNGKFKGRATLTADTSSSTAYMQLSSLTSEDSAVYFCARSITTVVGCAMDYWGQGTSVTVSSTRIQNPDPAVYQLRDSKSSDKSVCLFTDFDSQTNVSQSKDSDVYITDKTVLDMRSMDFKSNSAVAWSNKSDFACANAFNNSIIPEDTFFPSPESSCGTITQGLAVSTISSFFPPGYQVSFCLVMVLLFAVDTGLYFSVKRGRKKLLYIFKQPFMRPVQTTQEEDGCSCRFPEEEEGGCELRAKRSGSGVKQTLNFDLLKLAGDVESNPGPSRGSGARQWAERTSPTVPEKLGGGVGN

SEQ ID NO: 2438 - protein, 743 aa, synthetic construct
MALPVTALLLPLALLLHAARPDIQMTQSPSSLSASVGDRVTITCKASDHINNWLAWYQQKPGQAPKLLIYGATTLETGVPSRFSGSGSGTDYTLTISSLQPEDFATYYCQQSWNTPWTFGQGTKLEIKRLEGQPKANPTVTLFPPSSEELQANKATLVCLISDFYPGAVTVAWKADGSPVKAGVETTKPSKQSNNKYAASSYLSLTPEQWKSHRSYSCQVTHEGSTVEKTVAPTECSGSQSFGLLDPKLCYLLDGILFIYGVILTALFLRVKFSRSADAPAYQQGQNQLYNELNLGRREEYDVLDKRRGRDPEMGGKPRRKNPQEGLYNELQKDKMAEAYSEIGMKGERRRGKGHDGLYQGLSTATKDTYDALHMQALPPRRAKRSGSGATNFSLLKQAGDVEENPGPTSATMDWIWRILFLVGAATGAHSARSEDRYRNPKFEVQLVESGGGLVQPGGSLRLSCAASGYAFSNYWVNWVRQAPGKGLEWVAQIYPGDGDTNYNGKFKGRFTISRDNSKNTLYLQMNSLRAEDTAVYYCARSITTVVGCAMDYWGQGTLVTVSSTRASTKGPSVFPLAPSSKSTSGGTAALGCLVKDYFPEPVTVSWNSGALTSGVHTFPAVLQSSGLYSLSSVVTVPSSSLGTQTYICNVNHKPSNTKVDKRVEPKSCGTQSFGLLDPKLCYLLDGILFIYGVILTALFLKRGRKKLLYIFKQPFMRPVQTTQEEDGCSCRFPEEEEGGCEL

SEQ ID NO: 2439 - protein, 734 aa, synthetic construct
MALPVTALLLPLALLLHAARPDIQMTQSPSSLSASVGDRVTITCKASDHINNWLAWYQQKPGQAPKLLIYGATTLETGVPSRFSGSGSGTDYTLTISSLQPEDFATYYCQQSWNTPWTFGQGTKLEIKRLEGQPKANPTVTLFPPSSEELQANKATLVCLISDFYPGAVTVAWKADGSPVKAGVETTKPSKQSNNKYAASSYLSLTPEQWKSHRSYSCQVTHEGSTVEKTVAPTECSGSQSFGLLDPKLCYLLDGILFIYGVILTALFLRVKFSRSADAPAYQQGQNQLYNELNLGRREEYDVLDKRRGRDPEMGGKPRRKNPQEGLYNELQKDKMAEAYSEIGMKGERRRGKGHDGLYQGLSTATKDTYDALHMQALPPRRAKRSGSGATNFSLLKQAGDVEENPGPTSATMDWIWRILFLVGAATGAHSARSEDRYRNPKFEVQLVESGGGLVQPGGSLRLSCAASGYAFSNYWVNWVRQAPGKGLEWVAQIYPGDGDTNYNGKFKGRFTISRDNSKNTLYLQMNSLRAEDTAVYYCARSITTVVGCAMDYWGQGTLVTVSSTRIQNPDPAVYQLRDSKSSDKSVCLFTDFDSQTNVSQSKDSDVYITDKTVLDMRSMDFKSNSAVAWSNKSDFACANAFNNSIIPEDTFFPSPESSCGTQSFGLLDPKLCYLLDGILFIYGVILTALFLKRGRKKLLYIFKQPFMRPVQTTQEEDGCSCRFPEEEEGGCEL

SEQ ID NO: 2440 - protein, 739 aa, synthetic construct
MALPVTALLLPLALLLHAARPDIQMTQSPSSLSASVGDRVTITCKASDHINNWLAWYQQKPGQAPKLLIYGATTLETGVPSRFSGSGSGTDYTLTISSLQPEDFATYYCQQSWNTPWTFGQGTKLEIKRLEGQPKANPTVTLFPPSSEELQANKATLVCLISDFYPGAVTVAWKADGSPVKAGVETTKPSKQSNNKYAASSYLSLTPEQWKSHRSYSCQVTHEGSTVEKTVAPTECSGSQSFGLLDPKLCYLLDGILFIYGVILTALFLRVKFSRSADAPAYQQGQNQLYNELNLGRREEYDVLDKRRGRDPEMGGKPRRKNPQEGLYNELQKDKMAEAYSEIGMKGERRRGKGHDGLYQGLSTATKDTYDALHMQALPPRRAKRSGSGATNFSLLKQAGDVEENPGPTSATMDWIWRILFLVGAATGAHSARSEDRYRNPKFEVQLVESGGGLVQPGGSLRLSCAASGYAFSNYWVNWVRQAPGKGLEWVAQIYPGDGDTNYNGKFKGRFTISRDNSKNTLYLQMNSLRAEDTAVYYCARSITTVVGCAMDYWGQGTLVTVSSTRIQNPDPAVYQLRDSKSSDKSVCLFTDFDSQTNVSQSKDSDVYITDKTVLDMRSMDFKSNSAVAWSNKSDFACANAFNNSIIPEDTFFPSPESSCGTQSFGLLDPKLCYLLDGILFIYGVILTALFLRSKRSRLLHSDYMNMTPRRPGPTRKHYQPYAPPRDFAAYRSNLEGVD

SEQ ID NO: 2441 - protein, 748 aa, synthetic construct
MALPVTALLLPLALLLHAARPDIQMTQSPSSLSASVGDRVTITCKASDHINNWLAWYQQKPGQAPKLLIYGATTLETGVPSRFSGSGSGTDYTLTISSLQPEDFATYYCQQSWNTPWTFGQGTKLEIKRLEGQPKANPTVTLFPPSSEELQANKATLVCLISDFYPGAVTVAWKADGSPVKAGVETTKPSKQSNNKYAASSYLSLTPEQWKSHRSYSCQVTHEGSTVEKTVAPTECSGSQSFGLLDPKLCYLLDGILFIYGVILTALFLRVKFSRSADAPAYQQGQNQLYNELNLGRREEYDVLDKRRGRDPEMGGKPRRKNPQEGLYNELQKDKMAEAYSEIGMKGERRRGKGHDGLYQGLSTATKDTYDALHMQALPPRRAKRSGSGATNFSLLKQAGDVEENPGPTSATMDWIWRILFLVGAATGAHSARSEDRYRNPKFEVQLVESGGGLVQPGGSLRLSCAASGYAFSNYWVNWVRQAPGKGLEWVAQIYPGDGDTNYNGKFKGRFTISRDNSKNTLYLQMNSLRAEDTAVYYCARSITTVVGCAMDYWGQGTLVTVSSTRASTKGPSVFPLAPSSKSTSGGTAALGCLVKDYFPEPVTVSWNSGALTSGVHTFPAVLQSSGLYSLSSVVTVPSSSLGTQTYICNVNHKPSNTKVDKRVEPKSCGTQSFGLLDPKLCYLLDGILFIYGVILTALFLRSKRSRLLHSDYMNMTPRRPGPTRKHYQPYAPPRDFAAYRSNLEGVD

SEQ ID NO: 2442 - protein, 658 aa, synthetic construct; identical to SEQ ID NO: 2398

SEQ ID NO: 2443 - protein, 648 aa, synthetic construct
MALPVTALLLPLALLLHAARPARSEDRYRNPKEFDIVMTQSPDSLAVSLGERATINCKSSQSLLNSGNQKNYLAWYQQKPGQPPKLLIYWGSTRSTGVPDRFSGSGSGTDFTLTISSLQAEDVAVYYCQNDYTYPFTFGQGTKLEIKLEDLKNVFPPEVAVFEPSEAEISHTQKATLVCLATGFYPDHVELSWWVNGKEVHSGVCTDPQPLKEQPALNDSRYCLSSRLRVSATFWQNPRNHFRCQVQFYGLSENDEWTQDRAKPVTQIVSAEAWGRADCGFTSESYQQGVLSATILYEILLGKATLYAVLVSALVLMAMVKRKDSRGRAKRSGSGATNFSLLKQAGDVEENPGPTSMDWIWRILFLVGAATGAHSFEQVQLVQSGAEVKKPGASVKVSCKASGYTFTSFWLNWVRQAPGQGLEWMGNIYPSDSYTVYNQKFKDRVTMTRDTSTSTVYMELSSLRSEDTAVYYCARTWRGNSFDYWGQGTTVTVSSTRARSEDRYRNPKIQNPDPAVYQLRDSKSSDKSVCLFTDFDSQTNVSQSKDSDVYITDKCVLDMRSMDFKSNSAVAWSNKSDFACANAFNNSIIPEDTFFPSPESSCDVKLVEKSFETDTNLNFQNLSVIGFRILLLKVAGFNLLMTLRLWSS

SEQ ID NO: 2444 - protein, 641 aa, synthetic construct; identical to SEQ ID NO: 2399

SEQ ID NO: 2445 - protein, 622 aa, synthetic construct; identical to SEQ ID NO: 2294

SEQ ID NO: 2446 - protein, 739 aa, synthetic construct
MALPVTALLLPLALLLHAARPDDIVMTQSPDSLAVSLGERATINCKASQSVDYDGDSFLNWYQQKPGQPPKLLIYAASNLESGVPSRFSGSGSGTDFTLTISSLQPEDVAVYYCQQSNDDPLTFGQGTKVEIKLEDLKNVFPPEVAVFEPSEAEISHTQKATLVCLATGFYPDHVELSWWVNGKEVHSGVSTDPQPLKEQPALNDSRYCLSSRLRVSATFWQNPRNHFRCQVQFYGLSENDEWTQDRAKPVTQIVSAEAWGRADCGSQSFGLLDPKLCYLLDGILFIYGVILTALFLRVKFSRSADAPAYQQGQNQLYNELNLGRREEYDVLDKRRGRDPEMGGKPRRKNPQEGLYNELQKDKMAEAYSEIGMKGERRRGKGHDGLYQGLSTATKDTYDALHMQALPPRRAKRSGSGATNFSLLKQAGDVEENPGPTSMDWIWRILFLVGAATGAHSFEEVQLVESGGGLVQPGGSLRLSCAASGYTFTSYWIEWVRQAPGKGLEWIGEILPGGGDTNYNEIFKGRATFSADTSKNTAYLQMNSLRAEDTAVYYCTRRVPIRLDYWGQGTLVTVSSTRIQNPDPAVYQLRDSKSSDKSVCLFTDFDSQTNVSQSKDSDVYITDKTVLDMRSMDFKSNSAVAWSNKSDFACANAFNNSIIPEDTFFPSPESSCGTITQGLAVSTISSFFPPGYQVSFCLVMVLLFAVDTGLYFSVKTNIRSSTRDWKDHKFKWRKDPQDK

SEQ ID NO: 2447 - protein, 213 aa, synthetic construct
MALPVTALLLPLALLLHAARPEVQLVESGGGSVQAGGSLRLSCAASGYTYSINCMGWFRQAPGKEREGVAAISTGGGRTDYRDSVKGRFTISQDNAKNTVYLQMNSLKPEDTAMYYCAGKTTYPGYGCGLGRSAYNYWGQGTQVTVSSTRARSEDRYRNPKGGGGSELPTQGTFSNVSTNVSPAKPTTTACARSEDRYRNPKARGRQLEPPSV

SEQ ID NO: 2448 - protein, 623 aa, synthetic construct
MALPVTALLLPLALLLHAARPDIQLTQSPSSLSASVGDRVTITCKASQSVDYEGDSFLNWYQQKPGKAPKLLIYAASNLESGVPSRFSGSGSGTDFTLTISSLQPEDFATYYCQQSNEDPLTFGQGTKVEIKRLEDLKNVFPPEVAVFEPSEAEISHTQKATLVCLATGFYPDHVELSWWVNGKEVHSGVCTDPQPLKEQPALNDSRYCLSSRLRVSATFWQNPRNHFRCQVQFYGLSENDEWTQDRAKPVTQIVSAEAWGRADCGFTSESYQQGVLSAYYMYLLLLLKSVVYFAIITCCLLRRTAFCCNGEKSRAKRSGSGATNFSLLKQAGDVEENPGPTSMDWIWRILFLVGAATGAHSFEEVQLVESGGGLVQPGGSLRLSCAASGYTFSSYWIEWVRQAPGKGLEWIGEILPGGGDTNYNEIFKGRATFSADTSKNTAYLQMNSLRAEDTAVYYCTRRVPIRLDYWGQGTLVTVSSTRIQNPDPAVYQLRDSKSSDKSVCLFTDFDSQTNVSQSKDSDVYITDKCVLDMRSMDFKSNSAVAWSNKSDFACANAFNNSIIPEDTFFPSPESSCDVKLVEKSFETDTNLNFQNLSVIGFRILLLKVAGFNLLMTLRLWSS

SEQ ID NO: 2449 - protein, 490 aa, synthetic construct; identical to SEQ ID NO: 2301

SEQ ID NO: 2450 - protein, 762 aa, synthetic construct
MALPVTALLLPLALLLHAARPDIQMTQSPSSLSASVGDRVTITCKASDHINNWLAWYQQKPGKAPKLLIYGATTLETGVPSRFSGSGSGTDFTLTISSLQPEDFATYYCQQSWNTPWTFGQGTKVEIKRLEDLKNVFPPEVAVFEPSEAEISHTQKATLVCLATGFYPDHVELSWWVNGKEVHSGVCTDPQPLKEQPALNDSRYCLSSRLRVSATFWQNPRNHFRCQVQFYGLSENDEWTQDRAKPVTQIVSAEAWGRADCGFTSESYQQGVLSATILYEILLGKATLYAVLVSALVLMAMVKRKDSRGRAKRSGSGATNFSLLKQAGDVEENPGPTSATMDWIWRILFLVGAATGAHSGPQVQLQESGPGLVKPSQTLSLTCTVSGGSITTGEFYWNWFRQPPGKGLEWMGAIAASGSTTYSPSFESRTSISRDTSKNQFSLKLSSVTAADTAVYYCGRSFGVAAVTTGQNRGQGTLVTVSSGSARSEDRYRNPKGSFEVQLVESGGGLVQPGGSLRLSCAASGYAFSSYWVNWVRQAPGKGLEWVAQIYPGDGDTNYNGKFKGRFTISRDNSKNTLYLQMNSLRAEDTAVYYCARSITTVVGCAMDYWGQGTLVTVSSTRIQNPDPAVYQLRDSKSSDKSVCLFTDFDSQTNVSQSKDSDVYITDKCVLDMRSMDFKSNSAVAWSNKSDFACANAFNNSIIPEDTFFPSPESSCDVKLVEKSFETDTNLNFQNLSVIGFRILLLKVAGFNLLMTLRLWSS

SEQ ID NO: 2451 - protein, 1029 aa, synthetic construct
MALPVTALLLPLALLLHAARPDIQMTQSPSSLSASVGDRVTITCKASDHINNWLAWYQQKPGQAPKLLIYGATTLETGVPSRFSGSGSGTDYTLTISSLQPEDFATYYCQQSWNTPWTFGQGTKLEIKRLEDLKNVFPPEVAVFEPSEAEISHTQKATLVCLATGFYPDHVELSWWVNGKEVHSGVCTDPQPLKEQPALNDSRYCLSSRLRVSATFWQNPRNHFRCQVQFYGLSENDEWTQDRAKPVTQIVSAEAWGRADCGFTSESYQQGVLSAYYMYLLLLLKSVVYFAIITCCLLRRTAFCCNGEKSRAKRSGSGATNFSLLKQAGDVEENPGPTSATMDWIWRILFLVGAATGAHSGPQVQLQESGPGLVKPSQTLSLTCTVSGGSITTGEFYWNWFRQPPGKGLEWMGAIAASGSTTYSPSFESRTSISRDTSKNQFSLKLSSVTAADTAVYYCGRSFGVAAVTTGQNRGQGTLVTVSSGSGGGGSGGGGSGGGGSFEQVQLQQPGAELVKPGASVKMSCKASGYAFSSYWINWMKQKPGQGLEWIGQIYPGDGDTNYNGKFKGRATLTADTSSSTAYMQLSSLTSEDSAVYFCARSITTVVGCAMDYWGQGTSVTVSSTRIQNPDPAVYQLRDSKSSDKSVCLFTDFDSQTNVSQSKDSDVYITDKCVLDMRSMDFKSNSAVAWSNKSDFACANAFNNSIIPEDTFFPSPESSCDVKLVEKSFETDTNLNFQNLSVIGFRILLLKVAGFNLLMTLRLWSSRAKRSGSGVKQTLNFDLLKLAGDVESNPGPSRMARLALSPVSSHWLVALLLLLSAAEPVPAAKSEDLYPNPKGSACSRIWQSPRFIARKRGFTVKMHCYVTNSTFSIVSWLRKRETDKEPQQVNLEQGHMHQTQNSSVTTLIIQDIRFEDNGIYFCQQECSKTSEVYRGCGTELRVMGFSTLAQLKQRNTLKDGIIMIQTLLIILFIIVPIFLLLDKDDSKAGMEEDHTYEGLDIDQTATYEDIVTLRTGEVKWSVGEHPGQE

SEQ ID NO: 2452 - protein, 751 aa, synthetic construct
MALPVTALLLPLALLLHAARPDIQMTQSPSSLSASVGDRVTITCKASDHINNWLAWYQQKPGQAPKLLIYGATTLETGVPSRFSGSGSGTDYTLTISSLQPEDFATYYCQQSWNTPWTFGQGTKLEIKRGGGGSGGGGSGGGGSQVQLQQPGAELVKPGASVKMSCKASGYAFSSYWINWMKQKPGQGLEWIGQIYPGDGDTNYNGKFKGRATLTADTSSSTAYMQLSSLTSEDSAVYFCARSITTVVGCAMDYWGQGTSVTVSSTRTTTPAPRPPTPAPTIASQPLSLRPEACRPAAGGAVHTRGLDFACDIYIWAPLAGTCGVLLLSLVITLYCKRGRKKLLYIFKQPFMRPVQTTQEEDGCSCRFPEEEEGGCELRVKFSRSADAPAYQQGQNQLYNELNLGRREEYDVLDKRRGRDPEMGGKPRRKNPQEGLYNELQKDKMAEAYSEIGMKGERRRGKGHDGLYQGLSTATKDTYDALHMQALPPRSRAKRSGSGATNFSLLKQAGDVEENPGPGIHTMARLALSPVPSHWMVALLLLLSAEPVPAARSEDRYRNPKGSACSRIWQSPRFIARKRGFTVKMHCYMNSASGNVSWLWKQEMDENPQQLKLEKGRMEESQNESLATLTIQGIRFEDNGIYFCQQKCNNTSEVYQGCGTELRVMGFSTLAQLKQRNTLKDGIIMIQTLLIILFIIVPIFLLLDKDDSKAGMEEDHTYEGLDIDQTATYEDIVTLRTGEVKWSVGEHPGQE

SEQ ID NO: 2453 - protein, 615 aa, synthetic construct
MALPVTALLLPLALLLHAARPDIQMTQSPSSLSASVGDRVTITCKASQDVGTAVDWYQQKPGKAPKLLIYWASTRHTGVPSRFSGSGSGTDFTLTISSLQPEDFATYYCQQYNSYPLTFGQGTKVEIKRLEDLKNVFPPEVAVFEPSEAEISHTQKATLVCLATGFYPDHVELSWWVNGKEVHSGVCTDPQPLKEQPALNDSRYCLSSRLRVSATFWQNPRNHFRCQVQFYGLSENDEWTQDRAKPVTQIVSAEAWGRADCGFTSESYQQGVLSATILYEILLGKATLYAVLVSALVLMAMVKRKDSRGRAKRSGSGATNFSLLKQAGDVEENPGPTSMDWIWRILFLVGAATGAHSFEVQLVESGGGLVQPGGSLRLSCAASGYTFTEYTIHWVRQAPGKGLEWVANINPNNGGTTYNQKFEDRFTISRDNSKNTLYLQMNSLRAEDTAVYYCARGWNFDYWGQGTLVTVSSTRIQNPDPAVYQLRDSKSSDKSVCLFTDFDSQTNVSQSKDSDVYITDKCVLDMRSMDFKSNSAVAWSNKSDFACANAFNNSIIPEDTFFPSPESSCDVKLVEKSFETDTNLNFQNLSVIGFRILLLKVAGFNLLMTLRLWSS

SEQ ID NO: 2454 - protein, 615 aa, synthetic construct; identical to SEQ ID NO: 2453

SEQ ID NO: 2455 - protein, 954 aa, synthetic construct
MALPVTALLLPLALLLHAARPDIQMTQSPSSLSASVGDRVTITCKASDHINNWLAWYQQKPGQAPKLLIYGATTLETGVPSRFSGSGSGTDYTLTISSLQPEDFATYYCQQSWNTPWTFGQGTKLEIKRLEDLKNVFPPEVAVFEPSEAEISHTQKATLVCLATGFYPDHVELSWWVNGKEVHSGVCTDPQPLKEQPALNDSRYCLSSRLRVSATFWQNPRNHFRCQVQFYGLSENDEWTQDRAKPVTQIVSAEAWGRADCGFTSESYQQGVLSAYYMYLLLLLKSVVYFAIITCCLLRRTAFCCNGEKSRAKRSGSGATNFSLLKQAGDVEENPGPTSATMDWIWRILFLVGAATGAHSGPQVQLQESGPGLVKPSQTLSLTCTVSGGSITTGEFYWNWFRQPPGKGLEWMGAIAASGSTTYSPSFESRTSISRDTSKNQFSLKLSSVTAADTAVYYCGRSFGVAAVTTGQNRGQGTLVTVSSGSGGGGSGGGGSGGGGSFEQVQLQQPGAELVKPGASVKMSCKASGYAFSSYWINWMKQKPGQGLEWIGQIYPGDGDTNYNGKFKGRATLTADTSSSTAYMQLSSLTSEDSAVYFCARSITTVVGCAMDYWGQGTSVTVSSTRIQNPDPAVYQLRDSKSSDKSVCLFTDFDSQTNVSQSKDSDVYITDKCVLDMRSMDFKSNSAVAWSNKSDFACANAFNNSIIPEDTFFPSPESSCDVKLVEKSFETDTNLNFQNLSVIGFRILLLKVAGFNLLMTLRLWSSRAKRSGSGVKQTLNFDLLKLAGDVESNPGPSRMALPVTALLLPLALLLHAARPARPAKSEDLYPNPKELPTQGTFSNVSTNVSPAKPTTTACAKSEDLYPNPKGGSPAPRPPTPAPTIASQPLSLRPEACRPAAGGAVHTRGLDFACDIYIWAPLAGTCGVLLLSLVITLYCNHRNRRRVCKCPRPVV

SEQ ID NO: 2456 - protein, 1073 aa, synthetic construct
MALPVTALLLPLALLLHAARPDIQMTQSPSSLSASVGDRVTITCKASQDVGTAVDWYQQKPGKAPKLLIYWASTRHTGVPSRFSGSGSGTDFTLTISSLQPEDFATYYCQQYNSYPLTFGQGTKVEIKRLEDLKNVFPPEVAVFEPSEAEISHTQKATLVCLATGFYPDHVELSWWVNGKEVHSGVSTDPQPLKEQPALNDSRYCLSSRLRVSATFWQNPRNHFRCQVQFYGLSENDEWTQDRAKPVTQIVSAEAWGRADCGSQSFGLLDPKLCYLLDGILFIYGVILTALFLRVKFSRSADAPAYQQGQNQLYNELNLGRREEYDVLDKRRGRDPEMGGKPQRRKNPQEGLYNELQKDKMAEAYSEIGMKGERRRGKGHDGLYQGLSTATKDTYDALHMQALPPRRAKRSGSGATNFSLLKQAGDVEENPGPTSMDWIWRILFLVGAATGAHSFEVQLVESGGGLVQPGGSLRLSCAASGYTFTEYTIHWVRQAPGKGLEWVANINPNNGGTTYNQKFEDRFTISRDNSKNTLYLQMNSLRAEDTAVYYCARGWNFDYWGQGTLVTVSSTRIQNPDPAVYQLRDSKSSDKSVCLFTDFDSQTNVSQSKDSDVYITDKTVLDMRSMDFKSNSAVAWSNKSDFACANAFNNSIIPEDTFFPSPESSCGTQSFGLLDPKLCYLLDGILFIYGVILTALFLRVKFSRSADAPAYQQGQNQLYNELNLGRREEYDVLDKRRGRDPEMGGKPRRKNPQEGLYNELQKDKMAEAYSEIGMKGERRRGKGHDGLYQGLSTATKDTYDALHMQALPPRRAKRSGSGVKQTLNFDLLKLAGDVESNPGPSRMARLALSPVSSHWLVALLLLLSAAEPVPAAKSEDLYPNPKGSACSRIWQSPRFIARKRGFTVKMHCYVTNSTFSIVSWLRKRETDKEPQQVNLEQGHMHQTQNSSVTTLIIQDIRFEDNGIYFCQQECSKTSEVYRGCGTELRVMGFSTLAQLKQRNTLKDGIIMIQTLLIILFIIVPIFLLLDKDDSKAGMEEDHTYEGLDIDQTATYEDIVTLRTGEVKWSVGEHPGQE

SEQ ID NO: 2457 - protein, 998 aa, synthetic construct
MALPVTALLLPLALLLHAARPDIQMTQSPSSLSASVGDRVTITCKASQDVGTAVDWYQQKPGKAPKLLIYWASTRHTGVPSRFSGSGSGTDFTLTISSLQPEDFATYYCQQYNSYPLTFGQGTKVEIKRLEDLKNVFPPEVAVFEPSEAEISHTQKATLVCLATGFYPDHVELSWWVNGKEVHSGVSTDPQPLKEQPALNDSRYCLSSRLRVSATFWQNPRNHFRCQVQFYGLSENDEWTQDRAKPVTQIVSAEAWGRADCGSQSFGLLDPKLCYLLDGILFIYGVILTALFLRVKFSRSADAPAYQQGQNQLYNELNLGRREEYDVLDKRRGRDPEMGGKPQRRKNPQEGLYNELQKDKMAEAYSEIGMKGERRRGKGHDGLYQGLSTATKDTYDALHMQALPPRRAKRSGSGATNFSLLKQAGDVEENPGPTSMDWIWRILFLVGAATGAHSFEVQLVESGGGLVQPGGSLRLSCAASGYTFTEYTIHWVRQAPGKGLEWVANINPNNGGTTYNQKFEDRFTISRDNSKNTLYLQMNSLRAEDTAVYYCARGWNFDYWGQGTLVTVSSTRIQNPDPAVYQLRDSKSSDKSVCLFTDFDSQTNVSQSKDSDVYITDKTVLDMRSMDFKSNSAVAWSNKSDFACANAFNNSIIPEDTFFPSPESSCGTQSFGLLDPKLCYLLDGILFIYGVILTALFLRVKFSRSADAPAYQQGQNQLYNELNLGRREEYDVLDKRRGRDPEMGGKPRRKNPQEGLYNELQKDKMAEAYSEIGMKGERRRGKGHDGLYQGLSTATKDTYDALHMQALPPRRAKRSGSGVKQTLNFDLLKLAGDVESNPGPSRMALPVTALLLPLALLLHAARPARPAKSEDLYPNPKELPTQGTFSNVSTNVSPAKPTTTACAKSEDLYPNPKGGSPAPRPPTPAPTIASQPLSLRPEACRPAAGGAVHTRGLDFACDIYIWAPLAGTCGVLLLSLVITLYCNHRNRRRVCKCPRPVV

SEQ ID NO: 2458 - protein, 862 aa, synthetic construct
MALPVTALLLPLALLLHAARPSYVLTQPPSVSVAPGQTARITCGGNNIGGKSVHWYQQPPGQAPVVVVYDDSDRPSGIPERFSGSNSGNTATLTISRVEAGDEAVYYCQVWDSSSDHVVFGGGTKLTVLLEDLKNVFPPEVAVFEPSEAEISHTQKATLVCLATGFYPDHVELSWWVNGKEVHSGVCTDPQPLKEQPALNDSRYCLSSRLRVSATFWQNPRNHFRCQVQFYGLSENDEWTQDRAKPVTQIVSAEAWGRADCGFTSESYQQGVLSAYYMYLLLLLKSVVYFAIITCCLLRRTAFCCNGEKSRAKRSGSGATNFSLLKQAGDVEENPGPTSMDWIWRILFLVGAATGAHSFEQLQLQESGPGLVKPSETLSLTCTVSGGSISSSSYFWGWIRQPPGKGLEWIGSIYYSGITYYNPSLKSRVTISVDTSKNQFSLKLSSVTAADTAVYYCARHDGAVAGLFDYWGQGTLVTVSSATRIQNPDPAVYQLRDSKSSDKSVCLFTDFDSQTNVSQSKDSDVYITDKCVLDMRSMDFKSNSAVAWSNKSDFACANAFNNSIIPEDTFFPSSDVPCDVKLVEKSFETDTNLNFQNLSVIGFRILLLKVAGFNLLMTLRLWSSRAKRSGSGVKQTLNFDLLKLAGDVESNPGPSRMYRMQLLSCIALSLALVTNSNWVNVISDLKKIEDLIQSMHIDATLYTESDVHPSCKVTAMKCFLLELQVISLESGDASIHDTVKNLIILANNSLSSNGNVTESGCKECEELEEKNIKEFLQSFVHIVQMFINTSKIEVMYPPPYLDNEKSNGTIIHVKGKHLCPSPLFPGPSKPFWVLVVVGGVLACYSLLVTVAFIIFWVRSKRS

SEQ ID NO: 2459 - protein, 709 aa, synthetic construct
MALPVTALLLPLALLLHAARPDIQMTQSPSSLSASVGDRVTITCKASDHINNWLAWYQQKPGQAPKLLIYGATTLETGVPSRFSGSGSGTDYTLTISSLQPEDFATYYCQQSWNTPWTFGQGTKLEIKRLEIQNPDPAVYQLRDSKSSDKSVCLFTDFDSQTNVSQSKDSDVYITDKCVLDMRSMDFKSNSAVAWSNKSDFACANAFNNSIIPEDTFFPSSDVPCDVKLVEKSFETDTNLNFQNLSVIGFRILLLKVAGFNLLMTLRLWSSRAKRSGSGVKQTLNFDLLKLAGDVESNPGPTSATMALPVTALLLPLALLLHAARPARSEDRYRNPKGSACKGGGGSELPTQGTFSNVSTNVSPAKPTTTACARSEDRYRNPKGSACSGSGGGGSGGGGSGGGGSFEQVQLQQPGAELVKPGASVKMSCKASGYAFSSYWINWMKQKPGQGLEWIGQIYPGDGDTNYNGKFKGRATLTADTSSSTAYMQLSSLTSEDSAVYFCARSITTVVGCAMDYWGQGTSVTVSSTREDLKNVFPPEVAVFEPSKAEIAHTQKATLVCLATGFYPDHVELSWWVNGKEVHSGVCTDPQPLKEQPALNDSRYCLSSRLRVSATFWQNPRNHFRCQVQFYGLSENDEWTQDRAKPVTQIVSAEAWGRADCGITSASYHQGVLSATILYEILLGKATLYAVLVSALVLMAMVKRKDSRG

SEQ ID NO: 2460 - protein, 658 aa, synthetic construct; identical to SEQ ID NO: 2345

SEQ ID NO: 2461 - protein, 1062 aa, synthetic construct
MALPVTALLLPLALLLHAARPDIQMTQSPSSLSASVGDRVTITCKASDHINNWLAWYQQKPGQAPKLLIYGATTLETGVPSRFSGSGSGTDYTLTISSLQPEDFATYYCQQSWNTPWTFGQGTKLEIKRLEDLKNVFPPEVAVFEPSEAEISHTQKATLVCLATGFYPDHVELSWWVNGKEVHSGVSTDPQPLKEQPALNDSRYCLSSRLRVSATFWQNPRNHFRCQVQFYGLSENDEWTQDRAKPVTQIVSAEAWGRADCGSQSFGLLDPKLCYLLDGILFIYGVILTALFLRVKFSRSADAPAYQQGQNQLYNELNLGRREEYDVLDKRRGRDPEMGGKPRRKNPQEGLYNELQKDKMAEAYSEIGMKGERRRGKGHDGLYQGLSTATKDTYDALHMQALPPRRAKRSGSGATNFSLLKQAGDVEENPGPTSMDWIWRILFLVGAATGAHSFEQVQLQQPGAELVKPGASVKMSCKASGYAFSSYWINWMKQKPGQGLEWIGQIYPGDGDTNYNGKFKGRATLTADTSSSTAYMQLSSLTSEDSAVYFCARSITTVVGCAMDYWGQGTSVTVSSTRIQNPDPAVYQLRDSKSSDKSVCLFTDFDSQTNVSQSKDSDVYITDKTVLDMRSMDFKSNSAVAWSNKSDFACANAFNNSIIPEDTFFPSPESSCGTQSFGLLDPKLCYLLDGILFIYGVILTALFLRVKFSRSADAPAYQQGQNQLYNELNLGRREEYDVLDKRRGRDPEMGGKPRRKNPQEGLYNELQKDKMAEAYSEIGMKGERRRGKGHDGLYQGLSTATKDTYDALHMQALPPRRAKRSGSGVKQTLNFDLLKLAGDVESNPGPSRMRISKPHLRSISIQCYLCLLLNSHFLTEAGIHVFILGCFSAGLPKTEANWVNVISDLKKIEDLIQSMHIDATLYTESDVHPSCKVTAMKCFLLELQVISLESGDASIHDTVENLIILANNSLSSNGNVTESGCKECEELEEKNIKEFLQSFVHIVQMFINTSARSEDRYRNPKGFSTLAQLKQRNTLKDGIIMIQTLLIILFIIVPIFLLLDKD

SEQ ID NO: 2462 - protein, 869 aa, synthetic construct
MALPVTALLLPLALLLHAARPSYVLTQPPSVSVAPGQTARITCGGNNIGGKSVHWYQQPPGQAPVVVVYDDSDRPSGIPERFSGSNSGNTATLTISRVEAGDEAVYYCQVWDSSSDHVVFGGGTKLTVLLEDLKNVFPPEVAVFEPSKAEIAHTQKATLVCLATGFYPDHVELSWWVNGKEVHSGVCTDPQPLKEQPALNDSRYCLSSRLRVSATFWQNPRNHFRCQVQFYGLSENDEWTQDRAKPVTQIVSAEAWGRADCGITSASYHQGVLSATILYEILLGKATLYAVLVSALVLMAMVKRKDSRGRAKRSGSGATNFSLLKQAGDVEENPGPTSMDWIWRILFLVGAATGAHSFEQLQLQESGPGLVKPSETLSLTCTVSGGSISSSSYFWGWIRQPPGKGLEWIGSIYYSGITYYNPSLKSRVTISVDTSKNQFSLKLSSVTAADTAVYYCARHDGAVAGLFDYWGQGTLVTVSSATRIQNPDPAVYQLRDSKSSDKSVCLFTDFDSQTNVSQSKDSDVYITDKCVLDMRSMDFKSNSAVAWSNKSDFACANAFNNSIIPEDTFFPSSDVPCDVKLVEKSFETDTNLNFQNLSVIGFRILLLKVAGFNLLMTLRLWSSRAKRSGSGVKQTLNFDLLKLAGDVESNPGPSRMRISKPHLRSISIQCYLCLLLNSHFLTEAGIHVFILGCFSAGLPKTEANWVNVISDLKKIEDLIQSMHIDATLYTESDVHPSCKVTAMKCFLLELQVISLESGDASIHDTVENLIILANNSLSSNGNVTESGCKECEELEEKNIKEFLQSFVHIVQMFINTSARSEDRYRNPKGFSTLAQLKQRNTLKDGIIMIQTLLIILFIIVPIFLLLDKD

SEQ ID NO: 2463 - protein, 663 aa, synthetic construct
MALPVTALLLPLALLLHAARPDIVMTQSPDSLAVSLGERATINCKSSQSLLNSGNQKNYLAWYQQKPGQPPKLLIYWGSTRSTGVPDRFSGSGSGTDFTLTISSLQAEDVAVYYCQNDYTYPFTFGQGTKLEIKLEIQNPDPAVYQLRDSKSSDKSVCLFTDFDSQTNVSQSKDSDVYITDKCVLDMRSMDFKSNSAVAWSNKSDFACANAFNNSIIPEDTFFPSPESSCDVKLVEKSFETDTNLNFQNLSVIGFRILLLKVAGFNLLMTLRLWSSSSRAKRSGSGVKQTLNFDLLKLAGDVESNPGPTSATMDWIWRILFLVGAATGAHSGPARSEDRYRNPKGSGGGGSGGGGSGGGGSFEQVQLVQSGAEVKKPGASVKVSCKASGYTFTSFWLNWVRQAPGQGLEWMGNIYPSTSYTVYNQKFKDRVTMTRDTSTSTVYMELSSLRSEDTAVYYCARTWRGNSFDYWGQGTTVTVSSTREDLKNVFPPEVAVFEPSEAEISHTQKATLVCLATGFYPDHVELSWWVNGKEVHSGVCTDPQPLKEQPALNDSRYCLSSRLRVSATFWQNPRNHFRCQVQFYGLSENDEWTQDRAKPVTQIVSAEAWGRADCGFTSESYQQGVLSAYYMYLLLLLKSVVYFAIITCCLLRRTAFCCNGEKS

SEQ ID NO: 2464 - protein, 624 aa, synthetic construct
MALPVTALLLPLALLLHAARPSYVLTQPPSVSVAPGQTARITCGGNNIGGKSVHWYQQPPGQAPVVVVYDDSDRPSGIPERFSGSNSGNTATLTISRVEAGDEAVYYCQVWDSSSDHVVFGGGTKLTVLLEDLKNVFPPEVAVFEPSEAEISHTQKATLVCLATGFYPDHVELSWWVNGKEVHSGVCTDPQPLKEQPALNDSRYCLSSRLRVSATFWQNPRNHFRCQVQFYGLSENDEWTQDRAKPVTQIVSAEAWGRADCGFTSESYQQGVLSAYYMYLLLLLKSVVYFAIITCCLLRRTAFCCNGEKSRAKRSGSGATNFSLLKQAGDVEENPGPTSMDWIWRILFLVGAATGAHSFEQLQLQESGPGLVKPSETLSLTCTVSGGSISSSSYFWGWIRQPPGKGLEWIGSIYYSGITYYNPSLKSRVTISVDTSKNQFSLKLSSVTAADTAVYYCARHDGAVAGLFDYWGQGTLVTVSSATRIQNPDPAVYQLRDSKSSDKSVCLFTDFDSQTNVSQSKDSDVYITDKCVLDMRSMDFKSNSAVAWSNKSDFACANAFNNSIIPEDTFFPSPESSCDVKLVEKSFETDTNLNFQNLSVIGFRILLLKVAGFNLLMTLRLWSS

SEQ ID NO: 2465 - protein, 624 aa, synthetic construct
MALPVTALLLPLALLLHAARPSYVLTQPPSVSVAPGQTARITCGGNNIGSKSVHWYQQPPGQAPVVVVYDDSDRPSGIPERFSGSNSGNTATLTISRVEAGDEAVYYCQVWDSSSDHVVFGGGTKLTVLLEDLKNVFPPEVAVFEPSEAEISHTQKATLVCLATGFYPDHVELSWWVNGKEVHSGVCTDPQPLKEQPALNDSRYCLSSRLRVSATFWQNPRNHFRCQVQFYGLSENDEWTQDRAKPVTQIVSAEAWGRADCGFTSESYQQGVLSAYYMYLLLLLKSVVYFAIITCCLLRRTAFCCNGEKSRAKRSGSGATNFSLLKQAGDVEENPGPTSMDWIWRILFLVGAATGAHSFEQLQLQESGPGLVKPSETLSLTCTVSGGSISSGSYFWGWIRQPPGKGLEWIGSIYYSGITYYNPSLKSRVTISVDTSKNQFSLKLSSVTAADTAVYYCARHDGAVAGLFDYWGQGTLVTVSSATRIQNPDPAVYQLRDSKSSDKSVCLFTDFDSQTNVSQSKDSDVYITDKCVLDMRSMDFKSNSAVAWSNKSDFACANAFNNSIIPEDTFFPSPESSCDVKLVEKSFETDTNLNFQNLSVIGFRILLLKVAGFNLLMTLRLWSS

SEQ ID NO: 2466 - protein, 887 aa, synthetic construct
MALPVTALLLPLALLLHAARPDIQMTQSPSSLSASVGDRVTITCKASDHINNWLAWYQQKPGQAPKLLIYGATTLETGVPSRFSGSGSGTDYTLTISSLQPEDFATYYCQQSWNTPWTFGQGTKLEIKRLEDLKNVFPPEVAVFEPSEAEISHTQKATLVCLATGFYPDHVELSWWVNGKEVHSGVCTDPQPLKEQPALNDSRYCLSSRLRVSATFWQNPRNHFRCQVQFYGLSENDEWTQDRAKPVTQIVSAEAWGRADCGFTSESYQQGVLSATILYEILLGKATLYAVLVSALVLMAMVKRKDSRGRAKRSGSGATNFSLLKQAGDVEENPGPTSATMDWIWRILFLVGAATGAHSGPARSEDRYRNRTGSGGGGSGGGGSGGGGSFEQVQLQQPGAELVKPGASVKMSCKASGYAFSSYWINWMKQKPGQGLEWIGQIYPGDGDTNYNGKFKGRATLTADTSSSTAYMQLSSLTSEDSAVYFCARSITTVVGCAMDYWGQGTSVTVSSTRIQNPDPAVYQLRDSKSSDKSVCLFTDFDSQTNVSQSKDSDVYITDKCVLDMRSMDFKSNSAVAWSNKSDFACANAFNNSIIPEDTFFPSPESSCDVKLVEKSFETDTNLNFQNLSVIGFRILLLKVAGFNLLMTLRLWSSRAKRSGSGVKQTLNFDLLKLAGDVESNPGPSRGHMTEYKPTVRLATRDDVPRAVRTLAAAFADYPATRHTVDPDRHIERVTELQELFLTRVGLDIGKVWVADDGAAVAVWTTPESVEAGAVFAEIGPRMAELSGSRLAAQQQMEGLLAPHRPKEPAWFLATVGVSPDHQGKGLGSAVVLPGVEAAERAGVPAFLETSAPRNLPFYERLGFTVTADVEVPEGPRTWCMTRKPGA

SEQ ID NO: 2467 - protein, 722 aa, synthetic construct
MALPVTALLLPLALLLHAARPDIQMTQSPSSLSASVGDRVTITCKASDHINNWLAWYQQKPGQAPKLLIYGATTLETGVPSRFSGSGSGTDYTLTISSLQPEDFATYYCQQSWNTPWTFGQGTKLEIKRLEGQPKANPTVTLFPPSSEELQANKATLVCLISDFYPGAVTVAWKADGSPVKAGVETTKPSKQSNNKYAASSYLSLTPEQWKSHRSYSCQVTHEGSTVEKTVAPTECSGSQSFGLLDPKLCYLLDGILFIYGVILTALFLRVKFSRSADAPAYQQGQNQLYNELNLGRREEYDVLDKRRGRDPEMGGKPRRKNPQEGLYNELQKDKMAEAYSEIGMKGERRRGKGHDGLYQGLSTATKDTYDALHMQALPPRRAKRSGSGATNFSLLKQAGDVEENPGPTSMDWIWRILFLVGAATGAHSFEQVQLQQPGAELVKPGASVKMSCKASGYAFSSYWINWMKQKPGQGLEWIGQIYPGDGDTNYNGKFKGRATLTADTSSSTAYMQLSSLTSEDSAVYFCARSITTVVGCAMDYWGQGTSVTVSSTRIQNPDPAVYQLRDSKSSDKSVCLFTDFDSQTNVSQSKDSDVYITDKTVLDMRSMDFKSNSAVAWSNKSDFACANAFNNSIIPEDTFFPSPESSCGTQSFGLLDPKLCYLLDGILFIYGVILTALFLKRGRKKLLYIFKQPFMRPVQTTQEEDGCSCRFPEEEEGGCEL

SEQ ID NO: 2468 - protein, 974 aa, synthetic construct
MALPVTALLLPLALLLHAARPSYVLTQPPSVSVAPGQTARITCGGNNIGGKSVHWYQQPPGQAPVVVVYDDSDRPSGIPERFSGSNSGNTATLTISRVEAGDEAVYYCQVWDSSSDHVVFGGGTKLTVLLEDLKNVFPPEVAVFEPSEAEISHTQKATLVCLATGFYPDHVELSWWVNGKEVHSGVSTDPQPLKEQPALNDSRYCLSSRLRVSATFWQNPRNHFRCQVQFYGLSENDEWTQDRAKPVTQIVSAEAWGRADCGSQSFGLLDPKLCYLLDGILFIYGVILTALFLRVKFSRSADAPAYQQGQNQLYNELNLGRREEYDVLDKRRGRDPEMGGKPRRKNPQEGLYNELQKDKMAEAYSEIGMKGERRRGKGHDGLYQGLSTATKDTYDALHMQALPPRRAKRSGSGATNFSLLKQAGDVEENPGPTSMDWIWRILFLVGAATGAHSFEQLQLQESGPGLVKPSETLSLTCTVSGGSISSSSYFWGWIRQPPGKGLEWIGSIYYSGITYYNPSLKSRVTISVDTSKNQFSLKLSSVTAADTAVYYCARHDGAVAGLFDYWGQGTLVTVSSATRIQNPDPAVYQLRDSKSSDKSVCLFTDFDSQTNVSQSKDSDVYITDKTVLDMRSMDFKSNSAVAWSNKSDFACANAFNNSIIPEDTFFPSPESSCGTITQGLAVSTISSFFPPGYQVSFCLVMVLLFAVDTGLYFSVKTNIRSSTRDWKDHKFKWRKDPQDKKRGRKKLLYIFKQPFMRPVQTTQEEDGCSCRFPEEEEGGCELRAKRSGSGVKQTLNFDLLKLAGDVESNPGPSRMALPVTALLLPLALLLHAARPARSEDRYRNPKGSGGSELPTQGTFSNVSTNVSPAKPTTTACARSEDRYRNPKGSGGSPAPRPPTPAPTIASQPLSLRPEACRPAAGGAVHTRGLDFACDIYIWAPLAGTCGVLLLSLVITLYCNHRNRRRVCKCPRPVV

SEQ ID NO: 2469 - protein, 624 aa, synthetic construct
MALPVTALLLPLALLLHAARPDDIQLTQSPSSLSASVGDRVTITCKASQSVDYEGDSFLNWYQQKPGKAPKLLIYAASNLESGVPSRFSGSGSGTDFTLTISSLQPEDFATYYCQQSNEDPLTFGQGTKVEIKRLEDLKNVFPPEVAVFEPSEAEISHTQKATLVCLATGFYPDHVELSWWVNGKEVHSGVCTDPQPLKEQPALNDSRYCLSSRLRVSATFWQNPRNHFRCQVQFYGLSENDEWTQDRAKPVTQIVSAEAWGRADCGFTSESYQQGVLSAYYMYLLLLLKSVVYFAIITCCLLRRTAFCCNGEKSRAKRSGSGATNFSLLKQAGDVEENPGPTSMDWIWRILFLVGAATGAHSFEEVQLVESGGGLVQPGGSLRLSCAASGYTFSSYWIEWVRQAPGKGLEWIGEILPGGGDTNYNEIFKGRATFSADTSKNTAYLQMNSLRAEDTAVYYCTRRVPIRLDYWGQGTLVTVSSTRIQNPDPAVYQLRDSKSSDKSVCLFTDFDSQTNVSQSKDSDVYITDKCVLDMRSMDFKSNSAVAWSNKSDFACANAFNNSIIPEDTFFPSPESSCDVKLVEKSFETDTNLNFQNLSVIGFRILLLKVAGFNLLMTLRLWSS

SEQ ID NO: 2470 - protein, 744 aa, synthetic construct
MALPVTALLLPLALLLHAARPDIQMTQSPSSLSASVGDRVTITCKASDHINNWLAWYQQKPGQAPKLLIYGATTLETGVPSRFSGSGSGTDYTLTISSLQPEDFATYYCQQSWNTPWTFGQGTKLEIKRGGGGSGGGGSGGGGSQVQLQQPGAELVKPGASVKMSCKASGYAFSSYWINWMKQKPGQGLEWIGQIYPGDGDTNYNGKFKGRATLTADTSSSTAYMQLSSLTSEDSAVYFCARSITTVVGCAMDYWGQGTSVTVSSTRTTTPAPRPPTPAPTIASQPLSLRPEACRPAAGGAVHTRGLDFACDIYIWAPLAGTCGVLLLSLVITLYCKRGRKKLLYIFKQPFMRPVQTTQEEDGCSCRFPEEEEGGCELRVKFSRSADAPAYQQGQNQLYNELNLGRREEYDVLDKRRGRDPEMGGKPRRKNPQEGLYNELQKDKMAEAYSEIGMKGERRRGKGHDGLYQGLSTATKDTYDALHMQALPPRSRAKRSGSGATNFSLLKQAGDVEENPGPGIHTMYRMQLLSCIALSLALVTNSARSEDRYRNPKGSGGSNWVNVISDLKKIEDLIQSMHIDATLYTESDVHPSCKVTAMKCFLLELQVISLESGDASIHDTVKNLIILANNSLSSNGNVTESGCKECEELEEKNIKEFLQSFVHIVQMFINTSKIEVMYPPPYLDNEKSNGTIIHVKGKHLCPSPLFPGPSKPFWVLVVVGGVLACYSLLVTVAFIIFWVRSKRS

SEQ ID NO: 2471 - protein, 692 aa, synthetic construct
MALPVTALLLPLALLLHAARPDIQMTQSPSSLSASVGDRVTITCKASDHINNWLAWYQQKPGQAPKLLIYGATTLETGVPSRFSGSGSGTDYTLTISSLQPEDFATYYCQQSWNTPWTFGQGTKLEIKRGGGGSGGGGSGGGGSQVQLQQPGAELVKPGASVKMSCKASGYAFSSYWINWMKQKPGQGLEWIGQIYPGDGDTNYNGKFKGRATLTADTSSSTAYMQLSSLTSEDSAVYFCARSITTVVGCAMDYWGQGTSVTVSSTRTTTPAPRPPTPAPTIASQPLSLRPEACRPAAGGAVHTRGLDFACDIYIWAPLAGTCGVLLLSLVITLYCKRGRKKLLYIFKQPFMRPVQTTQEEDGCSCRFPEEEEGGCELRVKFSRSADAPAYQQGQNQLYNELNLGRREEYDVLDKRRGRDPEMGGKPRRKNPQEGLYNELQKDKMAEAYSEIGMKGERRRGKGHDGLYQGLSTATKDTYDALHMQALPPRSRAKRSGSGATNFSLLKQAGDVEENPGPGIHTMYRMQTFKFYMPKKATELKHLQCLEEELKPLEEVLNLAQSKNFHLRPRDLISNINVIVLELKGSETTFMCEYADETATIVEFLNRWITFCQSIISTLTAKPTTTPAPRPPTPAPTIASQPLSLRPEACRPAAGGAVHTRGLDFACDIYIWAPLAGTCGVLLLSLVITLYC

SEQ ID NO: 2472 - protein, 692 aa, synthetic construct
MALPVTALLLPLALLLHAARPDIQMTQSPSSLSASVGDRVTITCKASDHINNWLAWYQQKPGQAPKLLIYGATTLETGVPSRFSGSGSGTDYTLTISSLQPEDFATYYCQQSWNTPWTFGQGTKLEIKRGGGGSGGGGSGGGGSQVQLQQPGAELVKPGASVKMSCKASGYAFSSYWINWMKQKPGQGLEWIGQIYPGDGDTNYNGKFKGRATLTADTSSSTAYMQLSSLTSEDSAVYFCARSITTVVGCAMDYWGQGTSVTVSSTRTTTPAPRPPTPAPTIASQPLSLRPEACRPAAGGAVHTRGLDFACDIYIWAPLAGTCGVLLLSLVITLYCKRGRKKLLYIFKQPFMRPVQTTQEEDGCSCRFPEEEEGGCELRVKFSRSADAPAYQQGQNQLYNELNLGRREEYDVLDKRRGRDPEMGGKPRRKNPQEGLYNELQKDKMAEAYSEIGMKGERRRGKGHDGLYQGLSTATKDTYDALHMQALPPRSRAKRSGSGATNFSLLKQAGDVEENPGPGIHTMYRMLTFKFYMPKKATELKHLQCLEEELKPLEEVLNLAQSKNFHLRPRDLISNINVIVLELKGSETTFMCEYADETATIVEFLNRWITFCQSIISTLTAKPTTTPAPRPPTPAPTIASQPLSLRPEACRPAAGGAVHTRGLDFACDIYIWAPLAGTCGVLLLSLVITLYC

SEQ ID NO: 2473 - protein, 615 aa, synthetic construct; identical to SEQ ID NO: 2453

SEQ ID NO: 2474 - protein, 222 aa, synthetic construct; identical to SEQ ID NO: 680

SEQ ID NO: 2475 - protein, 615 aa, synthetic construct; identical to SEQ ID NO: 2453

SEQ ID NO: 2476 - protein, 241 aa, synthetic construct; identical to SEQ ID NO: 684

SEQ ID NO: 2477 - protein, 484 aa, synthetic construct
MALPVTALLLPLALLLHAARPDIQMTQSPSSLSASVGDRVTITCKASQDVGTAVDWYQQKPGKAPKLLIYWASTRHTGVPSRFSGSGSGTDFTLTISSLQPEDFATYYCQQYNSYPLTFGQGTKVEIKRGGGGSGGGGSGGGGSEVQLVESGGGLVQPGGSLRLSCAASGYTFTEYTIHWVRQAPGKGLEWVANINPNNGGTTYNQKFEDRFTISRDNSKNTLYLQMNSLRAEDTAVYYCARGWNFDYWGQGTLVTVSSTRTTTPAPRPPTPAPTIASQPLSLRPEACRPAAGGAVHTRGLDFACDIYIWAPLAGTCGVLLLSLVITLYCKRGRKKLLYIFKQPFMRPVQTTQEEDGCSCRFPEEEEGGCELRVKFSRSADAPAYQQGQNQLYNELNLGRREEYDVLDKRRGRDPEMGGKPRRKNPQEGLYNELQKDKMAEAYSEIGMKGERRRGKGHDGLYQGLSTATKDTYDALHMQALPPR

SEQ ID NO: 2478 - protein, 222 aa, synthetic construct; identical to SEQ ID NO: 680

SEQ ID NO: 2479 - protein, 785 aa, synthetic construct
MALPVTALLLPLALLLHAARPDIQMTQSPSSLSASVGDRVTITCKASDHINNWLAWYQQKPGQAPKLLIYGATTLETGVPSRFSGSGSGTDYTLTISSLQPEDFATYYCQQSWNTPWTFGQGTKLEIKRGGGGSGGGGSGGGGSQVQLQQPGAELVKPGASVKMSCKASGYAFSSYWINWMKQKPGQGLEWIGQIYPGDGDTNYNGKFKGRATLTADTSSSTAYMQLSSLTSEDSAVYFCARSITTVVGCAMDYWGQGTSVTVSSTRTTTPAPRPPTPAPTIASQPLSLRPEACRPAAGGAVHTRGLDFACDIYIWAPLAGTCGVLLLSLVITLYCKRGRKKLLYIFKQPFMRPVQTTQEEDGCSCRFPEEEEGGCELRVKFSRSADAPAYQQGQNQLYNELNLGRREEYDVLDKRRGRDPEMGGKPRRKNPQEGLYNELQKDKMAEAYSEIGMKGERRRGKGHDGLYQGLSTATKDTYDALHMQALPPRSRAKRSGSGATNFSLLKQAGDVEENPGPGIHTMYRMQLLSCIALSLALVTNSNWVNVISDLKKIEDLIQSMHIDATLYTESDVHPSCKVTAMKCFLLELQVISLESGDASIHDTVENLIILANNSLSSNGNVTESGCKECEELEEKNIKEFLQSFVHIVQMFINTSARSEDRYRNPKGSGGSELPTQGTFSNVSTNVSPAKPTTTACARSEDRYRNPKGSGGSKIEVMYPPPYLDNEKSNGTIIHVKGKHLCPSPLFPGPSKPFWVLVVVGGVLACYSLLVTVAFIIFWVRSKRS

SEQ ID NO: 2480 - protein, 744 aa, synthetic construct
MALPVTALLLPLALLLHAARPDIQMTQSPSSLSASVGDRVTITCKASDHINNWLAWYQQKPGQAPKLLIYGATTLETGVPSRFSGSGSGTDYTLTISSLQPEDFATYYCQQSWNTPWTFGQGTKLEIKRGGGGSGGGGSGGGGSQVQLQQPGAELVKPGASVKMSCKASGYAFSSYWINWMKQKPGQGLEWIGQIYPGDGDTNYNGKFKGRATLTADTSSSTAYMQLSSLTSEDSAVYFCARSITTVVGCAMDYWGQGTSVTVSSTRTTTPAPRPPTPAPTIASQPLSLRPEACRPAAGGAVHTRGLDFACDIYIWAPLAGTCGVLLLSLVITLYCKRGRKKLLYIFKQPFMRPVQTTQEEDGCSCRFPEEEEGGCELRVKFSRSADAPAYQQGQNQLYNELNLGRREEYDVLDKRRGRDPEMGGKPRRKNPQEGLYNELQKDKMAEAYSEIGMKGERRRGKGHDGLYQGLSTATKDTYDALHMQALPPRSRAKRSGSGATNFSLLKQAGDVEENPGPGIHTMYRMQLLSCIALSLALVTNSNWVNVISDLKKIEDLIQSMHIDATLYTESDVHPSCKVTAMKCFLLELQVISLESGDASIHDTVENLIILANNSLSSNGNVTESGCKECEELEEKNIKEFLQSFVHIVQMFINTSARSEDRYRNPKGSGGSKIEVMYPPPYLDNEKSNGTIIHVKGKHLCPSPLFPGPSKPFWVLVVVGGVLACYSLLVTVAFIIFWVRSKRS

SEQ ID NO: 2481 - protein, 484 aa, synthetic construct; identical to SEQ ID NO: 2477

SEQ ID NO: 2482 - protein, 263 aa, synthetic construct; identical to SEQ ID NO: 682

SEQ ID NO: 2483 - protein, 615 aa, synthetic construct; identical to SEQ ID NO: 2453

SEQ ID NO: 2484 - protein, 263 aa, synthetic construct; identical to SEQ ID NO: 682

SEQ ID NO: 2485 - protein, 484 aa, synthetic construct; identical to SEQ ID NO: 2477

SEQ ID NO: 2486 - protein, 222 aa, synthetic construct; identical to SEQ ID NO: 683

SEQ ID NO: 2487 - protein, 615 aa, synthetic construct; identical to SEQ ID NO: 2453

SEQ ID NO: 2488 - protein, 1056 aa, synthetic construct
MALPVTALLLPLALLLHAARPDIQMTQSPSSLSASVGDRVTITCKASQDVGTAVDWYQQKPGKAPKLLIYWASTRHTGVPSRFSGSGSGTDFTLTISSLQPEDFATYYCQQYNSYPLTFGQGTKVEIKRLEDLKNVFPPEVAVFEPSEAEISHTQKATLVCLATGFYPDHVELSWWVNGKEVHSGVSTDPQPLKEQPALNDSRYCLSSRLRVSATFWQNPRNHFRCQVQFYGLSENDEWTQDRAKPVTQIVSAEAWGRADCGSQSFGLLDPKLCYLLDGILFIYGVILTALFLRVKFSRSADAPAYQQGQNQLYNELNLGRREEYDVLDKRRGRDPEMGGKPQRRKNPQEGLYNELQKDKMAEAYSEIGMKGERRRGKGHDGLYQGLSTATKDTYDALHMQALPPRRAKRSGSGATNFSLLKQAGDVEENPGPTSMDWIWRILFLVGAATGAHSFEVQLVESGGGLVQPGGSLRLSCAASGYTFTEYTIHWVRQAPGKGLEWVANINPNNGGTTYNQKFEDRFTISRDNSKNTLYLQMNSLRAEDTAVYYCARGWNFDYWGQGTLVTVSSTRIQNPDPAVYQLRDSKSSDKSVCLFTDFDSQTNVSQSKDSDVYITDKTVLDMRSMDFKSNSAVAWSNKSDFACANAFNNSIIPEDTFFPSPESSCGTQSFGLLDPKLCYLLDGILFIYGVILTALFLRVKFSRSADAPAYQQGQNQLYNELNLGRREEYDVLDKRRGRDPEMGGKPRRKNPQEGLYNELQKDKMAEAYSEIGMKGERRRGKGHDGLYQGLSTATKDTYDALHMQALPPRRAKRSGSGVKQTLNFDLLKLAGDVESNPGPSRMRISKPHLRSISIQCYLCLLLNSHFLTEAGIHVFILGCFSAGLPKTEANWVNVISDLKKIEDLIQSMHIDATLYTESDVHPSCKVTAMKCFLLELQVISLESGDASIHDTVENLIILANNSLSSNGNVTESGCKECEELEEKNIKEFLQSFVHIVQMFINTSARSEDRYRNPKGFSTLAQLKQRNTLKDGIIMIQTLLIILFIIVPIFLLLDKD

SEQ ID NO: 2489 - protein, 1020 aa, synthetic construct
MALPVTALLLPLALLLHAARPDIQMTQSPSSLSASVGDRVTITCKASQDVGTAVDWYQQKPGKAPKLLIYWASTRHTGVPSRFSGSGSGTDFTLTISSLQPEDFATYYCQQYNSYPLTFGQGTKVEIKRLEDLKNVFPPEVAVFEPSEAEISHTQKATLVCLATGFYPDHVELSWWVNGKEVHSGVSTDPQPLKEQPALNDSRYCLSSRLRVSATFWQNPRNHFRCQVQFYGLSENDEWTQDRAKPVTQIVSAEAWGRADCGSQSFGLLDPKLCYLLDGILFIYGVILTALFLRVKFSRSADAPAYQQGQNQLYNELNLGRREEYDVLDKRRGRDPEMGGKPRRKNPQEGLYNELQKDKMAEAYSEIGMKGERRRGKGHDGLYQGLSTATKDTYDALHMQALPPRRAKRSGSGATNFSLLKQAGDVEENPGPTSMDWIWRILFLVGAATGAHSFEVQLVESGGGLVQPGGSLRLSCAASGYTFTEYTIHWVRQAPGKGLEWVANINPNNGGTTYNQKFEDRFTISRDNSKNTLYLQMNSLRAEDTAVYYCARGWNFDYWGQGTLVTVSSTRIQNPDPAVYQLRDSKSSDKSVCLFTDFDSQTNVSQSKDSDVYITDKTVLDMRSMDFKSNSAVAWSNKSDFACANAFNNSIIPEDTFFPSPESSCGTITQGLAVSTISSFFPPGYQVSFCLVMVLLFAVDTGLYFSVKTNIRSSTRDWKDHKFKWRKDPQDKKRGRKKLLYIFKQPFMRPVQTTQEEDGCSCRFPEEEEGGCELRAKRSGSGVKQTLNFDLLKLAGDVESNPGPSRMRISKPHLRSISIQCYLCLLLNSHFLTEAGIHVFILGCFSAGLPKTEANWVNVISDLKKIEDLIQSMHIDATLYTESDVHPSCKVTAMKCFLLELQVISLESGDASIHDTVENLIILANNSLSSNGNVTESGCKECEELEEKNIKEFLQSFVHIVQMFINTSARSEDRYRNPKGFSTLAQLKQRNTLKDGIIMIQTLLIILFIIVPIFLLLDKD

SEQ ID NO: 2490 - protein, 837 aa, synthetic construct
MALPVTALLLPLALLLHAARPDIQLTQSPSTLSASMGDRVTITCSASSSVRFIHWYQQKPGKAPKRLIYDTSKLASGVPSRFSGSGSGTDFTLTISSLQPEDFATYYCQQWGSSPFTFGQGTKVEIKLEDKQLDADVSPKPTIFLPSIAETKLQKAGTYLCLLEKFFPDVIKIHWQEKKSNTILGSQEGNTMKTNDTYMKFSWLTVPEKSLDKEHRCIVRHENNKNGVDQEIIFPPIKTDVITMDPKDNCSKDANDTLLLQLTNTSATILYEILLGKATLYAVLVSALVLMAMVKRKDSRGRAKRSGSGATNFSLLKQAGDVEENPGPTSMDWIWRILFLVGAATGAHSFEVQLVEYGGGLVQPGGSLRLSCAASGFNIKDYYIHWVRQAPGKGLEWVAWIDPENGDTEFVPKFQGRATMSADTSKNTAYLQMNSLRAEDTAVYYCKTGGFWGQGTLVTVSSTRIQNPDPAVYQLRDSKSSDKSVCLFTDFDSQTNVSQSKDSDVYITDKCVLDMRSMDFKSNSAVAWSNKSDFACANAFNNSIIPEDTFFPSPESSCDVKLVEKSFETDTNLNFQNLSVIGFRILLLKVAGFNLLMTLRLWSSRAKRSGSGVKQTLNFDLLKLAGDVESNPGPSRGHMTEYKPTVRLATRDDVPRAVRTLAAAFADYPATRHTVDPDRHIERVTELQELFLTRVGLDIGKVWVADDGAAVAVWTTPESVEAGAVFAEIGPRMAELSGSRLAAQQQMEGLLAPHRPKEPAWFLATVGVSPDHQGKGLGSAVVLPGVEAAERAGVPAFLETSAPRNLPFYERLGFTVTADVEVPEGPRTWCMTRKPGA

SEQ ID NO: 2491 - protein, 839 aa, synthetic construct
MALPVTALLLPLALLLHAARPDIQLTQSPSTLSASMGDRVTITCSASSSVRFIHWYQQKPGKAPKRLIYDTSKLASGVPSRFSGSGSGTDFTLTISSLQPEDFATYYCQQWGSSPFTFGQGTKVEIKLEGQPKANPTVTLFPPSSEELQANKATLVCLISDFYPGAVTVAWKADGSPVKAGVETTKPSKQSNNKYAASSYLSLTPEQWKSHRSYSCQVTHEGSTVEKTVAPTECSGSPIKTDVITMDPKDNCSKDANDTLLLQLTNTSAYYMYEILLGKATLYAVLVSALVLMAMVKRKDSRGRAKRSGSGATNFSLLKQAGDVEENPGPTSMDWIWRILFLVGAATGAHSFEVQLVEYGGGLVQPGGSLRLSCAASGFNIKDYYIHWVRQAPGKGLEWVAWIDPENGDTEFVPKFQGRATMSADTSKNTAYLQMNSLRAEDTAVYYCKTGGFWGQGTLVTVSSTRIQNPDPAVYQLRDSKSSDKSVCLFTDFDSQTNVSQSKDSDVYITDKCVLDMRSMDFKSNSAVAWSNKSDFACANAFNNSIIPEDTFFPSPESSCDVKLVEKSFETDTNLNFQNLSVIGFRILLLKVAGFNLLMTLRLWSSRAKRSGSGVKQTLNFDLLKLAGDVESNPGPSRGHMTEYKPTVRLATRDDVPRAVRTLAAAFADYPATRHTVDPDRHIERVTELQELFLTRVGLDIGKVWVADDGAAVAVWTTPESVEAGAVFAEIGPRMAELSGSRLAAQQQMEGLLAPHRPKEPAWFLATVGVSPDHQGKGLGSAVVLPGVEAAERAGVPAFLETSAPRNLPFYERLGFTVTADVEVPEGPRTWCMTRKPGA

SEQ ID NO: 2492 - protein, 839 aa, synthetic construct
MALPVTALLLPLALLLHAARPDIQLTQSPSTLSASMGDRVTITCSASSSVRFIHWYQQKPGKAPKRLIYDTSKLASGVPSRFSGSGSGTDFTLTISSLQPEDFATYYCQQWGSSPFTFGQGTKVEIKLEGQPKANPTVTLFPPSSEELQANKATLVCLISDFYPGAVTVAWKADGSPVKAGVETTKPSKQSNNKYAASSYLSLTPEQWKSHRSYSCQVTHEGSTVEKTVAPTECSGSPIKTDVITMDPKDNCSKDANDTLLLQLTNTSATILYEILLGKATLYAVLVSALVLMAMVKRKDSRGRAKRSGSGATNFSLLKQAGDVEENPGPTSMDWIWRILFLVGAATGAHSFEVQLVEYGGGLVQPGGSLRLSCAASGFNIKDYYIHWVRQAPGKGLEWVAWIDPENGDTEFVPKFQGRATMSADTSKNTAYLQMNSLRAEDTAVYYCKTGGFWGQGTLVTVSSTRIQNPDPAVYQLRDSKSSDKSVCLFTDFDSQTNVSQSKDSDVYITDKCVLDMRSMDFKSNSAVAWSNKSDFACANAFNNSIIPEDTFFPSPESSCDVKLVEKSFETDTNLNFQNLSVIGFRILLLKVAGFNLLMTLRLWSSRAKRSGSGVKQTLNFDLLKLAGDVESNPGPSRGHMTEYKPTVRLATRDDVPRAVRTLAAAFADYPATRHTVDPDRHIERVTELQELFLTRVGLDIGKVWVADDGAAVAVWTTPESVEAGAVFAEIGPRMAELSGSRLAAQQQMEGLLAPHRPKEPAWFLATVGVSPDHQGKGLGSAVVLPGVEAAERAGVPAFLETSAPRNLPFYERLGFTVTADVEVPEGPRTWCMTRKPGA

SEQ ID NO: 2493 - protein, 826 aa, synthetic construct
MALPVTALLLPLALLLHAARPDIQLTQSPSTLSASMGDRVTITCSASSSVRFIHWYQQKPGKAPKRLIYDTSKLASGVPSRFSGSGSGTDFTLTISSLQPEDFATYYCQQWGSSPFTFGQGTKVEIKLEGQPKANPTVTLFPPSSEELQANKATLVCLISDFYPGAVTVAWKADGSPVKAGVETTKPSKQSNNKYAASSYLSLTPEQWKSHRSYSCQVTHEGSTVEKTVAPTECSGSGRADCGFTSESYQQGVLSAYYMYLLLLLKSVVYFAIITCCLLMAMVKRKDSRGRAKRSGSGATNFSLLKQAGDVEENPGPTSMDWIWRILFLVGAATGAHSFEVQLVEYGGGLVQPGGSLRLSCAASGFNIKDYYIHWVRQAPGKGLEWVAWIDPENGDTEFVPKFQGRATMSADTSKNTAYLQMNSLRAEDTAVYYCKTGGFWGQGTLVTVSSTRIQNPDPAVYQLRDSKSSDKSVCLFTDFDSQTNVSQSKDSDVYITDKCVLDMRSMDFKSNSAVAWSNKSDFACANAFNNSIIPEDTFFPSPESSCDVKLVEKSFETDTNLNFQNLSVIGFRILLLKVAGFNLLMTLRLWSSRAKRSGSGVKQTLNFDLLKLAGDVESNPGPSRGHMTEYKPTVRLATRDDVPRAVRTLAAAFADYPATRHTVDPDRHIERVTELQELFLTRVGLDIGKVWVADDGAAVAVWTTPESVEAGAVFAEIGPRMAELSGSRLAAQQQMEGLLAPHRPKEPAWFLATVGVSPDHQGKGLGSAVVLPGVEAAERAGVPAFLETSAPRNLPFYERLGFTVTADVEVPEGPRTWCMTRKPGA

SEQ ID NO: 2494 - protein, 994 aa, synthetic construct
MALPVTALLLPLALLLHAARPACEVQLLESGGGLIQPGGSLRLSCAASGFTFSSHAMTWVRQAPGKGLEWVSAISGSGDYTHYADSVKGRFTISRDNSKNTVYLQMNSLRAEDSAVYYCAKDEDGGSLLGHRGQGTLVTVSSGTGGGGSGGGGSGGGGSEFDIQMTQSPSSLSASVGDRVTITCKASDHINNWLAWYQQKPGKAPKLLIYGATTLETGVPSRFSGSGSGTDFTLTISSLQPEDFATYYCQQSWNTPWTFGQGTKVEIKRLEDLKNVFPPEVAVFEPSEAEISHTQKATLVCLATGFYPDHVELSWWVNGKEVHSGVCTDPQPLKEQPALNDSRYCLSSRLRVSATFWQNPRNHFRCQVQFYGLSENDEWTQDRAKPVTQIVSAEAWGRADCGFTSESYQQGVLSATILYEILLGKATLYAVLVSALVLMAMVKRKDSRGRAKRSGSGATNFSLLKQAGDVEENPGPTSMDWIWRILFLVGAATGAHSFEVQLVESGGGLVQPGGSLRLSCAASGYAFSSYWVNWVRQAPGKGLEWVAQIYPGDGDTNYNGKFKGRFTISRDNSKNTLYLQMNSLRAEDTAVYYCARSITTVVGCAMDYWGQGTLVTVSSTRIQNPDPAVYQLRDSKSSDKSVCLFTDFDSQTNVSQSKDSDVYITDKCVLDMRSMDFKSNSAVAWSNKSDFACANAFNNSIIPEDTFFPSPESSCDVKLVEKSFETDTNLNFQNLSVIGFRILLLKVAGFNLLMTLRLWSSRAKRSGSGVKQTLNFDLLKLAGDVESNPGPSRGHMTEYKPTVRLATRDDVPRAVRTLAAAFADYPATRHTVDPDRHIERVTELQELFLTRVGLDIGKVWVADDGAAVAVWTTPESVEAGAVFAEIGPRMAELSGSRLAAQQQMEGLLAPHRPKEPAWFLATVGVSPDHQGKGLGSAVVLPGVEAAERAGVPAFLETSAPRNLPFYERLGFTVTADVEVPEGPRTWCMTRKPGA

SEQ ID NO: 2495 - protein, 1299 aa, synthetic construct
MALPVTALLLPLALLLHAARPDIQLTQSPSSLSASVGDRVTITCKASQSVDYDGDSFLNWYQQKPGKAPKLLIYAASNLESGVPSRFSGSGSGTDFTLTISSLQPEDFATYYCQQSNEDPLTFGQGTKVEIKRLEDLKNVFPPEVAVFEPSEAEISHTQKATLVCLATGFYPDHVELSWWVNGKEVHSGVCTDPQPLKEQPALNDSRYCLSSRLRVSATFWQNPRNHFRCQVQFYGLSENDEWTQDRAKPVTQIVSAEAWGRADCGFTSESYQQGVLSAYYMYLLLLLKSVVYFAIITCCLLRRTAFCCNGEKSRAKRSGSGATNFSLLKQAGDVEENPGPTSMDWIWRILFLVGAATGAHSFEEVQLVESGGGLVQPGGSLRLSCAASGYTFTSYWIEWVRQAPGKGLEWIGEILPGGGDTNYNEIFKGRATFSADTSKNTAYLQMNSLRAEDTAVYYCTRRVPIRLDYWGQGTLVTVSSTRPHTKPSVFVMKNGTNVACLVKEFYPKDIRINLVSSKKITEFDPAIVISPSGKYNAVKLGKYEDSNSVTCSVQHDNKTVHSTDFEVKTDSTDHVKPKETENTKQPSKSCHKPKAIVHTEKVNMMSLTVLGLRMLFAKTVAVNFLLTAKLFFLRAKRSGSGVKQTLNFDLLKLAGDVESNPGPSSTMALPVTALLLPLALLLHAARPQVQLQQSGPGLVKPSQTLSLTCAISGDSVSSNRAAWNWIRQSPSRGLQWLGRTYYRSKWYNDYAVSLRSRITINPVTSKNQVALHMNSVTPEDTAVYYCARAGIVVVPGPETFYYYDHGLDVWGQGTTVTVSSGGGGSGGGGSGGGGSDIQMTQSPSSLSASVGDRVTITCRASQSIRNYLNWYQQKPGKAPELLIHAASSLQSGVPSRFSGSGSGTDFTLTISSLQPEDFASYYCQQSYSAPPITFGQGTRLEIKTRARSEDRYRNPKGSACKGGGGSELPTQGTFSNVSTNVSPAKPTTTACARSEDRYRNPKGSACKLEGGSWSHPQFEKDYKDDDDKGSDYKDDDDKGSDYKDDDDKGSDYKDDDDKAWSHPQFEKHHHHHHHHTSGSGEGRGSLLTCGDVEENPGPHMTEYKPTVRLATRDDVPRAVRTLAAAFADYPATRHTVDPDRHIERVTELQELFLTRVGLDIGKVWVADDGAAVAVWTTPESVEAGAVFAEIGPRMAELSGSRLAAQQQMEGLLAPHRPKEPAWFLATVGVSPDHQGKGLGSAVVLPGVEAAERAGVPAFLETSAPRNLPFYERLGFTVTADVEVPEGPRTWCMTRKPGA

SEQ ID NO: 2496 - protein, 890 aa, synthetic construct
MALPVTALLLPLALLLHAARPDIQMTQSPSSLSASVGDRVTITCKASDHINNWLAWYQQKPGQAPKLLIYGATTLETGVPSRFSGSGSGTDYTLTISSLQPEDFATYYCQQSWNTPWTFGQGTKLEIKRLEDLKNVFPPEVAVFEPSEAEISHTQKATLVCLATGFYPDHVELSWWVNGKEVHSGVCTDPQPLKEQPALNDSRYCLSSRLRVSATFWQNPRNHFRCQVQFYGLSENDEWTQDRAKPVTQIVSAEAWGRADCGFTSESYQQGVLSATILYEILLGKATLYAVLVSALVLMAMVKRKDSRGRAKRSGSGATNFSLLKQAGDVEENPGPTSATMDWIWRILFLVGAATGAHSGPARPAKSEDLYPNPKGSGGGGSGGGGSGGGGSFEQVQLQQPGAELVKPGASVKMSCKASGYAFSSYWINWMKQKPGQGLEWIGQIYPGDGDTNYNGKFKGRATLTADTSSSTAYMQLSSLTSEDSAVYFCARSITTVVGCAMDYWGQGTSVTVSSTRIQNPDPAVYQLRDSKSSDKSVCLFTDFDSQTNVSQSKDSDVYITDKCVLDMRSMDFKSNSAVAWSNKSDFACANAFNNSIIPEDTFFPSPESSCDVKLVEKSFETDTNLNFQNLSVIGFRILLLKVAGFNLLMTLRLWSSRAKRSGSGVKQTLNFDLLKLAGDVESNPGPSRGHMTEYKPTVRLATRDDVPRAVRTLAAAFADYPATRHTVDPDRHIERVTELQELFLTRVGLDIGKVWVADDGAAVAVWTTPESVEAGAVFAEIGPRMAELSGSRLAAQQQMEGLLAPHRPKEPAWFLATVGVSPDHQGKGLGSAVVLPGVEAAERAGVPAFLETSAPRNLPFYERLGFTVTADVEVPEGPRTWCMTRKPGA

SEQ ID NO: 2497 - protein, 623 aa, synthetic construct; identical to SEQ ID NO: 2448

SEQ ID NO: 2498 - protein, 999 aa, synthetic construct
MALPVTALLLPLALLLHAARPDIQMTQSPSSLSASVGDRVTITCKASDHINNWLAWYQQKPGQAPKLLIYGATTLETGVPSRFSGSGSGTDYTLTISSLQPEDFATYYCQQSWNTPWTFGQGTKLEIKRLEDLKNVFPPEVAVFEPSEAEISHTQKATLVCLATGFYPDHVELSWWVNGKEVHSGVCTDPQPLKEQPALNDSRYCLSSRLRVSATFWQNPRNHFRCQVQFYGLSENDEWTQDRAKPVTQIVSAEAWGRADCGFTSESYQQGVLSAYYMYLLLLLKSVVYFAIITCCLLRRTAFCCNGEKSRAKRSGSGATNFSLLKQAGDVEENPGPTSATMDWIWRILFLVGAATGAHSGPQVQLQESGPGLVKPSQTLSLTCTVSGGSITTGEFYWNWFRQPPGKGLEWMGAIAASGSTTYSPSFESRTSISRDTSKNQFSLKLSSVTAADTAVYYCGRSFGVAAVTTGQNRGQGTLVTVSSGSGGGGSGGGGSGGGGSFEQVQLQQPGAELVKPGASVKMSCKASGYAFSSYWINWMKQKPGQGLEWIGQIYPGDGDTNYNGKFKGRATLTADTSSSTAYMQLSSLTSEDSAVYFCARSITTVVGCAMDYWGQGTSVTVSSTRIQNPDPAVYQLRDSKSSDKSVCLFTDFDSQTNVSQSKDSDVYITDKCVLDMRSMDFKSNSAVAWSNKSDFACANAFNNSIIPEDTFFPSPESSCDVKLVEKSFETDTNLNFQNLSVIGFRILLLKVAGFNLLMTLRLWSSRAKRSGSGVKQTLNFDLLKLAGDVESNPGPSRGHMTEYKPTVRLATRDDVPRAVRTLAAAFADYPATRHTVDPDRHIERVTELQELFLTRVGLDIGKVWVADDGAAVAVWTTPESVEAGAVFAEIGPRMAELSGSRLAAQQQMEGLLAPHRPKEPAWFLATVGVSPDHQGKGLGSAVVLPGVEAAERAGVPAFLETSAPRNLPFYERLGFTVTADVEVPEGPRTWCMTRKPGA

SEQ ID NO: 2499 - protein, 850 aa, synthetic construct
MALPVTALLLPLALLLHAARPDDIQLTQSPSSLSASVGDRVTITCKASQSVDYEGDSFLNWYQQKPGKAPKLLIYAASNLESGVPSRFSGSGSGTDFTLTISSLQPEDFATYYCQQSNEDPLTFGQGTKVEIKRLEDKQLDADVSPKPTIFLPSIAETKLQKAGTYLCLLEKFFPDVIKIHWQEKKSNTILGSQEGNTMKTNDTYMKFSWLTVPEKSLDKEHRCIVRHENNKNGVDQEIIFPPIKTDVITMDPKDNCSKDANDTLLLQLTNTSAYYMYEILLGKATLYAVLVSALVLMAMVKRKDSRGRAKRSGSGATNFSLLKQAGDVEENPGPTSMDWIWRILFLVGAATGAHSFEEVQLVESGGGLVQPGGSLRLSCAASGYTFSSYWIEWVRQAPGKGLEWIGEILPGGGDTNYNEIFKGRATFSADTSKNTAYLQMNSLRAEDTAVYYCTRRVPIRLDYWGQGTLVTVSSTRIQNPDPAVYQLRDSKSSDKSVCLFTDFDSQTNVSQSKDSDVYITDKCVLDMRSMDFKSNSAVAWSNKSDFACANAFNNSIIPEDTFFPSPESSCDVKLVEKSFETDTNLNFQNLSVIGFRILLLKVAGFNLLMTLRLWSSRAKRSGSGVKQTLNFDLLKLAGDVESNPGPSRGHMTEYKPTVRLATRDDVPRAVRTLAAAFADYPATRHTVDPDRHIERVTELQELFLTRVGLDIGKVWVADDGAAVAVWTTPESVEAGAVFAEIGPRMAELSGSRLAAQQQMEGLLAPHRPKEPAWFLATVGVSPDHQGKGLGSAVVLPGVEAAERAGVPAFLETSAPRNLPFYERLGFTVTADVEVPEGPRTWCMTRKPGA

SEQ ID NO: 2500 - protein, 624 aa, synthetic construct
MALPVTALLLPLALLLHAARPDDFVMTQTPLSLPVTPGEPASISCRSSQSIVHHDGNTYLEWYLQKPGQSPKLLIYKVSNRFSGVPDRFSGSGSGTDFTLKISRVEAEDVGVYYCFQGSHVPWTFGGGTKVEIKRLEDLKNVFPPEVAVFEPSEAEISHTQKATLVCLATGFYPDHVELSWWVNGKEVHSGVCTDPQPLKEQPALNDSRYCLSSRLRVSATFWQNPRNHFRCQVQFYGLSENDEWTQDRAKPVTQIVSAEAWGRADCGFTSESYQQGVLSATILYEILLGKATLYAVLVSALVLMAMVKRKDSRGRAKRSGSGATNFSLLKQAGDVEENPGPTSMDWIWRILFLVGAATGAHSFEEVQLVESGGGLVQPGGSLRLSCAASGYTFTSYWIEWVRQAPGKGLEWIGEILPGGGDTNYNEIFKGRATFSADTSKNTAYLQMNSLRAEDTAVYYCTRRVPIRLDYWGQGTLVTVSSTRIQNPDPAVYQLRDSKSSDKSVCLFTDFDSQTNVSQSKDSDVYITDKCVLDMRSMDFKSNSAVAWSNKSDFACANAFNNSIIPEDTFFPSPESSCDVKLVEKSFETDTNLNFQNLSVIGFRILLLKVAGFNLLMTLRLWSS

SEQ ID NO: 2501 - protein, 889 aa, synthetic construct
MALPVTALLLPLALLLHAARPDIQMTQTTSSLSASLGDRVTISCRASQDISKYLNWYQQKPDGTVKLLIYHTSRLHSGVPSRFSGSGSGTDYSLTISNLEQEDIATYFCQQGNTLPYTFGGGTKLEITLEDLKNVFPPEVAVFEPSEAEISHTQKATLVCLATGFYPDHVELSWWVNGKEVHSGVCTDPQPLKEQPALNDSRYCLSSRLRVSATFWQNPRNHFRCQVQFYGLSENDEWTQDRAKPVTQIVSAEAWGRADCGFTSESYQQGVLSATILYEILLGKATLYAVLVSALVLMAMVKRKDSRGRAKRSGSGATNFSLLKQAGDVEENPGPTSATMDWIWRILFLVGAATGAHSGPARSEDRYRNPKGSGGGGSGGGGSGGGGSFEVKLQESGPGLVAPSQSLSVTCTVSGVSLPDYGVSWIRQPPRKGLEWLGVIWGSETTYYNSALKSRLTIIKDNSKSQVFLKMNSLQTDDTAIYYCAKHYYYGGSYAMDYWGQGTSVTVSSTRIQNPDPAVYQLRDSKSSDKSVCLFTDFDSQTNVSQSKDSDVYITDKCVLDMRSMDFKSNSAVAWSNKSDFACANAFNNSIIPEDTFFPSPESSCDVKLVEKSFETDTNLNFQNLSVIGFRILLLKVAGFNLLMTLRLWSSRAKRSGSGVKQTLNFDLLKLAGDVESNPGPSRMYRMQLLSCIALSLALVTNSNWVNVISDLKKIEDLIQSMHIDATLYTESDVHPSCKVTAMKCFLLELQVISLESGDASIHDTVKNLIILANNSLSSNGNVTESGCKECEELEEKNIKEFLQSFVHIVQMFINTSKIEVMYPPPYLDNEKSNGTIIHVKGKHLCPSPLFPGPSKPFWVLVVVGGVLACYSLLVTVAFIIFWVRSKRS

SEQ ID NO: 2502 - protein, 889 aa, synthetic construct
MALPVTALLLPLALLLHAARPDIQMTQTTSSLSASLGDRVTISCRASQDISKYLNWYQQKPDGTVKLLIYHTSRLHSGVPSRFSGSGSGTDYSLTISNLEQEDIATYFCQQGNTLPYTFGGGTKLEITLEDLKNVFPPEVAVFEPSEAEISHTQKATLVCLATGFYPDHVELSWWVNGKEVHSGVCTDPQPLKEQPALNDSRYCLSSRLRVSATFWQNPRNHFRCQVQFYGLSENDEWTQDRAKPVTQIVSAEAWGRADCGFTSESYQQGVLSATILYEILLGKATLYAVLVSALVLMAMVKRKDSRGRAKRSGSGATNFSLLKQAGDVEENPGPTSATMDWIWRILFLVGAATGAHSGPARSEDRYRNPKGSGGGGSGGGGSGGGGSFEVKLQESGPGLVAPSQSLSVTCTVSGVSLPDYGVSWIRQPPRKGLEWLGVIWGSETTYYNSALKSRLTIIKDNSKSQVFLKMNSLQTDDTAIYYCAKHYYYGGSYAMDYWGQGTSVTVSSTRIQNPDPAVYQLRDSKSSDKSVCLFTDFDSQTNVSQSKDSDVYITDKCVLDMRSMDFKSNSAVAWSNKSDFACANAFNNSIIPEDTFFPSPESSCDVKLVEKSFETDTNLNFQNLSVIGLRMLFAKTVAVNFLLTAKLFFLRAKRSGSGVKQTLNFDLLKLAGDVESNPGPSRMYRMQLLSCIALSLALVTNSNWVNVISDLKKIEDLIQSMHIDATLYTESDVHPSCKVTAMKCFLLELQVISLESGDASIHDTVKNLIILANNSLSSNGNVTESGCKECEELEEKNIKEFLQSFVHIVQMFINTSKIEVMYPPPYLDNEKSNGTIIHVKGKHLCPSPLFPGPSKPFWVLVVVGGVLACYSLLVTVAFIIFWVRSKRS

SEQ ID NO: 2503 - protein, 889 aa, synthetic construct
MALPVTALLLPLALLLHAARPDIQMTQTTSSLSASLGDRVTISCRASQDISKYLNWYQQKPDGTVKLLIYHTSRLHSGVPSRFSGSGSGTDYSLTISNLEQEDIATYFCQQGNTLPYTFGGGTKLEITLEDLKNVFPPEVAVFEPSEAEISHTQKATLVCLATGFYPDHVELSWWVNGKEVHSGVCTDPQPLKEQPALNDSRYCLSSRLRVSATFWQNPRNHFRCQVQFYGLSENDEWTQDRAKPVTQIVSAEAWGRADCGFTSESYQQGVLSATILYEILLGKATLYAVLVSALVLMAMVKRKDSRGRAKRSGSGATNFSLLKQAGDVEENPGPTSATMDWIWRILFLVGAATGAHSGPARSEDRYRNPKGSGGGGSGGGGSGGGGSFEVKLQESGPGLVAPSQSLSVTCTVSGVSLPDYGVSWIRQPPRKGLEWLGVIWGSETTYYNSALKSRLTIIKDNSKSQVFLKMNSLQTDDTAIYYCAKHYYYGGSYAMDYWGQGTSVTVSSTRIQNPDPAVYQLRDSKSSDKSVCLFTDFDSQTNVSQSKDSDVYITDKCVLDMRSMDFKSNSAVAWSNKSDFACANAFNNSIIPEDTFFPSPESSCDVKLVEKSFETDTNLNFQNLSVLGLRMLFAKTVAVNFLLTAKLFFLRAKRSGSGVKQTLNFDLLKLAGDVESNPGPSRMYRMQLLSCIALSLALVTNSNWVNVISDLKKIEDLIQSMHIDATLYTESDVHPSCKVTAMKCFLLELQVISLESGDASIHDTVKNLIILANNSLSSNGNVTESGCKECEELEEKNIKEFLQSFVHIVQMFINTSKIEVMYPPPYLDNEKSNGTIIHVKGKHLCPSPLFPGPSKPFWVLVVVGGVLACYSLLVTVAFIIFWVRSKRS

SEQ ID NO: 2504 - protein, 858 aa, synthetic construct
MALPVTALLLPLALLLHAARPDIQMTQTTSSLSASLGDRVTISCRASQDISKYLNWYQQKPDGTVKLLIYHTSRLHSGVPSRFSGSGSGTDYSLTISNLEQEDIATYFCQQGNTLPYTFGGGTKLEITLEDLKNVFPPEVAVFEPSEAEISHTQKATLVCLATGFYPDHVELSWWVNGKEVHSGVCTDPQPLKEQPALNDSRYCLSSRLRVSATFWQNPRNHFRCQVQFYGLSENDEWTQDRAKPVTQIVSAEAWGRADCGFTSESYQQGVLSAYYMYLLLLLKSVVYFAIITCCLLRRTAFCCNGEKSRAKRSGSGATNFSLLKQAGDVEENPGPTSMDWIWRILFLVGAATGAHSFEVKLQESGPGLVAPSQSLSVTCTVSGVSLPDYGVSWIRQPPRKGLEWLGVIWGSETTYYNSALKSRLTIIKDNSKSQVFLKMNSLQTDDTAIYYCAKHYYYGGSYAMDYWGQGTSVTVSSTRIQNPDPAVYQLRDSKSSDKSVCLFTDFDSQTNVSQSKDSDVYITDKCVLDMRSMDFKSNSAVAWSNKSDFACANAFNNSIIPEDTFFPSPESSCDVKLVEKSFETDTNLNFQNLSVIGLRMLFAKTVAVNFLLTAKLFFLRAKRSGSGVKQTLNFDLLKLAGDVESNPGPSRMYRMQLLSCIALSLALVTNSNWVNVISDLKKIEDLIQSMHIDATLYTESDVHPSCKVTAMKCFLLELQVISLESGDASIHDTVKNLIILANNSLSSNGNVTESGCKECEELEEKNIKEFLQSFVHIVQMFINTSKIEVMYPPPYLDNEKSNGTIIHVKGKHLCPSPLFPGPSKPFWVLVVVGGVLACYSLLVTVAFIIFWVRSKRS

SEQ ID NO: 2505 - protein, 861 aa, synthetic construct
MALPVTALLLPLALLLHAARPDIQMTQTTSSLSASLGDRVTISCRASQDISKYLNWYQQKPDGTVKLLIYHTSRLHSGVPSRFSGSGSGTDYSLTISNLEQEDIATYFCQQGNTLPYTFGGGTKLEITLEIQNPDPAVYQLRDSKSSDKSVCLFTDFDSQTNVSQSKDSDVYITDKCVLDMRSMDFKSNSAVAWSNKSDFACANAFNNSIIPEDTFFPSPESSCDVKLVEKSFETDTNLNFQNLSVIGFRILLLKVAGFNLLMTLRLWSSSSRAKRSGSGVKQTLNFDLLKLAGDVESNPGPTSMDWIWRILFLVGAATGAHSFEVKLQESGPGLVAPSQSLSVTCTVSGVSLPDYGVSWIRQPPRKGLEWLGVIWGSETTYYNSALKSRLTIIKDNSKSQVFLKMNSLQTDDTAIYYCAKHYYYGGSYAMDYWGQGTSVTVSSTREDLKNVFPPEVAVFEPSEAEISHTQKATLVCLATGFYPDHVELSWWVNGKEVHSGVCTDPQPLKEQPALNDSRYCLSSRLRVSATFWQNPRNHFRCQVQFYGLSENDEWTQDRAKPVTQIVSAEAWGRADCGFTSESYQQGVLSAYYMYLLLLLKSVVYFAIITCCLLRRTAFCCNGEKSRAKRSGSGATNFSLLKQAGDVEENPGPSRMYRMQLLSCIALSLALVTNSNWVNVISDLKKIEDLIQSMHIDATLYTESDVHPSCKVTAMKCFLLELQVISLESGDASIHDTVKNLIILANNSLSSNGNVTESGCKECEELEEKNIKEFLQSFVHIVQMFINTSKIEVMYPPPYLDNEKSNGTIIHVKGKHLCPSPLFPGPSKPFWVLVVVGGVLACYSLLVTVAFIIFWVRSKRS

SEQ ID NO: 2506 - protein, 893 aa, synthetic construct
MALPVTALLLPLALLLHAARPSYVLTQPPSVSVAPGQTARITCGGNNIGGKSVHWYQQPPGQAPVVVVYDDSDRPSGIPERFSGSNSGNTATLTISRVEAGDEAVYYCQVWDSSSDHVVFGGGTKLTVLLEDLKNVFPPEVAVFEPSEAEISHTQKATLVCLATGFYPDHVELSWWVNGKEVHSGVCTDPQPLKEQPALNDSRYCLSSRLRVSATFWQNPRNHFRCQVQFYGLSENDEWTQDRAKPVTQIVSAEAWGRADCGFTSESYQQGVLSATILYEILLGKATLYAVLVSALVLMAMVKRKDSRGRAKRSGSGATNFSLLKQAGDVEENPGPTSATMDWIWRILFLVGAATGAHSGPARSEDRYRNPKGSGGGGSGGGGSGGGGSFEQLQLQESGPGLVKPSETLSLTCTVSGGSISSSSYFWGWIRQPPGKGLEWIGSIYYSGITYYNPSLKSRVTISVDTSKNQFSLKLSSVTAADTAVYYCARHDGAVAGLFDYWGQGTLVTVSSATRIQNPDPAVYQLRDSKSSDKSVCLFTDFDSQTNVSQSKDSDVYITDKCVLDMRSMDFKSNSAVAWSNKSDFACANAFNNSIIPEDTFFPSPESSCDVKLVEKSFETDTNLNFQNLSVIGLRMLFAKTVAVNFLLTAKLFFLRAKRSGSGVKQTLNFDLLKLAGDVESNPGPSRMYRMQLLSCIALSLALVTNSNWVNVISDLKKIEDLIQSMHIDATLYTESDVHPSCKVTAMKCFLLELQVISLESGDASIHDTVKNLIILANNSLSSNGNVTESGCKECEELEEKNIKEFLQSFVHIVQMFINTSKIEVMYPPPYLDNEKSNGTIIHVKGKHLCPSPLFPGPSKPFWVLVVVGGVLACYSLLVTVAFIIFWVRSKRS

SEQ ID NO: 2507 - protein, 863 aa, synthetic construct
MALPVTALLLPLALLLHAARPACARSEDRYRNPKEFDIQMTQSPSSLSASVGDRVTITCKASQDVGTAVDWYQQKPGKAPKLLIYWASTRHTGVPSRFSGSGSGTDFTLTISSLQPEDFATYYCQQYNSYPLTFGQGTKVEIKRLEDLKNVFPPEVAVFEPSEAEISHTQKATLVCLATGFYPDHVELSWWVNGKEVHSGVCTDPQPLKEQPALNDSRYCLSSRLRVSATFWQNPRNHFRCQVQFYGLSENDEWTQDRAKPVTQIVSAEAWGRADCGFTSESYQQGVLSATILYEILLGKATLYAVLVSALVLMAMVKRKDSRGRAKRSGSGATNFSLLKQAGDVEENPGPTSMDWIWRILFLVGAATGAHSFEVQLVESGGGLVQPGGSLRLSCAASGYTFTEYTIHWVRQAPGKGLEWVANINPNNGGTTYNQKFEDRFTISRDNSKNTLYLQMNSLRAEDTAVYYCARGWNFDYWGQGTLVTVSSTRIQNPDPAVYQLRDSKSSDKSVCLFTDFDSQTNVSQSKDSDVYITDKCVLDMRSMDFKSNSAVAWSNKSDFACANAFNNSIIPEDTFFPSPESSCDVKLVEKSFETDTNLNFQNLSVIGFRILLLKVAGFNLLMTLRLWSSRAKRSGSGVKQTLNFDLLKLAGDVESNPGPSRGHMTEYKPTVRLATRDDVPRAVRTLAAAFADYPATRHTVDPDRHIERVTELQELFLTRVGLDIGKVWVADDGAAVAVWTTPESVEAGAVFAEIGPRMAELSGSRLAAQQQMEGLLAPHRPKEPAWFLATVGVSPDHQGKGLGSAVVLPGVEAAERAGVPAFLETSAPRNLPFYERLGFTVTADVEVPEGPRTWCMTRKPGA

SEQ ID NO: 2508 - protein, 616 aa, synthetic construct
MALPVTALLLPLALLLHAARPDIVLTQSPPSLAVSLGQRATISCRASESVDSYGKTFMHWHQQKPGQPPKLLIYRVSNLESGIPARFSGSGSRTDFTLTINPVEADDVATYYCQQSNEDPFTFGGGTKLEIKRLEDLKNVFPPEVAVFEPSEAEISHTQKATLVCLATGFYPDHVELSWWVNGKEVHSGVCTDPQPLKEQPALNDSRYCLSSRLRVSATFWQNPRNHFRCQVQFYGLSENDEWTQDRAKPVTQIVSAEAWGRADCGFTSESYQQGVLSATILYEILLGKATLYAVLVSALVLMAMVKRKDSRGRAKRSGSGATNFSLLKQAGDVEENPGPTSMDWIWRILFLVGAATGAHSFEVQLQESGPGLVKPSQSLSLTCTVTGYSITSDYAWNWIRQFPGNKLEWMGNIWYSGSTTYNPSLKSRISITRDTSKNQFFLQLNSVTSEDTATYYCSRMDFWGQGTTLTVSSTRIQNPDPAVYQLRDSKSSDKSVCLFTDFDSQTNVSQSKDSDVYITDKCVLDMRSMDFKSNSAVAWSNKSDFACANAFNNSIIPEDTFFPSPESSCDVKLVEKSFETDTNLNFQNLSVIGFRILLLKVAGFNLLMTLRLWSS

SEQ ID NO: 2509 - protein, 617 aa, synthetic construct
MALPVTALLLPLALLLHAARPDIVLTQSPPSLAVSLGQRATISCRASESVDSYGKTFMHWHQQKPGQPPKLLIYRVSNLESGIPARFSGSGSRTDFTLTINPVEADDVATYYCQQSNEDPFTFGGGTKLEIKRLEDLKNVFPPEVAVFEPSEAEISHTQKATLVCLATGFYPDHVELSWWVNGKEVHSGVCTDPQPLKEQPALNDSRYCLSSRLRVSATFWQNPRNHFRCQVQFYGLSENDEWTQDRAKPVTQIVSAEAWGRADCGFTSESYQQGVLSAYYMYLLLLLKSVVYFAIITCCLLRRTAFCCNGEKSRAKRSGSGATNFSLLKQAGDVEENPGPTSMDWIWRILFLVGAATGAHSFEVQLQESGPGLVKPSQSLSLTCTVTGYSITSDYAWNWIRQFPGNKLEWMGNIWYSGSTTYNPSLKSRISITRDTSKNQFFLQLNSVTSEDTATYYCSRMDFWGQGTTLTVSSTRIQNPDPAVYQLRDSKSSDKSVCLFTDFDSQTNVSQSKDSDVYITDKCVLDMRSMDFKSNSAVAWSNKSDFACANAFNNSIIPEDTFFPSPESSCDVKLVEKSFETDTNLNFQNLSVIGFRILLLKVAGFNLLMTLRLWSS

SEQ ID NO: 2510 - protein, 758 aa, synthetic construct
MALPVTALLLPLALLLHAARPDIQMTQSPSSLSASVGDRVTITCKASDHINNWLAWYQQKPGKAPKLLIYGATTLETGVPSRFSGSGSGTDFTLTISSLQPEDFATYYCQQSWNTPWTFGQGTKVEIKRLEDLKNVFPPEVAVFEPSEAEISHTQKATLVCLATGFYPDHVELSWWVNGKEVHSGVCTDPQPLKEQPALNDSRYCLSSRLRVSATFWQNPRNHFRCQVQFYGLSENDEWTQDRAKPVTQIVSAEAWGRADCGFTSESYQQGVLSATILYEILLGKATLYAVLVSALVLMAMVKRKDSRGRAKRSGSGATNFSLLKQAGDVEENPGPTSATMDWIWRILFLVGAATGAHSGPEVQLVESGGGLVQAGGSLRLSCAASGRTFSMGWFRQAPGKEREFVAAITYSGGSPYYADSVKGRFTISRDNAKNTVYLQMNSLKPEDTAVYYCAANPTYGSDWNAENWGQGTQVTVSSGSARSEDRYRNPKGSFEVQLVESGGGLVQPGGSLRLSCAASGYAFSSYWVNWVRQAPGKGLEWVAQIYPGDGDTNYNGKFKGRFTISRDNSKNTLYLQMNSLRAEDTAVYYCARSITTVVGCAMDYWGQGTLVTVSSTRIQNPDPAVYQLRDSKSSDKSVCLFTDFDSQTNVSQSKDSDVYITDKCVLDMRSMDFKSNSAVAWSNKSDFACANAFNNSIIPEDTFFPSPESSCDVKLVEKSFETDTNLNFQNLSVIGFRILLLKVAGFNLLMTLRLWSS

SEQ ID NO: 2511 - protein, 850 aa, synthetic construct
MALPVTALLLPLALLLHAARPDIVLTQSPPSLAVSLGQRATISCRASESVDSYGKTFMHWHQQKPGQPPKLLIYRVSNLESGIPARFSGSGSRTDFTLTINPVEADDVATYYCQQSNEDPFTFGGGTKLEIKRLEDLKNVFPPEVAVFEPSEAEISHTQKATLVCLATGFYPDHVELSWWVNGKEVHSGVCTDPQPLKEQPALNDSRYCLSSRLRVSATFWQNPRNHFRCQVQFYGLSENDEWTQDRAKPVTQIVSAEAWGRADCGFTSESYQQGVLSAYYMYLLLLLKSVVYFAIITCCLLRRTAFCCNGEKSRAKRSGSGATNFSLLKQAGDVEENPGPTSMDWIWRILFLVGAATGAHSFEVQLQESGPGLVKPSQSLSLTCTVTGYSITSDYAWNWIRQFPGNKLEWMGNIWYSGSTTYNPSLKSRISITRDTSKNQFFLQLNSVTSEDTATYYCSRMDFWGQGTTLTVSSTRIQNPDPAVYQLRDSKSSDKSVCLFTDFDSQTNVSQSKDSDVYITDKCVLDMRSMDFKSNSAVAWSNKSDFACANAFNNSIIPEDTFFPSPESSCDVKLVEKSFETDTNLNFQNLSVIGFRILLLKVAGFNLLMTLRLWSSRAKRSGSGVKQTLNFDLLKLAGDVESNPGPSRGHMTEYKPTVRLATRDDVPRAVRTLAAAFADYPATRHTVDPDRHIERVTELQELFLTRVGLDIGKVWVADDGAAVAVWTTPESVEAGAVFAEIGPRMAELSGSRLAAQQQMEGLLAPHRPKEPAWFLATVGVSPDHQGKGLGSAVVLPGVEAAERAGVPAFLETSAPRNLPFYERLGFTVTADVEVPEGPRTWCMTRKPGA

SEQ ID NO: 2512 - protein, 634 aa, synthetic construct
MALPVTALLLPLALLLHAARPARSEDRYRNPKEFDIQLTQSPSTLSASMGDRVTITCSASSSVRFIHWYQQKPGKAPKRLIYDTSKLASGVPSRFSGSGSGTDFTLTISSLQPEDFATYYCQQWGSSPFTFGQGTKVEIKLEDLKNVFPPEVAVFEPSEAEISHTQKATLVCLATGFYPDHVELSWWVNGKEVHSGVCTDPQPLKEQPALNDSRYCLSSRLRVSATFWQNPRNHFRCQVQFYGLSENDEWTQDRAKPVTQIVSAEAWGRADCGFTSESYQQGVLSATILYEILLGKATLYAVLVSALVLMAMVKRKDSRGRAKRSGSGATNFSLLKQAGDVEENPGPTSMDWIWRILFLVGAATGAHSFEVQLVEYGGGLVQPGGSLRLSCAASGFNIKDYYIHWVRQAPGKGLEWVAWIDPENGDTEFVPKFQGRATMSADTSKNTAYLQMNSLRAEDTAVYYCKTGGFWGQGTLVTVSSTRARSEDRYRNPKIQNPDPAVYQLRDSKSSDKSVCLFTDFDSQTNVSQSKDSDVYITDKCVLDMRSMDFKSNSAVAWSNKSDFACANAFNNSIIPEDTFFPSPESSCDVKLVEKSFETDTNLNFQNLSVIGFRILLLKVAGFNLLMTLRLWSS

SEQ ID NO: 2513 - protein, 615 aa, synthetic construct; identical to SEQ ID NO: 2453

SEQ ID NO: 2514 - protein, 229 aa, synthetic construct; identical to SEQ ID NO: 660

SEQ ID NO: 2515 - protein, 758 aa, synthetic construct
MALPVTALLLPLALLLHAARPDIQMTQSPSSLSASVGDRVTITCKASDHINNWLAWYQQKPGKAPKLLIYGATTLETGVPSRFSGSGSGTDFTLTISSLQPEDFATYYCQQSWNTPWTFGQGTKVEIKRLEDLKNVFPPEVAVFEPSEAEISHTQKATLVCLATGFYPDHVELSWWVNGKEVHSGVCTDPQPLKEQPALNDSRYCLSSRLRVSATFWQNPRNHFRCQVQFYGLSENDEWTQDRAKPVTQIVSAEAWGRADCGFTSESYQQGVLSATILYEILLGKATLYAVLVSALVLMAMVKRKDSRGRAKRSGSGATNFSLLKQAGDVEENPGPTSATMDWIWRILFLVGAATGAHSGPQLQLQESGPGLVKPSETLSLTCTVSGDSISSGDYYWGWIRQPPGKGLEWIGHIYYSGISYYNPSLKSRVTISVDTSRNQFSLKLSSVTAADTAVYYCTREDSSNWRSRGQGTLVTVSSGSARSEDRYRNPKGSFEVQLVESGGGLVQPGGSLRLSCAASGYAFSSYWVNWVRQAPGKGLEWVAQIYPGDGDTNYNGKFKGRFTISRDNSKNTLYLQMNSLRAEDTAVYYCARSITTVVGCAMDYWGQGTLVTVSSTRIQNPDPAVYQLRDSKSSDKSVCLFTDFDSQTNVSQSKDSDVYITDKCVLDMRSMDFKSNSAVAWSNKSDFACANAFNNSIIPEDTFFPSPESSCDVKLVEKSFETDTNLNFQNLSVIGFRILLLKVAGFNLLMTLRLWSS

SEQ ID NO: 2516 - protein, 8 aa, synthetic construct
GGGGGGGG

SEQ ID NO: 2517 - protein, 1049 aa, synthetic construct
MALPVTALLLPLALLLHAARPDIQMTQSPSSLSASVGDRVTITCKASQDVGTAVDWYQQKPGKAPKLLIYWASTRHTGVPSRFSGSGSGTDFTLTISSLQPEDFATYYCQQYNSYPLTFGQGTKVEIKRLEDLKNVFPPEVAVFEPSEAEISHTQKATLVCLATGFYPDHVELSWWVNGKEVHSGVSTDPQPLKEQPALNDSRYCLSSRLRVSATFWQNPRNHFRCQVQFYGLSENDEWTQDRAKPVTQIVSAEAWGRADCLEDLKNVFPPEVAVFEPSEAEISHTQKATLVCLATGFYPDHVELSWWVNGKEVHSGVSTDPQPLKEQPALNDSRYCLSSRLRVSATFWQNPRNHFRCQVQFYGLSENDEWTQDRAKPVTQIVSAEAWGRADCGSQSFGLLDPKLCYLLDGILFIYGVILTALFLRVKFSRSADAPAYQQGQNQLYNELNLGRREEYDVLDKRRGRDPEMGGKPRRKNPQEGLYNELQKDKMAEAYSEIGMKGERRRGKGHDGLYQGLSTATKDTYDALHMQALPPRRAKRSGSGATNFSLLKQAGDVEENPGPTSMDWIWRILFLVGAATGAHSFEVQLVESGGGLVQPGGSLRLSCAASGYTFTEYTIHWVRQAPGKGLEWVANINPNNGGTTYNQKFEDRFTISRDNSKNTLYLQMNSLRAEDTAVYYCARGWNFDYWGQGTLVTVSSTRIQNPDPAVYQLRDSKSSDKSVCLFTDFDSQTNVSQSKDSDVYITDKTVLDMRSMDFKSNSAVAWSNKSDFACANAFNNSIIPEDTFFPSPESSCGTITQGLAVSTISSFFPPGYQVSFCLVMVLLFAVDTGLYFSVKTNIRSSTRDWKDHKFKWRKDPQDKRAKRSGSGATNFSLLKQAGDVEENPGPSRMALPVTALLLPLALLLHAARPARPAKSEDLYPNPKELPTQGTFSNVSTNVSPAKPTTTACAKSEDLYPNPKGGSPAPRPPTPAPTIASQPLSLRPEACRPAAGGAVHTRGLDFACDIYIWAPLAGTCGVLLLSLVITLYCNHRNRRRVCKCPRPVV

SEQ ID NO: 2518 - protein, 753 aa, synthetic construct
MALPVTALLLPLALLLHAARPDIQMTQSPSSLSASVGDRVTITCKASDHINNWLAWYQQKPGQAPKLLIYGATTLETGVPSRFSGSGSGTDYTLTISSLQPEDFATYYCQQSWNTPWTFGQGTKLEIKRGGGGSGGGGSGGGGSQVQLQQPGAELVKPGASVKMSCKASGYAFSSYWINWMKQKPGQGLEWIGQIYPGDGDTNYNGKFKGRATLTADTSSSTAYMQLSSLTSEDSAVYFCARSITTVVGCAMDYWGQGTSVTVSSTRTTTPAPRPPTPAPTIASQPLSLRPEACRPAAGGAVHTRGLDFACDIYIWAPLAGTCGVLLLSLVITLYCKRGRKKLLYIFKQPFMRPVQTTQEEDGCSCRFPEEEEGGCELRVKFSRSADAPAYQQGQNQLYNELNLGRREEYDVLDKRRGRDPEMGGKPRRKNPQEGLYNELQKDKMAEAYSEIGMKGERRRGKGHDGLYQGLSTATKDTYDALHMQALPPRSRAKRSGSGATNFSLLKQAGDVEENPGPGIHTMARLALSPVSSHWLVALLLLLSAAEPVPAAKSEDLYPNPKGSACSRIWQSPRFIARKRGFTVKMHCYVTNSTFSIVSWLRKRETDKEPQQVNLEQGHMHQTQNSSVTTLIIQDIRFEDNGIYFCQQECSKTSEVYRGCGTELRVMGFSTLAQLKQRNTLKDGIIMIQTLLIILFIIVPIFLLLDKDDSKAGMEEDHTYEGLDIDQTATYEDIVTLRTGEVKWSVGEHPGQE

SEQ ID NO: 2519 - protein, 14 aa, synthetic construct
GGGGGGGGGGGGGG

SEQ ID NO: 2520 - protein, 484 aa, synthetic construct; identical to SEQ ID NO: 2477

SEQ ID NO: 2521 - protein, 229 aa, synthetic construct; identical to SEQ ID NO: 660

SEQ ID NO: 2522 - protein, 484 aa, synthetic construct; identical to SEQ ID NO: 2477

SEQ ID NO: 2523 - protein, 231 aa, synthetic construct; identical to SEQ ID NO: 685

SEQ ID NO: 2524 - protein, 484 aa, synthetic construct; identical to SEQ ID NO: 2477

SEQ ID NO: 2525 - protein, 125 aa, synthetic construct; identical to SEQ ID NO: 656

SEQ ID NO: 2526 - protein, 1124 aa, synthetic construct
MALPVTALLLPLALLLHAARPDIQMTQSPSSLSASVGDRVTITCKASQDVGTAVDWYQQKPGKAPKLLIYWASTRHTGVPSRFSGSGSGTDFTLTISSLQPEDFATYYCQQYNSYPLTFGQGTKVEIKRLEDLKNVFPPEVAVFEPSEAEISHTQKATLVCLATGFYPDHVELSWWVNGKEVHSGVSTDPQPLKEQPALNDSRYCLSSRLRVSATFWQNPRNHFRCQVQFYGLSENDEWTQDRAKPVTQIVSAEAWGRADCLEDLKNVFPPEVAVFEPSEAEISHTQKATLVCLATGFYPDHVELSWWVNGKEVHSGVSTDPQPLKEQPALNDSRYCLSSRLRVSATFWQNPRNHFRCQVQFYGLSENDEWTQDRAKPVTQIVSAEAWGRADCGSQSFGLLDPKLCYLLDGILFIYGVILTALFLRVKFSRSADAPAYQQGQNQLYNELNLGRREEYDVLDKRRGRDPEMGGKPRRKNPQEGLYNELQKDKMAEAYSEIGMKGERRRGKGHDGLYQGLSTATKDTYDALHMQALPPRRAKRSGSGATNFSLLKQAGDVEENPGPTSMDWIWRILFLVGAATGAHSFEVQLVESGGGLVQPGGSLRLSCAASGYTFTEYTIHWVRQAPGKGLEWVANINPNNGGTTYNQKFEDRFTISRDNSKNTLYLQMNSLRAEDTAVYYCARGWNFDYWGQGTLVTVSSTRIQNPDPAVYQLRDSKSSDKSVCLFTDFDSQTNVSQSKDSDVYITDKTVLDMRSMDFKSNSAVAWSNKSDFACANAFNNSIIPEDTFFPSPESSCGTITQGLAVSTISSFFPPGYQVSFCLVMVLLFAVDTGLYFSVKTNIRSSTRDWKDHKFKWRKDPQDKRAKRSGSGATNFSLLKQAGDVEENPGPSRMARLALSPVSSHWLVALLLLLSAAEPVPAAKSEDLYPNPKGSACSRIWQSPRFIARKRGFTVKMHCYVTNSTFSIVSWLRKRETDKEPQQVNLEQGHMHQTQNSSVTTLIIQDIRFEDNGIYFCQQECSKTSEVYRGCGTELRVMGFSTLAQLKQRNTLKDGIIMIQTLLIILFIIVPIFLLLDKDDSKAGMEEDHTYEGLDIDQTATYEDIVTLRTGEVKWSVGEHPGQE

SEQ ID NO: 2527 - protein, 623 aa, synthetic construct
MALPVTALLLPLALLLHAARPDIVLTQSPPSLAVSLGQRATISCRASESVDSYGKTFMHWHQQKPGQPPKLLIYRVSNLESGIPARFSGSGSRTDFTLTINPVEADDVATYYCQQSNEDPFTFGGGTKLEIKRLEDLKNVFPPEVAVFEPSEAEISHTQKATLVCLATGFYPDHVELSWWVNGKEVHSGVCTDPQPLKEQPALNDSRYCLSSRLRVSATFWQNPRNHFRCQVQFYGLSENDEWTQDRAKPVTQIVSAEAWGRADCGFTSESYQQGVLSAYYMYLLLLLKSVVYFAIITCCLLRRTAFCCNGEKSRAKRSGSGATNFSLLKQAGDVEENPGPTSMDWIWRILFLVGAATGAHSFEEVQLVESGGGLVQPGGSLRLSCAASGYTFTSYWIEWVRQAPGKGLEWIGEILPGGGDTNYNEIFKGRATFSADTSKNTAYLQMNSLRAEDTAVYYCTRRVPIRLDYWGQGTLVTVSSTRIQNPDPAVYQLRDSKSSDKSVCLFTDFDSQTNVSQSKDSDVYITDKCVLDMRSMDFKSNSAVAWSNKSDFACANAFNNSIIPEDTFFPSPESSCDVKLVEKSFETDTNLNFQNLSVIGFRILLLKVAGFNLLMTLRLWSS

SEQ ID NO: 2528 - protein, 615 aa, synthetic construct; identical to SEQ ID NO: 2453

SEQ ID NO: 2529 - protein, 241 aa, synthetic construct; identical to SEQ ID NO: 684

SEQ ID NO: 2530 - protein, 1107 aa, synthetic construct
MALPVTALLLPLALLLHAARPDIQMTQSPSSLSASVGDRVTITCKASQDVGTAVDWYQQKPGKAPKLLIYWASTRHTGVPSRFSGSGSGTDFTLTISSLQPEDFATYYCQQYNSYPLTFGQGTKVEIKRLEDLKNVFPPEVAVFEPSEAEISHTQKATLVCLATGFYPDHVELSWWVNGKEVHSGVSTDPQPLKEQPALNDSRYCLSSRLRVSATFWQNPRNHFRCQVQFYGLSENDEWTQDRAKPVTQIVSAEAWGRADCLEDLKNVFPPEVAVFEPSEAEISHTQKATLVCLATGFYPDHVELSWWVNGKEVHSGVSTDPQPLKEQPALNDSRYCLSSRLRVSATFWQNPRNHFRCQVQFYGLSENDEWTQDRAKPVTQIVSAEAWGRADCGSQSFGLLDPKLCYLLDGILFIYGVILTALFLRVKFSRSADAPAYQQGQNQLYNELNLGRREEYDVLDKRRGRDPEMGGKPRRKNPQEGLYNELQKDKMAEAYSEIGMKGERRRGKGHDGLYQGLSTATKDTYDALHMQALPPRRAKRSGSGATNFSLLKQAGDVEENPGPTSMDWIWRILFLVGAATGAHSFEVQLVESGGGLVQPGGSLRLSCAASGYTFTEYTIHWVRQAPGKGLEWVANINPNNGGTTYNQKFEDRFTISRDNSKNTLYLQMNSLRAEDTAVYYCARGWNFDYWGQGTLVTVSSTRIQNPDPAVYQLRDSKSSDKSVCLFTDFDSQTNVSQSKDSDVYITDKTVLDMRSMDFKSNSAVAWSNKSDFACANAFNNSIIPEDTFFPSPESSCGTITQGLAVSTISSFFPPGYQVSFCLVMVLLFAVDTGLYFSVKTNIRSSTRDWKDHKFKWRKDPQDKRAKRSGSGATNFSLLKQAGDVEENPGPSRMRISKPHLRSISIQCYLCLLLNSHFLTEAGIHVFILGCFSAGLPKTEANWVNVISDLKKIEDLIQSMHIDATLYTESDVHPSCKVTAMKCFLLELQVISLESGDASIHDTVENLIILANNSLSSNGNVTESGCKECEELEEKNIKEFLQSFVHIVQMFINTSARSEDRYRNPKGFSTLAQLKQRNTLKDGIIMIQTLLIILFIIVPIFLLLDKD

SEQ ID NO: 2531 - protein, 802 aa, synthetic construct
MALPVTALLLPLALLLHAARPDIQMTQSPSSLSASVGDRVTITCKASQDVGTAVDWYQQKPGKAPKLLIYWASTRHTGVPSRFSGSGSGTDFTLTISSLQPEDFATYYCQQYNSYPLTFGQGTKVEIKRGGGGSGGGGSGGGGSEVQLVESGGGLVQPGGSLRLSCAASGYTFTEYTIHWVRQAPGKGLEWVANINPNNGGTTYNQKFEDRFTISRDNSKNTLYLQMNSLRAEDTAVYYCARGWNFDYWGQGTLVTVSSTRTTTPAPRPPTPAPTIASQPLSLRPEACRPAAGGAVHTRGLDFACDIYIWAPLAGTCGVLLLSLVITLYCKRGRKKLLYIFKQPFMRPVQTTQEEDGCSCRFPEEEEGGCELRVKFSRSADAPAYQQGQNQLYNELNLGRREEYDVLDKRRGRDPEMGGKPRRKNPQEGLYNELQKDKMAEAYSEIGMKGERRRGKGHDGLYQGLSTATKDTYDALHMQALPPRVESRGSGARQWAERTSPTVPEKLGGGVGNTGARRWRGVNWESDVVYWLRLFPEGGGEPYISAVVAVNVLFRNGFAARTQVRCTGCSCAVSPCLWPWSQIAPLPAAAPRKPSCNWNTSCWTSRSTASTTTRTPSPGCPSSSTCPRRPPSSTSSAWKRNSPWKKCIWPRARTSTGQGTSPTSTSCWNKAARQPSCASTPTRQLPSWNFIGGSPSARASSAPQQEVKTVTGTPKAAAAAPSLQQPLLLDLLHQLLQSPASLCLSDPKPVDQLLAELCIPEDWISPATSTSGLLWLAHVAFCCCPWSSPCTVKSTDPIINLW

SEQ ID NO: 2532 - protein, 241 aa, synthetic construct; identical to SEQ ID NO: 684

SEQ ID NO: 2533 - protein, 896 aa, synthetic construct
MALPVTALLLPLALLLHAARPEVQLVESGGGLVQAGGSLRLSCAASGRTFSMGWFRQAPGKEREFVAAITYSGGSPYYADSVKGRFTISRDNAKNTVYLQMNSLKPEDTAVYYCAANPTYGSDWNAENWGQGTQVTVSSGTARSEDRYRNPKGSEFDIQMTQSPSSLSASVGDRVTITCKASDHINNWLAWYQQKPGQAPKLLIYGATTLETGVPSRFSGSGSGTDYTLTISSLQPEDFATYYCQQSWNTPWTFGQGTKLEIKRLEDLKNVFPPEVAVFEPSEAEISHTQKATLVCLATGFYPDHVELSWWVNGKEVHSGVCTDPQPLKEQPALNDSRYCLSSRLRVSATFWQNPRNHFRCQVQFYGLSENDEWTQDRAKPVTQIVSAEAWGRADCGFTSESYQQGVLSATILYEILLGKATLYAVLVSALVLMAMVKRKDSRGRAKRSGSGATNFSLLKQAGDVEENPGPTSATMDWIWRILFLVGAATGAHSGPEVQLVESGGGLVQAGGSLRLSCAASGRTFTMGWFRQAPGKEREFVAAISLSPTLAYYADSVKGRFTISRDNAKNTVVLQMNSLKPEDTALYYCAADRKSVMSIRPDYWGQGTQVTVSSGSGGGGSGGGGSGGGGSFEQVQLQQPGAELVKPGASVKMSCKASGYAFSSYWINWMKQKPGQGLEWIGQIYPGDGDTNYNGKFKGRATLTADTSSSTAYMQLSSLTSEDSAVYFCARSITTVVGCAMDYWGQGTSVTVSSTRIQNPDPAVYQLRDSKSSDKSVCLFTDFDSQTNVSQSKDSDVYITDKCVLDMRSMDFKSNSAVAWSNKSDFACANAFNNSIIPEDTFFPSPESSCDVKLVEKSFETDTNLNFQNLSVIGFRILLLKVAGFNLLMTLRLWSS

SEQ ID NO: 2534 - protein, 653 aa, synthetic construct
MALPVTALLLPLALLLHAARPACARSEDRYRNPKGTGGGGSGGGGSGGGGSEFDIQMTQSPSSLSASVGDRVTITCKASDHINNWLAWYQQKPGKAPKLLIYGATTLETGVPSRFSGSGSGTDFTLTISSLQPEDFATYYCQQSWNTPWTFGQGTKVEIKRLEDLKNVFPPEVAVFEPSEAEISHTQKATLVCLATGFYPDHVELSWWVNGKEVHSGVCTDPQPLKEQPALNDSRYCLSSRLRVSATFWQNPRNHFRCQVQFYGLSENDEWTQDRAKPVTQIVSAEAWGRADCGFTSESYQQGVLSATILYEILLGKATLYAVLVSALVLMAMVKRKDSRGRAKRSGSGATNFSLLKQAGDVEENPGPTSMDWIWRILFLVGAATGAHSFEVQLVESGGGLVQPGGSLRLSCAASGYAFSSYWVNWVRQAPGKGLEWVAQIYPGDGDTNYNGKFKGRFTISRDNSKNTLYLQMNSLRAEDTAVYYCARSITTVVGCAMDYWGQGTLVTVSSTRIQNPDPAVYQLRDSKSSDKSVCLFTDFDSQTNVSQSKDSDVYITDKCVLDMRSMDFKSNSAVAWSNKSDFACANAFNNSIIPEDTFFPSPESSCDVKLVEKSFETDTNLNFQNLSVIGFRILLLKVAGFNLLMTLRLWSS

SEQ ID NO: 2535 - protein, 487 aa, synthetic construct
MALPVTALLLPLALLLHAARPDIVMTQTPLTLSVTIGQPASISCKSSQSLLDSDGRTYLNWLLQRPGQSPERLIYLVSKLDSGVPDRFTGSGSGTDFTLKISRVEAEDLGVYCCFQGTHFPFTFGGGTKVEIKGGGGGSGGGGSGGGGSQVQLQQPGAELVRPGASVKLSCKASGYTFTSYWMNWVKQRPGQGLEWIGMIDPSDSETHYNHIFKDKATLTVDKSSSTAYLQLSSLTSEDSAVYYCARNLYLWGQGTSVTVSSTRTTTPAPRPPTPAPTIASQPLSLRPEACRPAAGGAVHTRGLDFACDIYIWAPLAGTCGVLLLSLVITLYCKRGRKKLLYIFKQPFMRPVQTTQEEDGCSCRFPEEEEGGCELRVKFSRSADAPAYQQGQNQLYNELNLGRREEYDVLDKRRGRDPEMGGKPRRKNPQEGLYNELQKDKMAEAYSEIGMKGERRRGKGHDGLYQGLSTATKDTYDALHMQALPPR

SEQ ID NO: 2536 - protein, 222 aa, synthetic construct; identical to SEQ ID NO: 683

SEQ ID NO: 2537 - protein, 760 aa, synthetic construct
MALPVTALLLPLALLLHAARPDIVMTQTPLTLSVTIGQPASISCKSSQSLLDSDGRTYLNWLLQRPGQSPERLIYLVSKLDSGVPDRFTGSGSGTDFTLKISRVEAEDLGVYCCFQGTHFPFTFGGGTKVEIKGGGGGSGGGGSGGGGSQVQLQQPGAELVRPGASVKLSCKASGYTFTSYWMNWVKQRPGQGLEWIGMIDPSDSETHYNHIFKDKATLTVDKSSSTAYLQLSSLTSEDSAVYYCARNLYLWGQGTSVTVSSTRTTTPAPRPPTPAPTIASQPLSLRPEACRPAAGGAVHTRGLDFACDIYIWAPLAGTCGVLLLSLVITLYCKRGRKKLLYIFKQPFMRPVQTTQEEDGCSCRFPEEEEGGCELRVKFSRSADAPAYQQGQNQLYNELNLGRREEYDVLDKRRGRDPEMGGKPRRKNPQEGLYNELQKDKMAEAYSEIGMKGERRRGKGHDGLYQGLSTATKDTYDALHMQALPPRSRAKRSGSGATNFSLLKQAGDVEENPGPGIHTMYRMQLLSCIALSLALVTNSAPTSSSTKKTQLQLEHLLLDLQMILNGINNYKNPKLTRMLTFKFYMPKKATELKHLQCLEEELKPLEEVLNLAQSKNFHLRPRDLISNINVIVLELKGSETTFMCEYADETATIVEFLNRWITFCQSIISTLTARSEDRYRNPKGSGGSAKPTTTPAPRPPTPAPTIASQPLSLRPEACRPAAGGAVHTRGLDFACDIYIWAPLAGTCGVLLLSLVITLYC

SEQ ID NO: 2538 - protein, 644 aa, synthetic construct
MALPVTALLLPLALLLHAARPDIVMTQTPLTLSVTIGQPASISCKSSQSLLDSDGRTYLNWLLQRPGQSPERLIYLVSKLDSGVPDRFTGSGSGTDFTLKISRVEAEDLGVYCCFQGTHFPFTFGGGTKVEIKGGGGGSGGGGSGGGGSQVQLQQPGAELVRPGASVKLSCKASGYTFTSYWMNWVKQRPGQGLEWIGMIDPSDSETHYNHIFKDKATLTVDKSSSTAYLQLSSLTSEDSAVYYCARNLYLWGQGTSVTVSSTRTTTPAPRPPTPAPTIASQPLSLRPEACRPAAGGAVHTRGLDFACDIYIWAPLAGTCGVLLLSLVITLYCKRGRKKLLYIFKQPFMRPVQTTQEEDGCSCRFPEEEEGGCELRVKFSRSADAPAYQQGQNQLYNELNLGRREEYDVLDKRRGRDPEMGGKPRRKNPQEGLYNELQKDKMAEAYSEIGMKGERRRGKGHDGLYQGLSTATKDTYDALHMQALPPRSRAKRSGSGATNFSLLKQAGDVEENPGPGIHTMARLALSPVPSHWMVALLLLLSAEPVPAARSEDRYRNPKGFSTLAQLKQRNTLKDGIIMIQTLLIILFIIVPIFLLLDKDDSKAGMEEDHTYEGLDIDQTATYEDIVTLRTGEVKWSVGEHPGQE

SEQ ID NO: 2539 - protein, 748 aa, synthetic construct
MALPVTALLLPLALLLHAARPDIVMTQTPLTLSVTIGQPASISCKSSQSLLDSDGRTYLNWLLQRPGQSPERLIYLVSKLDSGVPDRFTGSGSGTDFTLKISRVEAEDLGVYCCFQGTHFPFTFGGGTKVEIKGGGGGSGGGGSGGGGSQVQLQQPGAELVRPGASVKLSCKASGYTFTSYWMNWVKQRPGQGLEWIGMIDPSDSETHYNHIFKDKATLTVDKSSSTAYLQLSSLTSEDSAVYYCARNLYLWGQGTSVTVSSTRTTTPAPRPPTPAPTIASQPLSLRPEACRPAAGGAVHTRGLDFACDIYIWAPLAGTCGVLLLSLVITLYCKRGRKKLLYIFKQPFMRPVQTTQEEDGCSCRFPEEEEGGCELRVKFSRSADAPAYQQGQNQLYNELNLGRREEYDVLDKRRGRDPEMGGKPRRKNPQEGLYNELQKDKMAEAYSEIGMKGERRRGKGHDGLYQGLSTATKDTYDALHMQALPPRSRAKRSGSGATNFSLLKQAGDVEENPGPGIHTMARLALSPVPSHWMVALLLLLSAEPVPAARSEDRYRNPKGSACSRIWQSPRFIARKRGFTVKMHCYMNSASGNVSWLWKQEMDENPQQLKLEKGRMEESQNESLATLTIQGIRFEDNGIYFCQQKCNNTSEVYQGCGTELRVMGFSTLAQLKQRNTLKDGIIMIQTLLIILFIIVPIFLLLDKDDSKAGMEEDHTYEGLDIDQTATYEDIVTLRTGEVKWSVGEHPGQE

SEQ ID NO: 2540 - protein, 241 aa, synthetic construct; identical to SEQ ID NO: 684

SEQ ID NO: 2541 - protein, 648 aa, synthetic construct
MALPVTALLLPLALLLHAARPQIVLTQSPAIMSASPGEKVTMTCSASSSVSFMHWYQQKSGTSPKRWIYDTSTLASGVPARFGGSGSGTSYSLTISSMEAEDAATYYCQQWSSNPLTFGAGTKLELKRLEDLKNVFPPEVAVFEPSEAEISHTQKATLVCLATGFYPDHVELSWWVNGKEVHSGVCTDPQPLKEQPALNDSRYCLSSRLRVSATFWQNPRNHFRCQVQFYGLSENDEWTQDRAKPVTQIVSAEAWGRADCGFTSESYQQGVLSATILYEILLGKATLYAVLVSALVLMAMVKRKDSRGRAKRSGSGATNFSLLKQAGDVEENPGPTSATMDWIWRILFLVGAATGAHSGPARSEDRYRNPKGSGGGGSGGGGSGGGGSFEQVQLQQSGPELVKPGASVRISCKASGYTFTSYYIHWVKQRPGQGLEWIGWIYPGNLNTKYNEKFKGKATLTADKSSSTAYMQLSSLTSEDSAVYFCARYDWYFDVWGAGTTVTVSSTRIQNPDPAVYQLRDSKSSDKSVCLFTDFDSQTNVSQSKDSDVYITDKCVLDMRSMDFKSNSAVAWSNKSDFACANAFNNSIIPEDTFFPSPESSCDVKLVEKSFETDTNLNFQNLSVIGFRILLLKVAGFNLLMTLRLWSS

SEQ ID NO: 2542 - protein, 654 aa, synthetic construct
MALPVTALLLPLALLLHAARPDIQLTQSPSSLSASVGDRVTITCKASQSVDYEGDSFLNWYQQKPGKAPKLLIYAASNLESGVPSRFSGSGSGTDFTLTISSLQPEDFATYYCQQSNEDPLTFGQGTKVEIKRLEDLKNVFPPEVAVFEPSEAEISHTQKATLVCLATGFYPDHVELSWWVNGKEVHSGVCTDPQPLKEQPALNDSRYCLSSRLRVSATFWQNPRNHFRCQVQFYGLSENDEWTQDRAKPVTQIVSAEAWGRADCGFTSESYQQGVLSATILYEILLGKATLYAVLVSALVLMAMVKRKDSRGRAKRSGSGATNFSLLKQAGDVEENPGPTSATMDWIWRILFLVGAATGAHSGPARSEDRYRNPKGSGGGGSGGGGSGGGGSFEEVQLVESGGGLVQPGGSLRLSCAASGYTFSSYWIEWVRQAPGKGLEWIGEILPGGGDTNYNEIFKGRATFSADTSKNTAYLQMNSLRAEDTAVYYCTRRVPIRLDYWGQGTLVTVSSTRIQNPDPAVYQLRDSKSSDKSVCLFTDFDSQTNVSQSKDSDVYITDKCVLDMRSMDFKSNSAVAWSNKSDFACANAFNNSIIPEDTFFPSPESSCDVKLVEKSFETDTNLNFQNLSVIGFRILLLKVAGFNLLMTLRLWSS

SEQ ID NO: 2543 - protein, 752 aa, synthetic construct
MALPVTALLLPLALLLHAARPDIQMTQSPSSLSASVGDRVTITCKASDHINNWLAWYQQKPGKAPKLLIYGATTLETGVPSRFSGSGSGTDFTLTISSLQPEDFATYYCQQSWNTPWTFGQGTKVEIKRLEDLKNVFPPEVAVFEPSEAEISHTQKATLVCLATGFYPDHVELSWWVNGKEVHSGVCTDPQPLKEQPALNDSRYCLSSRLRVSATFWQNPRNHFRCQVQFYGLSENDEWTQDRAKPVTQIVSAEAWGRADCGFTSESYQQGVLSATILYEILLGKATLYAVLVSALVLMAMVKRKDSRGRAKRSGSGATNFSLLKQAGDVEENPGPTSATMDWIWRILFLVGAATGAHSGPEVQLVESGGGLVQAGGSLRLSCAASGRTFSMGWFRQAPGKEREFVAAITYSGGSPYYADSVKGRFTISRDNAKNTVYLQMNSLKPEDTAVYYCAANPTYGSDWNAENWGQGTQVTVSSGSRSEDRYRFEVQLVESGGGLVQPGGSLRLSCAASGYAFSSYWVNWVRQAPGKGLEWVAQIYPGDGDTNYNGKFKGRFTISRDNSKNTLYLQMNSLRAEDTAVYYCARSITTVVGCAMDYWGQGTLVTVSSTRIQNPDPAVYQLRDSKSSDKSVCLFTDFDSQTNVSQSKDSDVYITDKCVLDMRSMDFKSNSAVAWSNKSDFACANAFNNSIIPEDTFFPSPESSCDVKLVEKSFETDTNLNFQNLSVIGFRILLLKVAGFNLLMTLRLWSS

SEQ ID NO: 2544 - protein, 649 aa, synthetic construct
MALPVTALLLPLALLLHAARPACRSEDRYRGTGGGGSGGGGSGGGGSEFDIQMTQSPSSLSASVGDRVTITCKASDHINNWLAWYQQKPGKAPKLLIYGATTLETGVPSRFSGSGSGTDFTLTISSLQPEDFATYYCQQSWNTPWTFGQGTKVEIKRLEDLKNVFPPEVAVFEPSEAEISHTQKATLVCLATGFYPDHVELSWWVNGKEVHSGVCTDPQPLKEQPALNDSRYCLSSRLRVSATFWQNPRNHFRCQVQFYGLSENDEWTQDRAKPVTQIVSAEAWGRADCGFTSESYQQGVLSATILYEILLGKATLYAVLVSALVLMAMVKRKDSRGRAKRSGSGATNFSLLKQAGDVEENPGPTSMDWIWRILFLVGAATGAHSFEVQLVESGGGLVQPGGSLRLSCAASGYAFSSYWVNWVRQAPGKGLEWVAQIYPGDGDTNYNGKFKGRFTISRDNSKNTLYLQMNSLRAEDTAVYYCARSITTVVGCAMDYWGQGTLVTVSSTRIQNPDPAVYQLRDSKSSDKSVCLFTDFDSQTNVSQSKDSDVYITDKCVLDMRSMDFKSNSAVAWSNKSDFACANAFNNSIIPEDTFFPSPESSCDVKLVEKSFETDTNLNFQNLSVIGFRILLLKVAGFNLLMTLRLWSS

SEQ ID NO: 2545 - protein, 752 aa, synthetic construct
MALPVTALLLPLALLLHAARPDIQMTQSPSSLSASVGDRVTITCKASDHINNWLAWYQQKPGKAPKLLIYGATTLETGVPSRFSGSGSGTDFTLTISSLQPEDFATYYCQQSWNTPWTFGQGTKVEIKRLEDLKNVFPPEVAVFEPSEAEISHTQKATLVCLATGFYPDHVELSWWVNGKEVHSGVCTDPQPLKEQPALNDSRYCLSSRLRVSATFWQNPRNHFRCQVQFYGLSENDEWTQDRAKPVTQIVSAEAWGRADCGFTSESYQQGVLSATILYEILLGKATLYAVLVSALVLMAMVKRKDSRGRAKRSGSGATNFSLLKQAGDVEENPGPTSATMDWIWRILFLVGAATGAHSGPEVQLVESGGGLVQAGGSLRLSCAASGRTFTMGWFRQAPGKEREFVAAISLSPTLAYYADSVKGRFTISRDNAKNTVVLQMNSLKPEDTALYYCAADRKSVMSIRPDYWGQGTQVTVSSGSRSEDRYRFEVQLVESGGGLVQPGGSLRLSCAASGYAFSSYWVNWVRQAPGKGLEWVAQIYPGDGDTNYNGKFKGRFTISRDNSKNTLYLQMNSLRAEDTAVYYCARSITTVVGCAMDYWGQGTLVTVSSTRIQNPDPAVYQLRDSKSSDKSVCLFTDFDSQTNVSQSKDSDVYITDKCVLDMRSMDFKSNSAVAWSNKSDFACANAFNNSIIPEDTFFPSPESSCDVKLVEKSFETDTNLNFQNLSVIGFRILLLKVAGFNLLMTLRLWSS

SEQ ID NO: 2546 - protein, 1467 aa, synthetic construct
MALPVTALLLPLALLLHAARPDIQMTQSPSSLSASVGDRVTITCKASDHINNWLAWYQQKPGQAPKLLIYGATTLETGVPSRFSGSGSGTDYTLTISSLQPEDFATYYCQQSWNTPWTFGQGTKLEIKRLEDLKNVFPPEVAVFEPSEAEISHTQKATLVCLATGFYPDHVELSWWVNGKEVHSGVCTDPQPLKEQPALNDSRYCLSSRLRVSATFWQNPRNHFRCQVQFYGLSENDEWTQDRAKPVTQIVSAEAWGRADCGFTSESYQQGVLSATILYEILLGKATLYAVLVSALVLMAMVKRKDSRGRAKRSGSGATNFSLLKQAGDVEENPGPTSATMDWIWRILFLVGAATGAHSGPARSEDRYRGSGGGGSGGGGSGGGGSFEQVQLQQPGAELVKPGASVKMSCKASGYAFSSYWINWMKQKPGQGLEWIGQIYPGDGDTNYNGKFKGRATLTADTSSSTAYMQLSSLTSEDSAVYFCARSITTVVGCAMDYWGQGTSVTVSSTRIQNPDPAVYQLRDSKSSDKSVCLFTDFDSQTNVSQSKDSDVYITDKCVLDMRSMDFKSNSAVAWSNKSDFACANAFNNSIIPEDTFFPSPESSCDVKLVEKSFETDTNLNFQNLSVIGFRILLLKVAGFNLLMTLRLWSSRAKRSGSGVKQTLNFDLLKLAGDVESNPGPSSGSTMADKNILYGPEPFYPLEDGTAGEQMFDALSRYAAIPGCIALTNAHTKENVLYEEFLKLSCRLAESFKKYGLKQNDTIAVCSENSLQFFLPVIASLYLGIIVAPVNDKYIERELIHSLGIVKPRIVFCSKNTFQKVLNVKSKLKSIETIIILDLNEDLGGYQCLNNFISQNSDSNLDVKKFKPYSFNRDDQVASIMFSSGTTGLPKGVMLTHKNIVARFSIAKDPTFGNAINPTSAILTVIPFHHGFGMMTTLGYFTCGFRVVLMHTFEEKLFLQSLQDYKVESTLLVPTLMAFLAKSALVEKYDLSHLKEIASGGAPLSKEIGEMVKKRFKLNFVRQGYGLTETTSAVLITPKGDAKPGSTGKIVPLHAVKVVDPTTGKILGPNEPGELYFKGPMIMKGYYNNEEATKAIIDNDGWLRSGDIAYYDNDGHFYIVDRLKSLIKYKGYQVAPAEIEGILLQHPYIVDAGVTGIPDEAAGELPAAGVVVQTGKYLNEQIVQDYVASQVSTAKWLRGGVKFLDEIPKGSTGKIDRKVLRQMLEKHTNGLETDFYDYKDDDDKTSGSGEGRGSLLTCGDVEENPGPHMTEYKPTVRLATRDDVPRAVRTLAAAFADYPATRHTVDPDRHIERVTELQELFLTRVGLDIGKVWVADDGAAVAVWTTPESVEAGAVFAEIGPRMAELSGSRLAAQQQMEGLLAPHRPKEPAWFLATVGVSPDHQGKGLGSAVVLPGVEAAERAGVPAFLETSAPRNLPFYERLGFTVTADVEVPEGPRTWCMTRKPGA

SEQ ID NO: 2547 - protein, 476 aa, synthetic construct
MALPVTALLLPLALLLHAARPARSEDRYRNPKGSGGSELPTQGTFSNVSTNVSPAKPTTTACARSEDRYRNPKGSGGSPAPRPPTPAPTIASQPLSLRPEACRPAAGGAVHTRGLDFACDIYIWAPLAGTCGVLLLSLVITLYCNHRNRRRVCKCPRPVVGGSGGPGGSFNVLMVHRRSHTGERPFQCNQCGASFTQRGNLLRHIRLHTGERPFRCHLCNYACQRRDALTASAEARHIRAEMGRAKRSGSGVKQTLNFDLLKLAGDVESNPGPSRGHMTEYKPTVRLATRDDVPRAVRTLAAAFADYPATRHTVDPDRHIERVTELQELFLTRVGLDIGKVWVADDGAAVAVWTTPESVEAGAVFAEIGPRMAELSGSRLAAQQQMEGLLAPHRPKEPAWFLATVGVSPDHQGKGLGSAVVLPGVEAAERAGVPAFLETSAPRNLPFYERLGFTVTADVEVPEGPRTWCMTRKPGA

SEQ ID NO: 2548 - protein, 558 aa, synthetic construct
MALPVTALLLPLALLLHAARPARSEDRYRNPKGSGGSAPTSSSTKKTQLQLEHLLLDLQMILNGINNYKNPKLTRMLTFKFYMPKKATELKHLQCLEEELKPLEEVLNLAQSKNFHLRPRDLISNINVIVLELKGSETTFMCEYADETATIVEFLNRWITFCQSIISTLTAKPTTTPAPRPPTPAPTIASQPLSLRPEACRPAAGGAVHTRGLDFACDIYIWAPLAGTCGVLLLSLVITLYCGGSGGPGGSFNVLMVHRRSHTGERPFQCNQCGASFTQRGNLLRHIRLHTGERPFRCHLCNYACQRRDALTASAEARHIRAEMGRAKRSGSGVKQTLNFDLLKLAGDVESNPGPSRGHMTEYKPTVRLATRDDVPRAVRTLAAAFADYPATRHTVDPDRHIERVTELQELFLTRVGLDIGKVWVADDGAAVAVWTTPESVEAGAVFAEIGPRMAELSGSRLAAQQQMEGLLAPHRPKEPAWFLATVGVSPDHQGKGLGSAVVLPGVEAAERAGVPAFLETSAPRNLPFYERLGFTVTADVEVPEGPRTWCMTRKPGA

SEQ ID NO: 2549 - protein, 526 aa, synthetic construct
MYRMQLLSCIALSLALVTNSAPTSSSTKKTQLQLEHLLLDLQMILNGINNYKNPKLTRMLTFKFYMPKKATELKHLQCLEEELKPLEEVLNLAQSKNFHLRPRDLISNINVIVLELKGSETTFMCEYADETATIVEFLNRWITFCQSIISTLTARSEDRYRNPKGSGGSAKPTTTPAPRPVVGGSGVEGGGVQVETISPGDGRTFPKRGQTCVVHYTGMLEDGKKVDSSRDRNKPFKFMLGKQEVIRGWEEGVAQMSVGQRAKLTISPDYAYGATGHPGIIPPHATLVFDVELLKLGTSRAKRSGSGATNFSLLKQAGDVEENPGPHMTEYKPTVRLATRDDVPRAVRTLAAAFADYPATRHTVDPDRHIERVTELQELFLTRVGLDIGKVWVADDGAAVAVWTTPESVEAGAVFAEIGPRMAELSGSRLAAQQQMEGLLAPHRPKEPAWFLATVGVSPDHQGKGLGSAVVLPGVEAAERAGVPAFLETSAPRNLPFYERLGFTVTADVEVPEGPRTWCMTRKPGA

SEQ ID NO: 2550 - protein, 472 aa, synthetic construct
MALPVTALLLPLALLLHAARPARPAKSEDLYPNPKELPTQGTFSNVSTNVSPAKPTTTACAKSEDLYPNPKGGSPAPRPPTPAPTIASQPLSLRPEACRPAAGGAVHTRGLDFACDIYIWAPLAGTCGVLLLSLVITLYCNHRNRRRVCKCPRPVVGGSGGPGGSFNVLMVHRRSHTGERPFQCNQCGASFTQRGNLLRHIRLHTGERPFRCHLCNYACQRRDALTASAEARHIRAEMGRAKRSGSGVKQTLNFDLLKLAGDVESNPGPSRGHMTEYKPTVRLATRDDVPRAVRTLAAAFADYPATRHTVDPDRHIERVTELQELFLTRVGLDIGKVWVADDGAAVAVWTTPESVEAGAVFAEIGPRMAELSGSRLAAQQQMEGLLAPHRPKEPAWFLATVGVSPDHQGKGLGSAVVLPGVEAAERAGVPAFLETSAPRNLPFYERLGFTVTADVEVPEGPRTWCMTRKPGA

SEQ ID NO: 2551 - protein, 599 aa, synthetic construct
MALPVTALLLPLALLLHAARPARSEDRYRNPKGSGGSELPTQGTFSNVSTNVSPAKPTTTACARSEDRYRNPKGSGGSAPTSSSTKKTQLQLEHLLLDLQMILNGINNYKNPKLTRMLTFKFYMPKKATELKHLQCLEEELKPLEEVLNLAQSKNFHLRPRDLISNINVIVLELKGSETTFMCEYADETATIVEFLNRWITFCQSIISTLTAKPTTTPAPRPPTPAPTIASQPLSLRPEACRPAAGGAVHTRGLDFACDIYIWAPLAGTCGVLLLSLVITLYCGGSGGPGGSFNVLMVHRRSHTGERPFQCNQCGASFTQRGNLLRHIRLHTGERPFRCHLCNYACQRRDALTASAEARHIRAEMGRAKRSGSGVKQTLNFDLLKLAGDVESNPGPSRGHMTEYKPTVRLATRDDVPRAVRTLAAAFADYPATRHTVDPDRHIERVTELQELFLTRVGLDIGKVWVADDGAAVAVWTTPESVEAGAVFAEIGPRMAELSGSRLAAQQQMEGLLAPHRPKEPAWFLATVGVSPDHQGKGLGSAVVLPGVEAAERAGVPAFLETSAPRNLPFYERLGFTVTADVEVPEGPRTWCMTRKPGA

SEQ ID NO: 2552 - protein, 557 aa, synthetic construct
MYRMQLLSCIALSLALVTNSAPTSSSTKKTQLQLEHLLLDLQMILNGINNYKNPKLTRMLTFKFYMPKKATELKHLQCLEEELKPLEEVLNLAQSKNFHLRPRDLISNINVIVLELKGSETTFMCEYADETATIVEFLNRWITFCQSIISTLTARSEDRYRNPKGSGGSAKPTTTPAPRPPTPAPTIASQPLSLRPEACRPAAGGAVHTRGLDFACDIYIWAPLAGTCGVLLLSLVITLYCGGSGGPGGSFNVLMVHRRSHTGERPFQCNQCGASFTQRGNLLRHIRLHTGERPFRCHLCNYACQRRDALTASAEARHIRAEMGRAKRSGSGVKQTLNFDLLKLAGDVESNPGPSRGHMTEYKPTVRLATRDDVPRAVRTLAAAFADYPATRHTVDPDRHIERVTELQELFLTRVGLDIGKVWVADDGAAVAVWTTPESVEAGAVFAEIGPRMAELSGSRLAAQQQMEGLLAPHRPKEPAWFLATVGVSPDHQGKGLGSAVVLPGVEAAERAGVPAFLETSAPRNLPFYERLGFTVTADVEVPEGPRTWCMTRKPGA

SEQ ID NO: 2553 - protein, 545 aa, synthetic construct
MARLALSPVPSHWMVALLLLLSAEPVPAARSEDRYRNPKGSACSRIWQSPRFIARKRGFTVKMHCYMNSASGNVSWLWKQEMDENPQQLKLEKGRMEESQNESLATLTIQGIRFEDNGIYFCQQKCNNTSEVYQGCGTELRVMGFSTLAQLKQRNTLKDGIIMIQTLLIILFIIVPIFLLLDKDDSKAGMEEDHTYEGLDIDQTATYEDIVTLRTGEVKWSVGEHPGQEGGSGGPGGSFNVLMVHRRSHTGERPFQCNQCGASFTQRGNLLRHIRLHTGERPFRCHLCNYACQRRDALTASAEARHIRAEMGRAKRSGSGVKQTLNFDLLKLAGDVESNPGPSRGHMTEYKPTVRLATRDDVPRAVRTLAAAFADYPATRHTVDPDRHIERVTELQELFLTRVGLDIGKVWVADDGAAVAVWTTPESVEAGAVFAEIGPRMAELSGSRLAAQQQMEGLLAPHRPKEPAWFLATVGVSPDHQGKGLGSAVVLPGVEAAERAGVPAFLETSAPRNLPFYERLGFTVTADVEVPEGPRTWCMTRKPGA

SEQ ID NO: 2554 - protein, 853 aa, synthetic construct
MALPVTALLLPLALLLHAARPDIQMTQTTSSLSASLGDRVTISCRASQDISKYLNWYQQKPDGTVKLLIYHTSRLHSGVPSRFSGSGSGTDYSLTISNLEQEDIATYFCQQGNTLPYTFGGGTKLEITLEADVSPKPTIFLPSIAETKLQKAGTYLCLLEKFFPDVIKIHWQEKKSNTILGSQEGNTMKTNDTYMKFSWLTVPEKSLDKEHRCIVRHENNKNGVDQEIIFPPIKTDVITMDPKDNCSKDANDTLLLQLTNTSAYYMYLLLLLKSVVYFAIITCCLLRRTAFCCNGEKSRAKRSGSGATNFSLLKQAGDVEENPGPTSMDWIWRILFLVGAATGAHSFEVKLQESGPGLVAPSQSLSVTCTVSGVSLPDYGVSWIRQPPRKGLEWLGVIWGSETTYYNSALKSRLTIIKDNSKSQVFLKMNSLQTDDTAIYYCAKHYYYGGSYAMDYWGQGTSVTVSSTRPHTKPSVFVMKNGTNVACLVKEFYPKDIRINLVSSKKITEFDPAIVISPSGKYNAVKLGKYEDSNSVTCSVQHDNKTVHSTDFEVKTDSTDHVKPKETENTKQPSKSCHKPKAIVHTEKVNMMSLTVLGLRMLFAKTVAVNFLLTAKLFFLRAKRSGSGVKQTLNFDLLKLAGDVESNPGPSRGHMTEYKPTVRLATRDDVPRAVRTLAAAFADYPATRHTVDPDRHIERVTELQELFLTRVGLDIGKVWVADDGAAVAVWTTPESVEAGAVFAEIGPRMAELSGSRLAAQQQMEGLLAPHRPKEPAWFLATVGVSPDHQGKGLGSAVVLPGVEAAERAGVPAFLETSAPRNLPFYERLGFTVTADVEVPEGPRTWCMTRKPGA

SEQ ID NO: 2555 - protein, 986 aa, synthetic construct
MALPVTALLLPLALLLHAARPACEVQLLESGGGLIQPGGSLRLSCAASGFTFSSHAMTWVRQAPGKGLEWVSAISGSGDYTHYADSVKGRFTISRDNSKNTVYLQMNSLRAEDSAVYYCAKDEDGGSLLGHRGQGTLVTVSSGTRSEDRYREFDIQMTQSPSSLSASVGDRVTITCKASDHINNWLAWYQQKPGKAPKLLIYGATTLETGVPSRFSGSGSGTDFTLTISSLQPEDFATYYCQQSWNTPWTFGQGTKVEIKRLEDLKNVFPPEVAVFEPSEAEISHTQKATLVCLATGFYPDHVELSWWVNGKEVHSGVCTDPQPLKEQPALNDSRYCLSSRLRVSATFWQNPRNHFRCQVQFYGLSENDEWTQDRAKPVTQIVSAEAWGRADCGFTSESYQQGVLSATILYEILLGKATLYAVLVSALVLMAMVKRKDSRGRAKRSGSGATNFSLLKQAGDVEENPGPTSMDWIWRILFLVGAATGAHSFEVQLVESGGGLVQPGGSLRLSCAASGYAFSSYWVNWVRQAPGKGLEWVAQIYPGDGDTNYNGKFKGRFTISRDNSKNTLYLQMNSLRAEDTAVYYCARSITTVVGCAMDYWGQGTLVTVSSTRIQNPDPAVYQLRDSKSSDKSVCLFTDFDSQTNVSQSKDSDVYITDKCVLDMRSMDFKSNSAVAWSNKSDFACANAFNNSIIPEDTFFPSPESSCDVKLVEKSFETDTNLNFQNLSVIGFRILLLKVAGFNLLMTLRLWSSRAKRSGSGVKQTLNFDLLKLAGDVESNPGPSRGHMTEYKPTVRLATRDDVPRAVRTLAAAFADYPATRHTVDPDRHIERVTELQELFLTRVGLDIGKVWVADDGAAVAVWTTPESVEAGAVFAEIGPRMAELSGSRLAAQQQMEGLLAPHRPKEPAWFLATVGVSPDHQGKGLGSAVVLPGVEAAERAGVPAFLETSAPRNLPFYERLGFTVTADVEVPEGPRTWCMTRKPGA

SEQ ID NO: 2556 - protein, 808 aa, synthetic construct
MALPVTALLLPLALLLHAARPDIQMTQSPSSLSASVGDRVTITCKASQDVGTAVDWYQQKPGKAPKLLIYWASTRHTGVPSRFSGSGSGTDFTLTISSLQPEDFATYYCQQYNSYPLTFGQGTKVEIKRLEGQPKANPTVTLFPPSSEELQANKATLVCLISDFYPGAVTVAWKADGSPVKAGVETTKPSKQSNNKYAASSYLSLTPEQWKSHRSYSCQVTHEGSTVEKTVAPTECSGSQSFGLLDPKLCYLLDGILFIYGVILTALFLRVKFSRSADAPAYQQGQNQLYNELNLGRREEYDVLDKRRGRDPEMGGKPRRKNPQEGLYNELQKDKMAEAYSEIGMKGERRRGKGHDGLYQGLSTATKDTYDALHMQALPPRRAKRSGSGATNFSLLKQAGDVEENPGPTSATMDWIWRILFLVGAATGAHSARSEDRYRNPKFEVQLVESGGGLVQPGGSLRLSCAASGYTFTEYTIHWVRQAPGKGLEWVANINPNNGGTTYNQKFEDRFTISRDNSKNTLYLQMNSLRAEDTAVYYCARGWNFDYWGQGTLVTVSSTRASTKGPSVFPLAPCSRSTSESTAALGCLVKDYFPEPVTVSWNSGALTSGVHTFPAVLQSSGLYSLSSVVTVPSSSLGTKTYTCNVDHKPSNTKVDKRVESKYGGTQSFGLLDPKLCYLLDGILFIYGVILTALFLRVKFSRSADAPAYQQGQNQLYNELNLGRREEYDVLDKRRGRDPEMGGKPQRRKNPQEGLYNELQKDKMAEAYSEIGMKGERRRGKGHDGLYQGLSTATKDTYDALHMQALPPR

SEQ ID NO: 2557 - protein, 880 aa, synthetic construct
MALPVTALLLPLALLLHAARPACARSEDRYRNPKGTGGGGSGGGGSGGGGSEFDIQMTQSPSSLSASVGDRVTITCKASQDVGTAVDWYQQKPGKAPKLLIYWASTRHTGVPSRFSGSGSGTDFTLTISSLQPEDFATYYCQQYNSYPLTFGQGTKVEIKRLEDLKNVFPPEVAVFEPSEAEISHTQKATLVCLATGFYPDHVELSWWVNGKEVHSGVCTDPQPLKEQPALNDSRYCLSSRLRVSATFWQNPRNHFRCQVQFYGLSENDEWTQDRAKPVTQIVSAEAWGRADCGFTSESYQQGVLSATILYEILLGKATLYAVLVSALVLMAMVKRKDSRGRAKRSGSGATNFSLLKQAGDVEENPGPTSMDWIWRILFLVGAATGAHSFEVQLVESGGGLVQPGGSLRLSCAASGYTFTEYTIHWVRQAPGKGLEWVANINPNNGGTTYNQKFEDRFTISRDNSKNTLYLQMNSLRAEDTAVYYCARGWNFDYWGQGTLVTVSSTRIQNPDPAVYQLRDSKSSDKSVCLFTDFDSQTNVSQSKDSDVYITDKCVLDMRSMDFKSNSAVAWSNKSDFACANAFNNSIIPEDTFFPSPESSCDVKLVEKSFETDTNLNFQNLSVIGFRILLLKVAGFNLLMTLRLWSSRAKRSGSGVKQTLNFDLLKLAGDVESNPGPSRGHMTEYKPTVRLATRDDVPRAVRTLAAAFADYPATRHTVDPDRHIERVTELQELFLTRVGLDIGKVWVADDGAAVAVWTTPESVEAGAVFAEIGPRMAELSGSRLAAQQQMEGLLAPHRPKEPAWFLATVGVSPDHQGKGLGSAVVLPGVEAAERAGVPAFLETSAPRNLPFYERLGFTVTADVEVPEGPRTWCMTRKPGA

SEQ ID NO: 2558 - protein, 876 aa, synthetic construct
MALPVTALLLPLALLLHAARPACRSEDRYRGTGGGGSGGGGSGGGGSEFDIQMTQSPSSLSASVGDRVTITCKASQDVGTAVDWYQQKPGKAPKLLIYWASTRHTGVPSRFSGSGSGTDFTLTISSLQPEDFATYYCQQYNSYPLTFGQGTKVEIKRLEDLKNVFPPEVAVFEPSEAEISHTQKATLVCLATGFYPDHVELSWWVNGKEVHSGVCTDPQPLKEQPALNDSRYCLSSRLRVSATFWQNPRNHFRCQVQFYGLSENDEWTQDRAKPVTQIVSAEAWGRADCGFTSESYQQGVLSATILYEILLGKATLYAVLVSALVLMAMVKRKDSRGRAKRSGSGATNFSLLKQAGDVEENPGPTSMDWIWRILFLVGAATGAHSFEVQLVESGGGLVQPGGSLRLSCAASGYTFTEYTIHWVRQAPGKGLEWVANINPNNGGTTYNQKFEDRFTISRDNSKNTLYLQMNSLRAEDTAVYYCARGWNFDYWGQGTLVTVSSTRIQNPDPAVYQLRDSKSSDKSVCLFTDFDSQTNVSQSKDSDVYITDKCVLDMRSMDFKSNSAVAWSNKSDFACANAFNNSIIPEDTFFPSPESSCDVKLVEKSFETDTNLNFQNLSVIGFRILLLKVAGFNLLMTLRLWSSRAKRSGSGVKQTLNFDLLKLAGDVESNPGPSRGHMTEYKPTVRLATRDDVPRAVRTLAAAFADYPATRHTVDPDRHIERVTELQELFLTRVGLDIGKVWVADDGAAVAVWTTPESVEAGAVFAEIGPRMAELSGSRLAAQQQMEGLLAPHRPKEPAWFLATVGVSPDHQGKGLGSAVVLPGVEAAERAGVPAFLETSAPRNLPFYERLGFTVTADVEVPEGPRTWCMTRKPGA

SEQ ID NO: 2559 - protein, 7 aa, synthetic construct
GGGGGGG

SEQ ID NO: 2560 - protein, 490 aa, synthetic construct
MALPVTALLLPLALLLHAARPDIQMTQSPSSLSASVGDRVTITCKASDHINNWLAWYQQKPGKAPKLLIYGATTLETGVPSRFSGSGSGTDFTLTISSLQPEDFATYYCQQSWNTPWTFGQGTKVEIKRGGGGSGGGGSGGGGSEVQLVESGGGLVQPGGSLRLSCAASGYAFSSYWVNWVRQAPGKGLEWVAQIYPGDGDTNYNGKFKGRFTISRDNSKNTLYLQMNSLRAEDTAVYYCARSITTVVGCAMDYWGQGTLVTVSSTRTTTPAPRPPTPAPTIASQPLSLRPEACRPAAGGAVHTRGLDFACDIYIWAPLAGTCGVLLLSLVITLYCKRGRKKLLYIFKQPFMRPVQTTQEEDGCSCRFPEEEEGGCELRVKFSRSADAPAYQQGQNQLYNELNLGRREEYDVLDKRRGRDPEMGGKPRRKNPQEGLYNELQKDKMAEAYSEIGMKGERRRGKGHDGLYQGLSTATKDTYDALHMQALPPR

SEQ ID NO: 2561 - protein, 621 aa, synthetic construct
MALPVTALLLPLALLLHAARPDIQMTQSPSSLSASVGDRVTITCKASDHINNWLAWYQQKPGKAPKLLIYGATTLETGVPSRFSGSGSGTDFTLTISSLQPEDFATYYCQQSWNTPWTFGQGTKVEIKRLEDLKNVFPPEVAVFEPSEAEISHTQKATLVCLATGFYPDHVELSWWVNGKEVHSGVCTDPQPLKEQPALNDSRYCLSSRLRVSATFWQNPRNHFRCQVQFYGLSENDEWTQDRAKPVTQIVSAEAWGRADCGFTSESYQQGVLSATILYEILLGKATLYAVLVSALVLMAMVKRKDSRGRAKRSGSGATNFSLLKQAGDVEENPGPTSMDWIWRILFLVGAATGAHSFEVQLVESGGGLVQPGGSLRLSCAASGYAFSSYWVNWVRQAPGKGLEWVAQIYPGDGDTNYNGKFKGRFTISRDNSKNTLYLQMNSLRAEDTAVYYCARSITTVVGCAMDYWGQGTLVTVSSTRIQNPDPAVYQLRDSKSSDKSVCLFTDFDSQTNVSQSKDSDVYITDKCVLDMRSMDFKSNSAVAWSNKSDFACANAFNNSIIPEDTFFPSPESSCDVKLVEKSFETDTNLNFQNLSVIGFRILLLKVAGFNLLMTLRLWSS

SEQ ID NO: 2562 - protein, 764 aa, synthetic construct
MALPVTALLLPLALLLHAARPDIQMTQSPSSLSASVGDRVTITCKASDHINNWLAWYQQKPGKAPKLLIYGATTLETGVPSRFSGSGSGTDFTLTISSLQPEDFATYYCQQSWNTPWTFGQGTKVEIKRLEDLKNVFPPEVAVFEPSEAEISHTQKATLVCLATGFYPDHVELSWWVNGKEVHSGVCTDPQPLKEQPALNDSRYCLSSRLRVSATFWQNPRNHFRCQVQFYGLSENDEWTQDRAKPVTQIVSAEAWGRADCGFTSESYQQGVLSATILYEILLGKATLYAVLVSALVLMAMVKRKDSRGRAKRSGSGATNFSLLKQAGDVEENPGPTSATMDWIWRILFLVGAATGAHSGPQVQLQESGPGLVKPSQTLSLTCTVSGGSITTGEFYWNWFRQPPGKGLEWMGAIAASGSTTYSPSFESRTSISRDTSKNQFSLKLSSVTAADTAVYYCGRSFGVAAVTTGQNRGQGTLVTVSSGSGGGGSGGGGSGGGGSFEVQLVESGGGLVQPGGSLRLSCAASGYAFSSYWVNWVRQAPGKGLEWVAQIYPGDGDTNYNGKFKGRFTISRDNSKNTLYLQMNSLRAEDTAVYYCARSITTVVGCAMDYWGQGTLVTVSSTRIQNPDPAVYQLRDSKSSDKSVCLFTDFDSQTNVSQSKDSDVYITDKCVLDMRSMDFKSNSAVAWSNKSDFACANAFNNSIIPEDTFFPSPESSCDVKLVEKSFETDTNLNFQNLSVIGFRILLLKVAGFNLLMTLRLWSS

SEQ ID NO: 2563 - protein, 762 aa, synthetic construct; identical to SEQ ID NO: 2450

SEQ ID NO: 2564 - protein, 760 aa, synthetic construct
MALPVTALLLPLALLLHAARPDIQMTQSPSSLSASVGDRVTITCKASDHINNWLAWYQQKPGKAPKLLIYGATTLETGVPSRFSGSGSGTDFTLTISSLQPEDFATYYCQQSWNTPWTFGQGTKVEIKRLEDLKNVFPPEVAVFEPSEAEISHTQKATLVCLATGFYPDHVELSWWVNGKEVHSGVCTDPQPLKEQPALNDSRYCLSSRLRVSATFWQNPRNHFRCQVQFYGLSENDEWTQDRAKPVTQIVSAEAWGRADCGFTSESYQQGVLSATILYEILLGKATLYAVLVSALVLMAMVKRKDSRGRAKRSGSGATNFSLLKQAGDVEENPGPTSATMDWIWRILFLVGAATGAHSGPQLQLQESGPGLVKPSETLSLTCTVSGDSISSGDYYWGWIRQPPGKGLEWIGHIYYSGISYYNPSLKSRVTISVDTSRNQFSLKLSSVTAADTAVYYCTREDSSNWRSRGQGTLVTVSSGSGGGGSGGGGSGGGGSFEVQLVESGGGLVQPGGSLRLSCAASGYAFSSYWVNWVRQAPGKGLEWVAQIYPGDGDTNYNGKFKGRFTISRDNSKNTLYLQMNSLRAEDTAVYYCARSITTVVGCAMDYWGQGTLVTVSSTRIQNPDPAVYQLRDSKSSDKSVCLFTDFDSQTNVSQSKDSDVYITDKCVLDMRSMDFKSNSAVAWSNKSDFACANAFNNSIIPEDTFFPSPESSCDVKLVEKSFETDTNLNFQNLSVIGFRILLLKVAGFNLLMTLRLWSS

SEQ ID NO: 2565 - protein, 760 aa, synthetic construct
MALPVTALLLPLALLLHAARPDIQMTQSPSSLSASVGDRVTITCKASDHINNWLAWYQQKPGKAPKLLIYGATTLETGVPSRFSGSGSGTDFTLTISSLQPEDFATYYCQQSWNTPWTFGQGTKVEIKRLEDLKNVFPPEVAVFEPSEAEISHTQKATLVCLATGFYPDHVELSWWVNGKEVHSGVCTDPQPLKEQPALNDSRYCLSSRLRVSATFWQNPRNHFRCQVQFYGLSENDEWTQDRAKPVTQIVSAEAWGRADCGFTSESYQQGVLSATILYEILLGKATLYAVLVSALVLMAMVKRKDSRGRAKRSGSGATNFSLLKQAGDVEENPGPTSATMDWIWRILFLVGAATGAHSGPQLQLQESGPGLVKPSETLSLTCTVSGDSISSGDYYWGWIRQPPGKGLEWIGHIYYNGISYYNPSLKSRVTISVDTSRNQFSLKLSSVTAADTAVYYCTREDSSNWRSRGQGTLVTVSSGSGGGGSGGGGSGGGGSFEVQLVESGGGLVQPGGSLRLSCAASGYAFSSYWVNWVRQAPGKGLEWVAQIYPGDGDTNYNGKFKGRFTISRDNSKNTLYLQMNSLRAEDTAVYYCARSITTVVGCAMDYWGQGTLVTVSSTRIQNPDPAVYQLRDSKSSDKSVCLFTDFDSQTNVSQSKDSDVYITDKCVLDMRSMDFKSNSAVAWSNKSDFACANAFNNSIIPEDTFFPSPESSCDVKLVEKSFETDTNLNFQNLSVIGFRILLLKVAGFNLLMTLRLWSS

SEQ ID NO: 2566 - protein, 7 aa, synthetic construct
GGGGGGG

SEQ ID NO: 2567 - protein, 760 aa, synthetic construct
MALPVTALLLPLALLLHAARPDIQMTQSPSSLSASVGDRVTITCKASDHINNWLAWYQQKPGKAPKLLIYGATTLETGVPSRFSGSGSGTDFTLTISSLQPEDFATYYCQQSWNTPWTFGQGTKVEIKRLEDLKNVFPPEVAVFEPSEAEISHTQKATLVCLATGFYPDHVELSWWVNGKEVHSGVCTDPQPLKEQPALNDSRYCLSSRLRVSATFWQNPRNHFRCQVQFYGLSENDEWTQDRAKPVTQIVSAEAWGRADCGFTSESYQQGVLSATILYEILLGKATLYAVLVSALVLMAMVKRKDSRGRAKRSGSGATNFSLLKQAGDVEENPGPTSATMDWIWRILFLVGAATGAHSGPQLQLQESGPGLVKPSETLSLTCTVSGDSISSGDYYWGWIRQPPGKGLEWIGHIYYSGVTYYNPSLKSRVTISVDTSRNQFSLKLSSVTAADTAVYYCTREDSSNWRSRGQGTLVTVSSGSGGGGSGGGGSGGGGSFEVQLVESGGGLVQPGGSLRLSCAASGYAFSSYWVNWVRQAPGKGLEWVAQIYPGDGDTNYNGKFKGRFTISRDNSKNTLYLQMNSLRAEDTAVYYCARSITTVVGCAMDYWGQGTLVTVSSTRIQNPDPAVYQLRDSKSSDKSVCLFTDFDSQTNVSQSKDSDVYITDKCVLDMRSMDFKSNSAVAWSNKSDFACANAFNNSIIPEDTFFPSPESSCDVKLVEKSFETDTNLNFQNLSVIGFRILLLKVAGFNLLMTLRLWSS

SEQ ID NO: 2568 - protein, 758 aa, synthetic construct
MALPVTALLLPLALLLHAARPDIQMTQSPSSLSASVGDRVTITCKASDHINNWLAWYQQKPGKAPKLLIYGATTLETGVPSRFSGSGSGTDFTLTISSLQPEDFATYYCQQSWNTPWTFGQGTKVEIKRLEDLKNVFPPEVAVFEPSEAEISHTQKATLVCLATGFYPDHVELSWWVNGKEVHSGVCTDPQPLKEQPALNDSRYCLSSRLRVSATFWQNPRNHFRCQVQFYGLSENDEWTQDRAKPVTQIVSAEAWGRADCGFTSESYQQGVLSATILYEILLGKATLYAVLVSALVLMAMVKRKDSRGRAKRSGSGATNFSLLKQAGDVEENPGPTSATMDWIWRILFLVGAATGAHSGPQLQLQESGPGLVKPSETLSLTCTVSGDSISSGDYYWGWIRQPPGKGLEWIGHIYYNGISYYNPSLKSRVTISVDTSRNQFSLKLSSVTAADTAVYYCTREDSSNWRSRGQGTLVTVSSGSARSEDRYRNPKGSFEVQLVESGGGLVQPGGSLRLSCAASGYAFSSYWVNWVRQAPGKGLEWVAQIYPGDGDTNYNGKFKGRFTISRDNSKNTLYLQMNSLRAEDTAVYYCARSITTVVGCAMDYWGQGTLVTVSSTRIQNPDPAVYQLRDSKSSDKSVCLFTDFDSQTNVSQSKDSDVYITDKCVLDMRSMDFKSNSAVAWSNKSDFACANAFNNSIIPEDTFFPSPESSCDVKLVEKSFETDTNLNFQNLSVIGFRILLLKVAGFNLLMTLRLWSS

SEQ ID NO: 2569 - protein, 752 aa, synthetic construct
MALPVTALLLPLALLLHAARPDIQMTQSPSSLSASVGDRVTITCKASDHINNWLAWYQQKPGKAPKLLIYGATTLETGVPSRFSGSGSGTDFTLTISSLQPEDFATYYCQQSWNTPWTFGQGTKVEIKRLEDLKNVFPPEVAVFEPSEAEISHTQKATLVCLATGFYPDHVELSWWVNGKEVHSGVCTDPQPLKEQPALNDSRYCLSSRLRVSATFWQNPRNHFRCQVQFYGLSENDEWTQDRAKPVTQIVSAEAWGRADCGFTSESYQQGVLSATILYEILLGKATLYAVLVSALVLMAMVKRKDSRGRAKRSGSGATNFSLLKQAGDVEENPGPTSATMDWIWRILFLVGAATGAHSGPQLQLQESGPGLVKPSETLSLTCTVSGDSISSGDYYWGWIRQPPGKGLEWIGHIYYSGISYYNPSLKSRVTISVDTSRNQFSLKLSSVTAADTAVYYCTREDSSNWRSRGQGTLVTVSSGSRSEDRYRFEVQLVESGGGLVQPGGSLRLSCAASGYAFSSYWVNWVRQAPGKGLEWVAQIYPGDGDTNYNGKFKGRFTISRDNSKNTLYLQMNSLRAEDTAVYYCARSITTVVGCAMDYWGQGTLVTVSSTRIQNPDPAVYQLRDSKSSDKSVCLFTDFDSQTNVSQSKDSDVYITDKCVLDMRSMDFKSNSAVAWSNKSDFACANAFNNSIIPEDTFFPSPESSCDVKLVEKSFETDTNLNFQNLSVIGFRILLLKVAGFNLLMTLRLWSS

SEQ ID NO: 2570 - protein, 752 aa, synthetic construct
MALPVTALLLPLALLLHAARPDIQMTQSPSSLSASVGDRVTITCKASDHINNWLAWYQQKPGKAPKLLIYGATTLETGVPSRFSGSGSGTDFTLTISSLQPEDFATYYCQQSWNTPWTFGQGTKVEIKRLEDLKNVFPPEVAVFEPSEAEISHTQKATLVCLATGFYPDHVELSWWVNGKEVHSGVCTDPQPLKEQPALNDSRYCLSSRLRVSATFWQNPRNHFRCQVQFYGLSENDEWTQDRAKPVTQIVSAEAWGRADCGFTSESYQQGVLSATILYEILLGKATLYAVLVSALVLMAMVKRKDSRGRAKRSGSGATNFSLLKQAGDVEENPGPTSATMDWIWRILFLVGAATGAHSGPQLQLQESGPGLVKPSETLSLTCTVSGDSISSGDYYWGWIRQPPGKGLEWIGHIYYNGISYYNPSLKSRVTISVDTSRNQFSLKLSSVTAADTAVYYCTREDSSNWRSRGQGTLVTVSSGSRSEDRYRFEVQLVESGGGLVQPGGSLRLSCAASGYAFSSYWVNWVRQAPGKGLEWVAQIYPGDGDTNYNGKFKGRFTISRDNSKNTLYLQMNSLRAEDTAVYYCARSITTVVGCAMDYWGQGTLVTVSSTRIQNPDPAVYQLRDSKSSDKSVCLFTDFDSQTNVSQSKDSDVYITDKCVLDMRSMDFKSNSAVAWSNKSDFACANAFNNSIIPEDTFFPSPESSCDVKLVEKSFETDTNLNFQNLSVIGFRILLLKVAGFNLLMTLRLWSS

SEQ ID NO: 2571 - protein, 756 aa, synthetic construct
MALPVTALLLPLALLLHAARPDIQMTQSPSSLSASVGDRVTITCKASDHINNWLAWYQQKPGKAPKLLIYGATTLETGVPSRFSGSGSGTDFTLTISSLQPEDFATYYCQQSWNTPWTFGQGTKVEIKRLEDLKNVFPPEVAVFEPSEAEISHTQKATLVCLATGFYPDHVELSWWVNGKEVHSGVCTDPQPLKEQPALNDSRYCLSSRLRVSATFWQNPRNHFRCQVQFYGLSENDEWTQDRAKPVTQIVSAEAWGRADCGFTSESYQQGVLSATILYEILLGKATLYAVLVSALVLMAMVKRKDSRGRAKRSGSGATNFSLLKQAGDVEENPGPTSATMDWIWRILFLVGAATGAHSGPQVQLQESGPGLVKPSQTLSLTCTVSGGSITTGEFYWNWFRQPPGKGLEWMGAIAASGSTTYSPSFESRTSISRDTSKNQFSLKLSSVTAADTAVYYCGRSFGVAAVTTGQNRGQGTLVTVSSGSRSEDRYRFEVQLVESGGGLVQPGGSLRLSCAASGYAFSSYWVNWVRQAPGKGLEWVAQIYPGDGDTNYNGKFKGRFTISRDNSKNTLYLQMNSLRAEDTAVYYCARSITTVVGCAMDYWGQGTLVTVSSTRIQNPDPAVYQLRDSKSSDKSVCLFTDFDSQTNVSQSKDSDVYITDKCVLDMRSMDFKSNSAVAWSNKSDFACANAFNNSIIPEDTFFPSPESSCDVKLVEKSFETDTNLNFQNLSVIGFRILLLKVAGFNLLMTLRLWSS

SEQ ID NO: 2572 - protein, 485 aa, synthetic construct
MALPVTALLLPLALLLHAARPQIVLTQSPAIMSVSPGEKVTMTCSASSSVNYMHWFQQKPGTSPKLWVYSTSNLASGVPARFSGSGSGTSYSLTISSMEAEDAATYYCQQRSIYPPWTFGGGTKLEIKGGGGSGGGGSGGGGSEVQLQQSGPELVKPGASVKISCKASGYSFTGYTMNWVKQSHGKNLEWIGLINPYNGGTSYNQKFKAKATLTVDKSSSTAYMQLKSLTSEDSAVYYCARDYGYVLDYWGQGTSVTVSSTRTTTPAPRPPTPAPTIASQPLSLRPEACRPAAGGAVHTRGLDFACDIYIWAPLAGTCGVLLLSLVITLYCKRGRKKLLYIFKQPFMRPVQTTQEEDGCSCRFPEEEEGGCELRVKFSRSADAPAYQQGQNQLYNELNLGRREEYDVLDKRRGRDPEMGGKPRRKNPQEGLYNELQKDKMAEAYSEIGMKGERRRGKGHDGLYQGLSTATKDTYDALHMQALPPR

SEQ ID NO: 2573 - protein, 637 aa, synthetic construct; identical to SEQ ID NO: 2421

SEQ ID NO: 2574 - protein, 669 aa, synthetic construct; identical to SEQ ID NO: 2390

SEQ ID NO: 2575 - protein, 492 aa, synthetic construct
MALPVTALLLPLALLLHAARPDIVMTQSPDSLAVSLGERATINCKSSQSLLNSGNNKNYVTWYQQKPGQPPKLLIYWGSTRSTGVPDRFSGSGSGTDFTLTISSLQAEDVAVYYCQNDYTYPFTFGQGTKLEIKGGGGSGGGGSGGGGSQVQLVQSGAEVKKPGASVKVSCKASGYTFTSFWLNWVRQAPGQGLEWMGNIYPSDSYTVYNQKFKDRVTMTRDTSTSTVYMELSSLRSEDTAVYYCARTWRGNSFDYWGQGTTVTVSSTRTTTPAPRPPTPAPTIASQPLSLRPEACRPAAGGAVHTRGLDFACDIYIWAPLAGTCGVLLLSLVITLYCKRGRKKLLYIFKQPFMRPVQTTQEEDGCSCRFPEEEEGGCELRVKFSRSADAPAYQQGQNQLYNELNLGRREEYDVLDKRRGRDPEMGGKPRRKNPQEGLYNELQKDKMAEAYSEIGMKGERRRGKGHDGLYQGLSTATKDTYDALHMQALPPR

SEQ ID NO: 2576 - protein, 645 aa, synthetic construct
MALPVTALLLPLALLLHAARPACARSEDRYWNPKGTDIVMTQSPDSLAVSLGERATINCKSSQSLLNSGNNKNYVTWYQQKPGQPPKLLIYWGSTRSTGVPDRFSGSGSGTDFTLTISSLQAEDVAVYYCQNDYTYPFTFGQGTKLEIKLEIQNPDPAVYQLRDSKSSDKSVCLFTDFDSQTNVSQSKDSDVYITDKCVLDMRSMDFKSNSAVAWSNKSDFACANAFNNSIIPEDTFFPSPESSCDVKLVEKSFETDTNLNFQNLSVIGFRILLLKVAGFNLLMTLRLWSSSSRAKRSGSGVKQTLNFDLLKLAGDVESNPGPTSMDWIWRILFLVGAATGAHSFEQVQLVQSGAEVKKPGASVKVSCKASGYTFTSFWLNWVRQAPGQGLEWMGNIYPSTSYTVYNQKFKDRVTMTRDTSTSTVYMELSSLRSEDTAVYYCARTWRGNSFDYWGQGTTVTVSSTREDLKNVFPPEVAVFEPSEAEISHTQKATLVCLATGFYPDHVELSWWVNGKEVHSGVCTDPQPLKEQPALNDSRYCLSSRLRVSATFWQNPRNHFRCQVQFYGLSENDEWTQDRAKPVTQIVSAEAWGRADCGFTSESYQQGVLSATILYEILLGKATLYAVLVSALVLMAMVKRKDSRG

SEQ ID NO: 2577 - protein, 671 aa, synthetic construct
MALPVTALLLPLALLLHAARPACARSEDRYRNPKGTDIVMTQSPDSLAVSLGERATINCKSSQSLLNSGNQKNYLAWYQQKPGQPPKLLIYWGSTRSTGVPDRFSGSGSGTDFTLTISSLQAEDVAVYYCQNDYTYPFTFGQGTKLEIKLEDLKNVFPPEVAVFEPSEAEISHTQKATLVCLATGFYPDHVELSWWVNGKEVHSGVCTDPQPLKEQPALNDSRYCLSSRLRVSATFWQNPRNHFRCQVQFYGLSENDEWTQDRAKPVTQIVSAEAWGRADCGFTSESYQQGVLSATILYEILLGKATLYAVLVSALVLMAMVKRKDSRGRAKRSGSGATNFSLLKQAGDVEENPGPTSATMDWIWRILFLVGAATGAHSGPARSEDRYRNPKGSGGGGSGGGGSGGGGSFEQVQLVQSGAEVKKPGASVKVSCKASGYTFTSFWLNWVRQAPGQGLEWMGNIYPSDSYTVYNQKFKDRVTMTRDTSTSTVYMELSSLRSEDTAVYYCARTWRGNSFDYWGQGTTVTVSSTRIQNPDPAVYQLRDSKSSDKSVCLFTDFDSQTNVSQSKDSDVYITDKCVLDMRSMDFKSNSAVAWSNKSDFACANAFNNSIIPEDTFFPSPESSCDVKLVEKSFETDTNLNFQNLSVIGFRILLLKVAGFNLLMTLRLWSS

SEQ ID NO: 2578 - protein, 643 aa, synthetic construct; identical to SEQ ID NO: 2403

SEQ ID NO: 2579 - protein, 639 aa, synthetic construct; identical to SEQ ID NO: 2404

SEQ ID NO: 2580 - protein, 675 aa, synthetic construct; identical to SEQ ID NO: 2389

SEQ ID NO: 2581 - protein, 974 aa, synthetic construct
MALPVTALLLPLALLLHAARPDIQMTQSPSSLSASVGDRVTITCKASDHINNWLAWYQQKPGQAPKLLIYGATTLETGVPSRFSGSGSGTDYTLTISSLQPEDFATYYCQQSWNTPWTFGQGTKLEIKRLEDLKNVFPPEVAVFEPSEAEISHTQKATLVCLATGFYPDHVELSWWVNGKEVHSGVSTDPQPLKEQPALNDSRYCLSSRLRVSATFWQNPRNHFRCQVQFYGLSENDEWTQDRAKPVTQIVSAEAWGRADCGSQSFGLLDPKLCYLLDGILFIYGVILTALFLRVKFSRSADAPAYQQGQNQLYNELNLGRREEYDVLDKRRGRDPEMGGKPRRKNPQEGLYNELQKDKMAEAYSEIGMKGERRRGKGHDGLYQGLSTATKDTYDALHMQALPPRRAKRSGSGATNFSLLKQAGDVEENPGPTSMDWIWRILFLVGAATGAHSFEQVQLQQPGAELVKPGASVKMSCKASGYAFSSYWINWMKQKPGQGLEWIGQIYPGDGDTNYNGKFKGRATLTADTSSSTAYMQLSSLTSEDSAVYFCARSITTVVGCAMDYWGQGTSVTVSSTRIQNPDPAVYQLRDSKSSDKSVCLFTDFDSQTNVSQSKDSDVYITDKTVLDMRSMDFKSNSAVAWSNKSDFACANAFNNSIIPEDTFFPSPESSCGTITQGLAVSTISSFFPPGYQVSFCLVMVLLFAVDTGLYFSVKTNIRSSTRDWKDHKFKWRKDPQDKRAKRSGSGATNFSLLKQAGDVEENPGPSRMYRMQLLSCIALSLALVTNSNWVNVISDLKKIEDLIQSMHIDATLYTESDVHPSCKVTAMKCFLLELQVISLESGDASIHDTVKNLIILANNSLSSNGNVTESGCKECEELEEKNIKEFLQSFVHIVQMFINTSKIEVMYPPPYLDNEKSNGTIIHVKGKHLCPSPLFPGPSKPFWVLVVVGGVLACYSLLVTVAFIIFWVRSKRS

SEQ ID NO: 2582 - protein, 505 aa, synthetic construct
MALPVTALLLPLALLLHAARPDIQMTQSPSSLSASVGDRVTITCKASDHINNWLAWYQQKPGQAPKLLIYGATTLETGVPSRFSGSGSGTDYTLTISSLQPEDFATYYCQQSWNTPWTFGQGTKLEIKRGGGGSGGGGSGGGGSQVQLQQPGAELVKPGASVKMSCKASGYAFSSYWINWMKQKPGQGLEWIGQIYPGDGDTNYNGKFKGRATLTADTSSSTAYMQLSSLTSEDSAVYFCARSITTVVGCAMDYWGQGTSVTVSSTRGMRTEDLPKAVVFLEPQWYRVLEKDSVTLKCQGAYSPEDNSTQWFHNESLISSQASSYFIDAATVDDSGEYRCQTNLSTLSDPVQLEVHIGWLLLQAPRWVFKEEDPIHLRCHSWKNTALHKVTYLQNGKGRKYFHHNSDFYIPKATLKDSGSYFCRGLVGSKNVSSETVNITITQGLAVPTISSFFPPGYQVSFCLVMVLLFAVDTGLYFSVKTNIRSSTRDWKDHKFKWRKDPQDK

SEQ ID NO: 2583 - protein, 490 aa, synthetic construct
MALPVTALLLPLALLLHAARPDIQMTQSPSSLSASVGDRVTITCKASDHINNWLAWYQQKPGQAPKLLIYGATTLETGVPSRFSGSGSGTDYTLTISSLQPEDFATYYCQQSWNTPWTFGQGTKLEIKRGGGGSGGGGSGGGGSQVQLQQPGAELVKPGASVKMSCKASGYAFSSYWINWMKQKPGQGLEWIGQIYPGDGDTNYNGKFKGRATLTADTSSSTAYMQLSSLTSEDSAVYFCARSITTVVGCAMDYWGQGTSVTVSSTRTTTPAPRPPTPAPTIASQPLSLRPEACRPAAGGAVHTRGLDFACDIYIWAPLAGTCGVLLLSLVITLYCKRGRKKLLYIFKQPFMRPVQTTQEEDGCSCRFPEEEEGGCELRVKFSRSADAPAYQQGQNQLYNELNLGRREEYDVLDKRRGRDPEMGGKPRRKNPQEGLYNELQKDKMAEAYSEIGMKGERRRGKGHDGLYQGLSTATKDTYDALHMQALPPR

SEQ ID NO: 2584 - protein, 1062 aa, synthetic construct; identical to SEQ ID NO: 2461

SEQ ID NO: 2585 - protein, 499 aa, synthetic construct
MALPVTALLLPLALLLHAARPDIQMTQSPSSLSASVGDRVTITCKASQDVGTAVDWYQQKPGKAPKLLIYWASTRHTGVPSRFSGSGSGTDFTLTISSLQPEDFATYYCQQYNSYPLTFGQGTKVEIKRGGGGSGGGGSGGGGSEVQLVESGGGLVQPGGSLRLSCAASGYTFTEYTIHWVRQAPGKGLEWVANINPNNGGTTYNQKFEDRFTISRDNSKNTLYLQMNSLRAEDTAVYYCARGWNFDYWGQGTLVTVSSTRGMRTEDLPKAVVFLEPQWYRVLEKDSVTLKCQGAYSPEDNSTQWFHNESLISSQASSYFIDAATVDDSGEYRCQTNLSTLSDPVQLEVHIGWLLLQAPRWVFKEEDPIHLRCHSWKNTALHKVTYLQNGKGRKYFHHNSDFYIPKATLKDSGSYFCRGLVGSKNVSSETVNITITQGLAVPTISSFFPPGYQVSFCLVMVLLFAVDTGLYFSVKTNIRSSTRDWKDHKFKWRKDPQDK

SEQ ID NO: 2586 - protein, 484 aa, synthetic construct; identical to SEQ ID NO: 2477

SEQ ID NO: 2587 - protein, 1056 aa, synthetic construct; identical to SEQ ID NO: 2488

SEQ ID NO: 2588 - protein, 1020 aa, synthetic construct; identical to SEQ ID NO: 2489

SEQ ID NO: 2589 - protein, 622 aa, synthetic construct
MALPVTALLLPLALLLHAARPDIQMTQSPSSLSASVGDRVTITCKASDHINNWLAWYQQKPGQAPKLLIYGATTLETGVPSRFSGSGSGTDYTLTISSLQPEDFATYYCQQSWNTPWTFGQGTKLEIKRLEDLKNVFPPEVAVFEPSEAEISHTQKATLVCLATGFYPDHVELSWWVNGKEVHSGVCTDPQPLKEQPALNDSRYCLSSRLRVSATFWQNPRNHFRCQVQFYGLSENDEWTQDRAKPVTQIVSAEAWGRADCGFTSESYQQGVLSATILYEILLGKATLYAVLVSALVLMAMVKRKDSRGRAKRSGSGATNFSLLKQAGDVEENPGPTSMDWIWRILFLVGAATGAHSFEQVQLQQPGAELVKPGASVKMSCKASGYAFSSYWINWMKQKPGQGLEWIGQIYPGDGDTNYNGKFKGRATLTADTSSSTAYMQLSSLTSEDSAVYFCARSITTVVGCAMDYWGQGTSVTVSSTRIQNPDPAVYQLRDSKSSDKSVCLFTDFDSQTNVSQSKDSDVYITDKCVLDMRSMDFKSNSAVAWSNKSDFACANAFNNSIIPEDTFFPSPESSCDVKLVEKSFETDTNLNFQNLSVIGFRILLLKVAGFNLLMTLRLWSS

SEQ ID NO: 2590 - protein, 814 aa, synthetic construct; identical to SEQ ID NO: 2414

SEQ ID NO: 2591 - protein, 622 aa, synthetic construct; identical to SEQ ID NO: 2416

SEQ ID NO: 2592 - protein, 760 aa, synthetic construct; identical to SEQ ID NO: 2417

SEQ ID NO: 2593 - protein, 760 aa, synthetic construct; identical to SEQ ID NO: 2418

SEQ ID NO: 2594 - protein, 634 aa, synthetic construct
MALPVTALLLPLALLLHAARPQVQLQQSGPGLVKPSQTLSLTCAISGDSVSSNRAAWNWIRQSPSRGLQWLGRTYYRSKWYNDYAVSLRSRITINPVTSKNQVALHMNSVTPEDTAVYYCARAGIVVVPGPETFYYYDHGLDVWGQGTTVTVSSLEDLKNVFPPEVAVFEPSEAEISHTQKATLVCLATGFYPDHVELSWWVNGKEVHSGVCTDPQPLKEQPALNDSRYCLSSRLRVSATFWQNPRNHFRCQVQFYGLSENDEWTQDRAKPVTQIVSAEAWGRADCGFTSESYQQGVLSATILYEILLGKATLYAVLVSALVLMAMVKRKDSRGRAKRSGSGATNFSLLKQAGDVEENPGPTSMDWIWRILFLVGAATGAHSFEDIQMTQSPSSLSASVGDRVTITCRASQSIRNYLNWYQQKPGKAPELLIHAASSLQSGVPSRFSGSGSGTDFTLTISSLQPEDFASYYCQQSYSAPPITFGQGTRLEIKTRIQNPDPAVYQLRDSKSSDKSVCLFTDFDSQTNVSQSKDSDVYITDKCVLDMRSMDFKSNSAVAWSNKSDFACANAFNNSIIPEDTFFPSPESSCDVKLVEKSFETDTNLNFQNLSVIGFRILLLKVAGFNLLMTLRLWSS

SEQ ID NO: 2595 - protein, 666 aa, synthetic construct; identical to SEQ ID NO: 2382

SEQ ID NO: 2596 - protein, 649 aa, synthetic construct; identical to SEQ ID NO: 2402

SEQ ID NO: 2597 - protein, 492 aa, synthetic construct; identical to SEQ ID NO: 2575

SEQ ID NO: 2598 - protein, 630 aa, synthetic construct
MALPVTALLLPLALLLHAARPDIVMTQSPDSLAVSLGERATINCKSSQSLLNSGNNKNYVTWYQQKPGQPPKLLIYWGSTRSTGVPDRFSGSGSGTDFTLTISSLQAEDVAVYYCQNDYTYPFTFGQGTKLEIKLEIQNPDPAVYQLRDSKSSDKSVCLFTDFDSQTNVSQSKDSDVYITDKCVLDMRSMDFKSNSAVAWSNKSDFACANAFNNSIIPEDTFFPSPESSCDVKLVEKSFETDTNLNFQNLSVIGFRILLLKVAGFNLLMTLRLWSSSSRAKRSGSGVKQTLNFDLLKLAGDVESNPGPTSMDWIWRILFLVGAATGAHSFEQVQLVQSGAEVKKPGASVKVSCKASGYTFTSFWLNWVRQAPGQGLEWMGNIYPSTSYTVYNQKFKDRVTMTRDTSTSTVYMELSSLRSEDTAVYYCARTWRGNSFDYWGQGTTVTVSSTREDLKNVFPPEVAVFEPSEAEISHTQKATLVCLATGFYPDHVELSWWVNGKEVHSGVCTDPQPLKEQPALNDSRYCLSSRLRVSATFWQNPRNHFRCQVQFYGLSENDEWTQDRAKPVTQIVSAEAWGRADCGFTSESYQQGVLSATILYEILLGKATLYAVLVSALVLMAMVKRKDSRG

SEQ ID NO: 2599 - protein, 628 aa, synthetic construct
MALPVTALLLPLALLLHAARPDIVMTQSPDSLAVSLGERATINCKSSQSLLNSGNQKNYLAWYQQKPGQPPKLLIYWGSTRSTGVPDRFSGSGSGTDFTLTISSLQAEDVAVYYCQNDYTYPFTFGQGTKLEIKLEIQNPDPAVYQLRDSKSSDKSVCLFTDFDSQTNVSQSKDSDVYITDKCVLDMRSMDFKSNSAVAWSNKSDFACANAFNNSIIPEDTFFPSSDVPCDVKLVEKSFETDTNLNFQNLSVIGFRILLLKVAGFNLLMTLRLWSSRAKRSGSGVKQTLNFDLLKLAGDVESNPGPTSMDWIWRILFLVGAATGAHSFEQVQLVQSGAEVKKPGASVKVSCKASGYTFTSFWLNWVRQAPGQGLEWMGNIYPSTSYTVYNQKFKDRVTMTRDTSTSTVYMELSSLRSEDTAVYYCARTWRGNSFDYWGQGTTVTVSSTREDLKNVFPPEVAVFEPSKAEIAHTQKATLVCLATGFYPDHVELSWWVNGKEVHSGVCTDPQPLKEQPALNDSRYCLSSRLRVSATFWQNPRNHFRCQVQFYGLSENDEWTQDRAKPVTQIVSAEAWGRADCGITSASYHQGVLSATILYEILLGKATLYAVLVSALVLMAMVKRKDSRG

SEQ ID NO: 2600 - protein, 630 aa, synthetic construct
MALPVTALLLPLALLLHAARPDIVMTQSPDSLAVSLGERATINCKSSQSLLNSGNQKNYLAWYQQKPGQPPKLLIYWGSTRSTGVPDRFSGSGSGTDFTLTISSLQAEDVAVYYCQNDYTYPFTFGQGTKLEIKLEIQNPDPAVYQLRDSKSSDKSVCLFTDFDSQTNVSQSKDSDVYITDKCVLDMRSMDFKSNSAVAWSNKSDFACANAFNNSIIPEDTFFPSPESSCDVKLVEKSFETDTNLNFQNLSVIGFRILLLKVAGFNLLMTLRLWSSSSRAKRSGSGVKQTLNFDLLKLAGDVESNPGPTSMDWIWRILFLVGAATGAHSFEQVQLVQSGAEVKKPGASVKVSCKASGYTFTSFWLNWVRQAPGQGLEWMGNIYPSTSYTVYNQKFKDRVTMTRDTSTSTVYMELSSLRSEDTAVYYCARTWRGNSFDYWGQGTTVTVSSTREDLKNVFPPEVAVFEPSEAEISHTQKATLVCLATGFYPDHVELSWWVNGKEVHSGVCTDPQPLKEQPALNDSRYCLSSRLRVSATFWQNPRNHFRCQVQFYGLSENDEWTQDRAKPVTQIVSAEAWGRADCGFTSESYQQGVLSATILYEILLGKATLYAVLVSALVLMAMVKRKDSRG

SEQ ID NO: 2601 - protein, 630 aa, synthetic construct
MALPVTALLLPLALLLHAARPDIVMTQSPDSLAVSLGERATINCKSSQSLLNSGNQKNYLAWYQQKPGQPPKLLIYWGSTRSTGVPDRFSGSGSGTDFTLTISSLQAEDVAVYYCQNDYTYPFTFGQGTKLEIKLEIQNPDPAVYQLRDSKSSDKSVCLFTDFDSQTNVSQSKDSDVYITDKCVLDMRSMDFKSNSAVAWSNKSDFACANAFNNSIIPEDTFFPSPESSCDVKLVEKSFETDTNLNFQNLSVIGFRILLLKVAGFNLLMTLRLWSSSSRAKRSGSGVKQTLNFDLLKLAGDVESNPGPTSMDWIWRILFLVGAATGAHSFEQVQLVQSGAEVKKPGASVKVSCKASGYTFTSFWLNWVRQAPGQGLEWMGNIYPSDSYTVYNQKFKDRVTMTRDTSTSTVYMELSSLRSEDTAVYYCARTWRGNSFDYWGQGTTVTVSSTREDLKNVFPPEVAVFEPSEAEISHTQKATLVCLATGFYPDHVELSWWVNGKEVHSGVCTDPQPLKEQPALNDSRYCLSSRLRVSATFWQNPRNHFRCQVQFYGLSENDEWTQDRAKPVTQIVSAEAWGRADCGFTSESYQQGVLSATILYEILLGKATLYAVLVSALVLMAMVKRKDSRG

SEQ ID NO: 2602 - protein, 630 aa, synthetic construct
MALPVTALLLPLALLLHAARPDIVMTQSPDSLAVSLGERATINCKSSQSLLNSGNNKNYVTWYQQKPGQPPKLLIYWGSTRSTGVPDRFSGSGSGTDFTLTISSLQAEDVAVYYCQNDYTYPFTFGQGTKLEIKLEIQNPDPAVYQLRDSKSSDKSVCLFTDFDSQTNVSQSKDSDVYITDKCVLDMRSMDFKSNSAVAWSNKSDFACANAFNNSIIPEDTFFPSPESSCDVKLVEKSFETDTNLNFQNLSVIGFRILLLKVAGFNLLMTLRLWSSSSRAKRSGSGVKQTLNFDLLKLAGDVESNPGPTSMDWIWRILFLVGAATGAHSFEQVQLVQSGAEVKKPGASVKVSCKASGYTFTSFWLNWVRQAPGQGLEWMGNIYPSDSYTVYNQKFKDRVTMTRDTSTSTVYMELSSLRSEDTAVYYCARTWRGNSFDYWGQGTTVTVSSTREDLKNVFPPEVAVFEPSEAEISHTQKATLVCLATGFYPDHVELSWWVNGKEVHSGVCTDPQPLKEQPALNDSRYCLSSRLRVSATFWQNPRNHFRCQVQFYGLSENDEWTQDRAKPVTQIVSAEAWGRADCGFTSESYQQGVLSATILYEILLGKATLYAVLVSALVLMAMVKRKDSRG

SEQ ID NO: 2603 - protein, 656 aa, synthetic construct
MALPVTALLLPLALLLHAARPDIVMTQSPDSLAVSLGERATINCKSSQSLLNSGNQKNYLAWYQQKPGQPPKLLIYWGSTRSTGVPDRFSGSGSGTDFTLTISSLQAEDVAVYYCQNDYTYPFTFGQGTKLEIKLEDLKNVFPPEVAVFEPSEAEISHTQKATLVCLATGFYPDHVELSWWVNGKEVHSGVCTDPQPLKEQPALNDSRYCLSSRLRVSATFWQNPRNHFRCQVQFYGLSENDEWTQDRAKPVTQIVSAEAWGRADCGFTSESYQQGVLSATILYEILLGKATLYAVLVSALVLMAMVKRKDSRGRAKRSGSGATNFSLLKQAGDVEENPGPTSATMDWIWRILFLVGAATGAHSGPARSEDRYRNPKGSGGGGSGGGGSGGGGSFEQVQLVQSGAEVKKPGASVKVSCKASGYTFTSFWLNWVRQAPGQGLEWMGNIYPSDSYTVYNQKFKDRVTMTRDTSTSTVYMELSSLRSEDTAVYYCARTWRGNSFDYWGQGTTVTVSSTRIQNPDPAVYQLRDSKSSDKSVCLFTDFDSQTNVSQSKDSDVYITDKCVLDMRSMDFKSNSAVAWSNKSDFACANAFNNSIIPEDTFFPSPESSCDVKLVEKSFETDTNLNFQNLSVIGFRILLLKVAGFNLLMTLRLWSS

SEQ ID NO: 2604 - protein, 485 aa, synthetic construct; identical to SEQ ID NO: 2572

SEQ ID NO: 2605 - protein, 622 aa, synthetic construct
MALPVTALLLPLALLLHAARPQIVLTQSPAIMSVSPGEKVTMTCSASSSVNYMHWFQQKPGTSPKLWVYSTSNLASGVPARFSGSGSGTSYSLTISSMEAEDAATYYCQQRSIYPPWTFGGGTKLEIKLEIQNPDPAVYQLRDSKSSDKSVCLFTDFDSQTNVSQSKDSDVYITDKCVLDMRSMDFKSNSAVAWSNKSDFACANAFNNSIIPEDTFFPSPESSCDVKLVEKSFETDTNLNFQNLSVIGFRILLLKVAGFNLLMTLRLWSSSSRAKRSGSGVKQTLNFDLLKLAGDVESNPGPTSMDWIWRILFLVGAATGAHSFEVQLQQSGPELVKPGASVKISCKASGYSFTGYTMNWVKQSHGKNLEWIGLINPYNGGTSYNQKFKAKATLTVDKSSSTAYMQLKSLTSEDSAVYYCARDYGYVLDYWGQGTSVTVSSTREDLKNVFPPEVAVFEPSEAEISHTQKATLVCLATGFYPDHVELSWWVNGKEVHSGVCTDPQPLKEQPALNDSRYCLSSRLRVSATFWQNPRNHFRCQVQFYGLSENDEWTQDRAKPVTQIVSAEAWGRADCGFTSESYQQGVLSATILYEILLGKATLYAVLVSALVLMAMVKRKDSRG

SEQ ID NO: 2606 - protein, 634 aa, synthetic construct; identical to SEQ ID NO: 2594

SEQ ID NO: 2607 - protein, 8 aa, synthetic construct
GGGGGGGG

SEQ ID NO: 2608 - protein, 8 aa, synthetic construct
GGGGGGGG

SEQ ID NO: 2609 - protein, 502 aa, synthetic construct
MALPVTALLLPLALLLHAARPQVQLQQSGPGLVKPSQTLSLTCAISGDSVSSNRAAWNWIRQSPSRGLQWLGRTYYRSKWYNDYAVSLRSRITINPVTSKNQVALHMNSVTPEDTAVYYCARAGIVVVPGPETFYYYDHGLDVWGQGTTVTVSSGGGGSGGGGSGGGGSDIQMTQSPSSLSASVGDRVTITCRASQSIRNYLNWYQQKPGKAPELLIHAASSLQSGVPSRFSGSGSGTDFTLTISSLQPEDFASYYCQQSYSAPPITFGQGTRLEIKTRTTTPAPRPPTPAPTIASQPLSLRPEACRPAAGGAVHTRGLDFACDIYIWAPLAGTCGVLLLSLVITLYCKRGRKKLLYIFKQPFMRPVQTTQEEDGCSCRFPEEEEGGCELRVKFSRSADAPAYQQGQNQLYNELNLGRREEYDVLDKRRGRDPEMGGKPRRKNPQEGLYNELQKDKMAEAYSEIGMKGERRRGKGHDGLYQGLSTATKDTYDALHMQALPPR

SEQ ID NO: 2610 - protein, 622 aa, synthetic construct; identical to SEQ ID NO: 2294

SEQ ID NO: 2611 - protein, 623 aa, synthetic construct
MALPVTALLLPLALLLHAARPDDIVMTQSPDSLAVSLGERATINCKASQSVDYDGDSFLNWYQQKPGQPPKLLIYAASNLESGVPSRFSGSGSGTDFTLTISSLQPEDVAVYYCQQSNDDPLTFGQGTKVEIKLEDLKNVFPPEVAVFEPSEAEISHTQKATLVCLATGFYPDHVELSWWVNGKEVHSGVCTDPQPLKEQPALNDSRYCLSSRLRVSATFWQNPRNHFRCQVQFYGLSENDEWTQDRAKPVTQIVSAEAWGRADCGFTSESYQQGVLSAYYMYLLLLLKSVVYFAIITCCLLRRTAFCCNGEKSRAKRSGSGATNFSLLKQAGDVEENPGPTSMDWIWRILFLVGAATGAHSFEEVQLVESGGGLVQPGGSLRLSCAASGYTFTSYWIEWVRQAPGKGLEWIGEILPGGGDTNYNEIFKGRATFSADTSKNTAYLQMNSLRAEDTAVYYCTRRVPIRLDYWGQGTLVTVSSTRIQNPDPAVYQLRDSKSSDKSVCLFTDFDSQTNVSQSKDSDVYITDKCVLDMRSMDFKSNSAVAWSNKSDFACANAFNNSIIPEDTFFPSPESSCDVKLVEKSFETDTNLNFQNLSVIGFRILLLKVAGFNLLMTLRLWSS

SEQ ID NO: 2612 - protein, 739 aa, synthetic construct; identical to SEQ ID NO: 2446

SEQ ID NO: 2613 - protein, 781 aa, synthetic construct; identical to SEQ ID NO: 2379

SEQ ID NO: 2614 - protein, 755 aa, synthetic construct; identical to SEQ ID NO: 2378

SEQ ID NO: 2615 - protein, 622 aa, synthetic construct; identical to SEQ ID NO: 2282

SEQ ID NO: 2616 - protein, 623 aa, synthetic construct
MALPVTALLLPLALLLHAARPDIQLTQSPSSLSASVGDRVTITCKASQSVDYDGDSFLNWYQQKPGKAPKLLIYAASNLESGVPSRFSGSGSGTDFTLTISSLQPEDFATYYCQQSNEDPLTFGQGTKVEIKRLEDLKNVFPPEVAVFEPSEAEISHTQKATLVCLATGFYPDHVELSWWVNGKEVHSGVCTDPQPLKEQPALNDSRYCLSSRLRVSATFWQNPRNHFRCQVQFYGLSENDEWTQDRAKPVTQIVSAEAWGRADCGFTSESYQQGVLSAYYMYLLLLLKSVVYFAIITCCLLRRTAFCCNGEKSRAKRSGSGATNFSLLKQAGDVEENPGPTSMDWIWRILFLVGAATGAHSFEEVQLVESGGGLVQPGGSLRLSCAASGYTFTSYWIEWVRQAPGKGLEWIGEILPGGGDTNYNEIFKGRATFSADTSKNTAYLQMNSLRAEDTAVYYCTRRVPIRLDYWGQGTLVTVSSTRIQNPDPAVYQLRDSKSSDKSVCLFTDFDSQTNVSQSKDSDVYITDKCVLDMRSMDFKSNSAVAWSNKSDFACANAFNNSIIPEDTFFPSPESSCDVKLVEKSFETDTNLNFQNLSVIGFRILLLKVAGFNLLMTLRLWSS

SEQ ID NO: 2617 - protein, 618 aa, synthetic construct
MALPVTALLLPLALLLHAARPDIQMTQSPSSLSASVGDRVTITCKSSQSLLDSDGKTYLNWYQQKPGKAPKLLIYLVSKLDSGVPSRFSGSGSGTDFTLTISSLQPEDFATYYCFQGTHFPFTFGQGTKVEIKRLEDLKNVFPPEVAVFEPSEAEISHTQKATLVCLATGFYPDHVELSWWVNGKEVHSGVCTDPQPLKEQPALNDSRYCLSSRLRVSATFWQNPRNHFRCQVQFYGLSENDEWTQDRAKPVTQIVSAEAWGRADCGFTSESYQQGVLSATILYEILLGKATLYAVLVSALVLMAMVKRKDSRGRAKRSGSGATNFSLLKQAGDVEENPGPTSMDWIWRILFLVGAATGAHSFEVQLVESGGGLVQPGGSLRLSCAASGYTFTSYWMNWVRQAPGKGLEWVGMIDPSDSETHYNHIFKDRFTISADTSKNTAYLQMNSLRAEDTAVYYCARNLYLFGQGTLVTVSSTRIQNPDPAVYQLRDSKSSDKSVCLFTDFDSQTNVSQSKDSDVYITDKCVLDMRSMDFKSNSAVAWSNKSDFACANAFNNSIIPEDTFFPSPESSCDVKLVEKSFETDTNLNFQNLSVIGFRILLLKVAGFNLLMTLRLWSS

SEQ ID NO: 2618 - protein, 490 aa, synthetic construct; identical to SEQ ID NO: 2301

SEQ ID NO: 2619 - protein, 623 aa, synthetic construct; identical to SEQ ID NO: 2272

SEQ ID NO: 2620 - protein, 61 aa, synthetic construct
  SITE 15: note = misc_feature - Xaa can be any naturally occurring amino acid
  SITE 23: note = misc_feature - Xaa can be any naturally occurring amino acid
SLGPCCLCSPEMNDXBAECNHEXBASYNTHHILBSSHIIMLCDTMTERSALACCICDSCKR

SEQ ID NO: 2621 - protein, 61 aa, synthetic construct; identical to SEQ ID NO: 2620
  SITE 15: note = misc_feature - Xaa can be any naturally occurring amino acid
  SITE 23: note = misc_feature - Xaa can be any naturally occurring amino acid

SEQ ID NO: 2622 - protein, 227 aa, synthetic construct
MYRMQLLSCIALSLALVTNSAPTSSSTKKTQLQLEHLLLDLQMILNGINNYKNPKLTRMLTFKFYMPKKATELKHLQCLEEELKPLEEVLNLAQSKNFHLRPRDLISNINVIVLELKGSETTFMCEYADETATIVEFLNRWITFCQSIISTLTARKIEVMYPPPYLDNEKSNGTIIHVKGKHLCPSPLFPGPSKPFWVLVVVGGVLACYSLLVTVAFIIFWVRSKRS

SEQ ID NO: 2623 - protein, 995 aa, synthetic construct
MALPVTALLLPLALLLHAARPDIQLTQSPSSLSASVGDRVTITCKASQSVDYDGDSFLNWYQQKPGKAPKLLIYAASNLESGVPSRFSGSGSGTDFTLTISSLQPEDFATYYCQQSNEDPLTFGQGTKVEIKRLEDLKNVFPPEVAVFEPSEAEISHTQKATLVCLATGFYPDHVELSWWVNGKEVHSGVSTDPQPLKEQPALNDSRYCLSSRLRVSATFWQNPRNHFRCQVQFYGLSENDEWTQDRAKPVTQIVSAEAWGRADCGSQSFGLLDPKLCYLLDGILFIYGVILTALFLRVKFSRSADAPAYQQGQNQLYNELNLGRREEYDVLDKRRGRDPEMGGKPRRKNPQEGLYNELQKDKMAEAYSEIGMKGERRRGKGHDGLYQGLSTATKDTYDALHMQALPPRRAKRSGSGATNFSLLKQAGDVEENPGPTSMDWIWRILFLVGAATGAHSFEEVQLVESGGGLVQPGGSLRLSCAASGYTFTSYWIEWVRQAPGKGLEWIGEILPGGGDTNYNEIFKGRATFSADTSKNTAYLQMNSLRAEDTAVYYCTRRVPIRLDYWGQGTLVTVSSTRIQNPDPAVYQLRDSKSSDKSVCLFTDFDSQTNVSQSKDSDVYITDKTVLDMRSMDFKSNSAVAWSNKSDFACANAFNNSIIPEDTFFPSPESSCGTITQGLAVSTISSFFPPGYQVSFCLVMVLLFAVDTGLYFSVKTNIRSSTRDWKDHKFKWRKDPQDKRAKRSGSGATNFSLLKQAGDVEENPGPSRMYRMQLLSCIALSLALVTNSAPTSSSTKKTQLQLEHLLLDLQMILNGINNYKNPKLTRMLTFKFYMPKKATELKHLQCLEEELKPLEEVLNLAQSKNFHLRPRDLISNINVIVLELKGSETTFMCEYADETATIVEFLNRWITFCQSIISTLTARKIEVMYPPPYLDNEKSNGTIIHVKGKHLCPSPLFPGPSKPFWVLVVVGGVLACYSLLVTVAFIIFWVRSKRS

SEQ ID NO: 2624 - protein, 7 aa, synthetic construct
GGGGGGG

SEQ ID NO: 2625 - protein, 620 aa, synthetic construct
MALPVTALLLPLALLLHAARPDIQMTQSPSSLSASVGDRVTITCKASDHINNWLAWYQQKPGQAPKLLIYGATTLETGVPSRFSGSGSGTDYTLTISSLQPEDFATYYCQQSWNTPWTFGQGTKLEIKRGGGGSGGGGSGGGGSQVQLQQPGAELVKPGASVKMSCKASGYAFNSYWINWMKQKPGQGLEWIGQIYPGDGDTNYNGKFKGRATLTADTSSSTAYMQLSSLTSEDSAVYFCARSITTVVGCAMDYWGQGTSVTVSSTRARSEDRYRNPKGSACKGGGGSELPTQGTFSNVSTNVSPAKPTTTACARSEDRYRNPKGSACKLEGGSWSHPQFEKDYKDDDDKGSDYKDDDDKGSDYKDDDDKGSDYKDDDDKAWSHPQFEKHHHHHHHHTSGSGEGRGSLLTCGDVEENPGPHMTEYKPTVRLATRDDVPRAVRTLAAAFADYPATRHTVDPDRHIERVTELQELFLTRVGLDIGKVWVADDGAAVAVWTTPESVEAGAVFAEIGPRMAELSGSRLAAQQQMEGLLAPHRPKEPAWFLATVGVSPDHQGKGLGSAVVLPGVEAAERAGVPAFLETSAPRNLPFYERLGFTVTADVEVPEGPRTWCMTRKPGA

SEQ ID NO: 2626 - protein, 501 aa, synthetic construct
MALPVTALLLPLALLLHAARPQVQLVESGGGLVQPGGSLRLSCAASGNINSRNCMGWFRQAPGKGREGVAAIGQVTGRTYYVDSVKGRFTISLDNSKNTLYLQMNSLRAEDTAVYYCAAAPGCLLSALRSADYRNWGQGTLVTVSSTRARSEDRYRNPKGSACKGGGGSELPTQGTFSNVSTNVSPAKPTTTACARSEDRYRNPKGSACKLEGGSWSHPQFEKDYKDDDDKGSDYKDDDDKGSDYKDDDDKGSDYKDDDDKAWSHPQFEKHHHHHHHHTSGSGEGRGSLLTCGDVEENPGPHMTEYKPTVRLATRDDVPRAVRTLAAAFADYPATRHTVDPDRHIERVTELQELFLTRVGLDIGKVWVADDGAAVAVWTTPESVEAGAVFAEIGPRMAELSGSRLAAQQQMEGLLAPHRPKEPAWFLATVGVSPDHQGKGLGSAVVLPGVEAAERAGVPAFLETSAPRNLPFYERLGFTVTADVEVPEGPRTWCMTRKPGA

SEQ ID NO: 2627 - protein, 503 aa, synthetic construct
MALPVTALLLPLALLLHAARPEVQLVESGGGSVQAGGSLRLSCAASGYTYSINCMGWFRQAPGKEREGVAAISTGGGRTDYRDSVKGRFTISQDNAKNTVYLQMNSLKPEDTAMYYCAGKTTYPGYGCGLGRSAYNYWGQGTQVTVSSTRARSEDRYRNPKGSACKGGGGSELPTQGTFSNVSTNVSPAKPTTTACARSEDRYRNPKGSACKLEGGSWSHPQFEKDYKDDDDKGSDYKDDDDKGSDYKDDDDKGSDYKDDDDKAWSHPQFEKHHHHHHHHTSGSGEGRGSLLTCGDVEENPGPHMTEYKPTVRLATRDDVPRAVRTLAAAFADYPATRHTVDPDRHIERVTELQELFLTRVGLDIGKVWVADDGAAVAVWTTPESVEAGAVFAEIGPRMAELSGSRLAAQQQMEGLLAPHRPKEPAWFLATVGVSPDHQGKGLGSAVVLPGVEAAERAGVPAFLETSAPRNLPFYERLGFTVTADVEVPEGPRTWCMTRKPGA

SEQ ID NO: 2628 - protein, 504 aa, synthetic construct
MALPVTALLLPLALLLHAARPQVQLVESGGGVVQPGGSLRLSCAASGLSFSTYTVAWFRQAPGKGLEGVAAIPYTSQHMVYTDSVRGRFTISRDNSKNTLYLQMNSLRAEDTAVYYCATDRRPGTSMLAINGYNRWGQGTTVTVSSGTETRARSEDRYRNPKGSACKGGGGSELPTQGTFSNVSTNVSPAKPTTTACARSEDRYRNPKGSACKLEGGSWSHPQFEKDYKDDDDKGSDYKDDDDKGSDYKDDDDKGSDYKDDDDKAWSHPQFEKHHHHHHHHTSGSGEGRGSLLTCGDVEENPGPHMTEYKPTVRLATRDDVPRAVRTLAAAFADYPATRHTVDPDRHIERVTELQELFLTRVGLDIGKVWVADDGAAVAVWTTPESVEAGAVFAEIGPRMAELSGSRLAAQQQMEGLLAPHRPKEPAWFLATVGVSPDHQGKGLGSAVVLPGVEAAERAGVPAFLETSAPRNLPFYERLGFTVTADVEVPEGPRTWCMTRKPGA

SEQ ID NO: 2629 - protein, 495 aa, synthetic construct
MALPVTALLLPLALLLHAARPFEVQLVESGGGLVQAGGSLRLSCAASGRTFTMGWFRQAPGKEREFVAAISLSPTLAYYAESVKGRFTISRDNAKNTVVLQMNSLKPEDTALYYCAADRKSVMSIRPDYWGQGTQVTVSSTRARSEDRYRNPKGSACKGGGGSELPTQGTFSNVSTNVSPAKPTTTACARSEDRYRNPKGSACKLEGGSWSHPQFEKDYKDDDDKGSDYKDDDDKGSDYKDDDDKGSDYKDDDDKAWSHPQFEKHHHHHHHHTSGSGEGRGSLLTCGDVEENPGPHMTEYKPTVRLATRDDVPRAVRTLAAAFADYPATRHTVDPDRHIERVTELQELFLTRVGLDIGKVWVADDGAAVAVWTTPESVEAGAVFAEIGPRMAELSGSRLAAQQQMEGLLAPHRPKEPAWFLATVGVSPDHQGKGLGSAVVLPGVEAAERAGVPAFLETSAPRNLPFYERLGFTVTADVEVPEGPRTWCMTRKPGA

SEQ ID NO: 2630 - protein, 632 aa, synthetic construct
MALPVTALLLPLALLLHAARPQVQLQQSGPGLVKPSQTLSLTCAISGDSVSSNRAAWNWIRQSPSRGLQWLGRTYYRSKWYNDYAVSLRSRITINPVTSKNQVALHMNSVTPEDTAVYYCARAGIVVVPGPETFYYYDHGLDVWGQGTTVTVSSGGGGSGGGGSGGGGSDIQMTQSPSSLSASVGDRVTITCRASQSIRNYLNWYQQKPGKAPELLIHAASSLQSGVPSRFSGSGSGTDFTLTISSLQPEDFASYYCQQSYSAPPITFGQGTRLEIKTRARSEDRYRNPKGSACKGGGGSELPTQGTFSNVSTNVSPAKPTTTACARSEDRYRNPKGSACKLEGGSWSHPQFEKDYKDDDDKGSDYKDDDDKGSDYKDDDDKGSDYKDDDDKAWSHPQFEKHHHHHHHHTSGSGEGRGSLLTCGDVEENPGPHMTEYKPTVRLATRDDVPRAVRTLAAAFADYPATRHTVDPDRHIERVTELQELFLTRVGLDIGKVWVADDGAAVAVWTTPESVEAGAVFAEIGPRMAELSGSRLAAQQQMEGLLAPHRPKEPAWFLATVGVSPDHQGKGLGSAVVLPGVEAAERAGVPAFLETSAPRNLPFYERLGFTVTADVEVPEGPRTWCMTRKPGA

SEQ ID NO: 2631 - protein, 624 aa, synthetic construct
MALPVTALLLPLALLLHAARPDIQMTQSPSSLSASVGDRVTITCRSSQSIVHSVGNTFLEWYQQKPGKAPKLLIYKVSNRFSGVPSRFSGSGSGTDFTLTISSLQPEDFATYYCFQGSQFPYTFGQGTKVEIKRGGGGSGGGGSGGGGSEVQLVESGGGLVQPGGSLRLSCAASGYEFSRSWMNWVRQAPGKGLEWVGRIYPGDGDTNYSGKFKGRFTISADTSKNTAYLQMNSLRAEDTAVYYCARDGSSWDWYFDVWGQGTLVTVSSTRARSEDRYRNPKGSACKGGGGSELPTQGTFSNVSTNVSPAKPTTTACARSEDRYRNPKGSACKLEGGSWSHPQFEKDYKDDDDKGSDYKDDDDKGSDYKDDDDKGSDYKDDDDKAWSHPQFEKHHHHHHHHTSGSGEGRGSLLTCGDVEENPGPHMTEYKPTVRLATRDDVPRAVRTLAAAFADYPATRHTVDPDRHIERVTELQELFLTRVGLDIGKVWVADDGAAVAVWTTPESVEAGAVFAEIGPRMAELSGSRLAAQQQMEGLLAPHRPKEPAWFLATVGVSPDHQGKGLGSAVVLPGVEAAERAGVPAFLETSAPRNLPFYERLGFTVTADVEVPEGPRTWCMTRKPGA

SEQ ID NO: 2632 - protein, 495 aa, synthetic construct
MALPVTALLLPLALLLHAARPFEVQLVESGGGLVQAGGSLRLSCAASGRTFSMGWFRQAPGKEREFVAAITYSGGSPYYADSVKGRFTISRDNAKNTVYLQMNSLKPEDTAVYYCAANPTYGSDWNAENWGQGTQVTVSSTRARSEDRYRNPKGSACKGGGGSELPTQGTFSNVSTNVSPAKPTTTACARSEDRYRNPKGSACKLEGGSWSHPQFEKDYKDDDDKGSDYKDDDDKGSDYKDDDDKGSDYKDDDDKAWSHPQFEKHHHHHHHHTSGSGEGRGSLLTCGDVEENPGPHMTEYKPTVRLATRDDVPRAVRTLAAAFADYPATRHTVDPDRHIERVTELQELFLTRVGLDIGKVWVADDGAAVAVWTTPESVEAGAVFAEIGPRMAELSGSRLAAQQQMEGLLAPHRPKEPAWFLATVGVSPDHQGKGLGSAVVLPGVEAAERAGVPAFLETSAPRNLPFYERLGFTVTADVEVPEGPRTWCMTRKPGA

SEQ ID NO: 2633 - protein, 620 aa, synthetic construct
MALPVTALLLPLALLLHAARPDIVLTQSPASLAVSLGQRATISCRASESVDNYGNTFMHWYQQKPGQPPKLLIYRASNLESGIPARFSGSGSRTDFTLTINPVEADDVATYYCQQSNEDPPTFGAGTKLELKGGGGSGGGGSGGGGSQIQLVQSGPELKKPGETVKISCKASGYIFTNYGMNWVKQAPGKSFKWMGWINTYTGESTYSADFKGRFAFSLETSASTAYLHINDLKNEDTATYFCARSGGYDPMDYWGQGTSVTVSSTRARSEDRYRNPKGSACKGGGGSELPTQGTFSNVSTNVSPAKPTTTACARSEDRYRNPKGSACKLEGGSWSHPQFEKDYKDDDDKGSDYKDDDDKGSDYKDDDDKGSDYKDDDDKAWSHPQFEKHHHHHHHHTSGSGEGRGSLLTCGDVEENPGPHMTEYKPTVRLATRDDVPRAVRTLAAAFADYPATRHTVDPDRHIERVTELQELFLTRVGLDIGKVWVADDGAAVAVWTTPESVEAGAVFAEIGPRMAELSGSRLAAQQQMEGLLAPHRPKEPAWFLATVGVSPDHQGKGLGSAVVLPGVEAAERAGVPAFLETSAPRNLPFYERLGFTVTADVEVPEGPRTWCMTRKPGA

SEQ ID NO: 2634 - protein, 330 aa, synthetic construct
MALPVTALLLPLALLLHAARPDIQMTQSPSSLSASVGDRVTITCKASDHINNWLAWYQQKPGQAPKLLIYGATTLETGVPSRFSGSGSGTDYTLTISSLQPEDFATYYCQQSWNTPWTFGQGTKLEIKRGGGGSGGGGSGGGGSQVQLQQPGAELVKPGASVKMSCKASGYAFNSYWINWMKQKPGQGLEWIGQIYPGDGDTNYNGKFKGRATLTADTSSSTAYMQLSSLTSEDSAVYFCARSITTVVGCAMDYWGQGTSVTVSSTRARSEDRYRNPKGGGGSELPTQGTFSNVSTNVSPAKPTTTACARSEDRYRNPKARGRQLEPPSV

SEQ ID NO: 2635 - protein, 211 aa, synthetic construct
MALPVTALLLPLALLLHAARPQVQLVESGGGLVQPGGSLRLSCAASGNINSRNCMGWFRQAPGKGREGVAAIGQVTGRTYYVDSVKGRFTISLDNSKNTLYLQMNSLRAEDTAVYYCAAAPGCLLSALRSADYRNWGQGTLVTVSSTRARSEDRYRNPKGGGGSELPTQGTFSNVSTNVSPAKPTTTACARSEDRYRNPKARGRQLEPPSV

SEQ ID NO: 2636 - protein, 213 aa, synthetic construct; identical to SEQ ID NO: 2447

SEQ ID NO: 2637 - protein, 214 aa, synthetic construct
MALPVTALLLPLALLLHAARPQVQLVESGGGVVQPGGSLRLSCAASGLSFSTYTVAWFRQAPGKGLEGVAAIPYTSQHMVYTDSVRGRFTISRDNSKNTLYLQMNSLRAEDTAVYYCATDRRPGTSMLAINGYNRWGQGTTVTVSSGTETRARSEDRYRNPKGGGGSELPTQGTFSNVSTNVSPAKPTTTACARSEDRYRNPKARGRQLEPPSV

SEQ ID NO: 2638 - protein, 205 aa, synthetic construct
MALPVTALLLPLALLLHAARPFEVQLVESGGGLVQAGGSLRLSCAASGRTFTMGWFRQAPGKEREFVAAISLSPTLAYYAESVKGRFTISRDNAKNTVVLQMNSLKPEDTALYYCAADRKSVMSIRPDYWGQGTQVTVSSTRARSEDRYRNPKGGGGSELPTQGTFSNVSTNVSPAKPTTTACARSEDRYRNPKARGRQLEPPSV

SEQ ID NO: 2639 - protein, 342 aa, synthetic construct
MALPVTALLLPLALLLHAARPQVQLQQSGPGLVKPSQTLSLTCAISGDSVSSNRAAWNWIRQSPSRGLQWLGRTYYRSKWYNDYAVSLRSRITINPVTSKNQVALHMNSVTPEDTAVYYCARAGIVVVPGPETFYYYDHGLDVWGQGTTVTVSSGGGGSGGGGSGGGGSDIQMTQSPSSLSASVGDRVTITCRASQSIRNYLNWYQQKPGKAPELLIHAASSLQSGVPSRFSGSGSGTDFTLTISSLQPEDFASYYCQQSYSAPPITFGQGTRLEIKTRARSEDRYRNPKGGGGSELPTQGTFSNVSTNVSPAKPTTTACARSEDRYRNPKARGRQLEPPSV

SEQ ID NO: 2640 - protein, 331 aa, synthetic construct
MALPVTALLLPLALLLHAARPDIQMTQSPSSLSASVGDRVTITCRASQDVNTAVAWYQQKPGKAPKLLIYSAYFLYSGVPSRFSGSRSGTDFTLTISSLQPEDFATYYCQQYSRYSPVTFGQGTKVEIKRSGGGGSGGGGSGGGGEVQLVESGGGLVQPGGSLRLSCAASGFNVYASGMHWVRQAPGKGLEWVAKIYPDSDYTYYADSVKGRFTISADTSKNTAYLQMNSLRAEDTAVYYCSRDSSFYYVYAMDYWGQGTLVTVSSTRARSEDRYRNPKGGGGSELPTQGTFSNVSTNVSPAKPTTTACARSEDRYRNPKARGRQLEPPSV

SEQ ID NO: 2641 - protein, 205 aa, synthetic construct
MALPVTALLLPLALLLHAARPFEVQLVESGGGLVQAGGSLRLSCAASGRTFSMGWFRQAPGKEREFVAAITYSGGSPYYADSVKGRFTISRDNAKNTVYLQMNSLKPEDTAVYYCAANPTYGSDWNAENWGQGTQVTVSSTRARSEDRYRNPKGGGGSELPTQGTFSNVSTNVSPAKPTTTACARSEDRYRNPKARGRQLEPPSV

SEQ ID NO: 2642 - protein, 620 aa, synthetic construct
MALPVTALLLPLALLLHAARPDIQMTQSPSSLSASVGDRVTITCSASQDISNYLNWYQQKPGKAPKLLIYYTSNLHSGVPSRFSGSGSGTDFTLTISSLQPEDFATYYCQQYRKLPWTFGQGTKLEIKRGGGGSGGGGSGGGGSQVQLVQSGAEVKKPGSSVKVSCKASGGTFSNYWMHWVRQAPGQGLEWMGATYRGHSDTYYNQKFKGRVTITADKSTSTAYMELSSLRSEDTAVYYCARGAIYDGYDVLDNWGQGTLVTVSSTRARSEDRYRNPKGSACKGGGGSELPTQGTFSNVSTNVSPAKPTTTACARSEDRYRNPKGSACKLEGGSWSHPQFEKDYKDDDDKGSDYKDDDDKGSDYKDDDDKGSDYKDDDDKAWSHPQFEKHHHHHHHHTSGSGEGRGSLLTCGDVEENPGPHMTEYKPTVRLATRDDVPRAVRTLAAAFADYPATRHTVDPDRHIERVTELQELFLTRVGLDIGKVWVADDGAAVAVWTTPESVEAGAVFAEIGPRMAELSGSRLAAQQQMEGLLAPHRPKEPAWFLATVGVSPDHQGKGLGSAVVIPGVEAAERAGVPAFLETSAPRNLPFYERLGFTVTADVEVPEGPRTWCMTRKPGA

SEQ ID NO: 2643 - protein, 569 aa, synthetic construct
MALPVTALLLPLALLLHAARPDIQMTQSPSSLSASVGDRVTITCKASDHINNWLAWYQQKPGQAPKLLIYGATTLETGVPSRFSGSGSGTDYTLTISSLQPEDFATYYCQQSWNTPWTFGQGTKLEIKRGGGGSGGGGSGGGGSQVQLQQPGAELVKPGASVKMSCKASGYAFNSYWINWMKQKPGQGLEWIGQIYPGDGDTNYNGKFKGRATLTADTSSSTAYMQLSSLTSEDSAVYFCARSITTVVGCAMDYWGQGTSVTVSSTRARSEDRYRNPKLEGGSWSHPQFEKDYKDDDDKGSDYKDDDDKGSDYKDDDDKGSDYKDDDDKAWSHPQFEKHHHHHHHHTSGSGEGRGSLLTCGDVEENPGPHMTEYKPTVRLATRDDVPRAVRTLAAAFADYPATRHTVDPDRHIERVTELQELFLTRVGLDIGKVWVADDGAAVAVWTTPESVEAGAVFAEIGPRMAELSGSRLAAQQQMEGLLAPHRPKEPAWFLATVGVSPDHQGKGLGSAVVLPGVEAAERAGVPAFLETSAPRNLPFYERLGFTVTADVEVPEGPRTWCMTRKPGA

SEQ ID NO: 2644 - protein, 568 aa, synthetic construct
MALPVTALLLPLALLLHAARPDIQMTQSPSSLSASVGDRVTITCKASDHINNWLAWYQQKPGQAPKLLIYGATTLETGVPSRFSGSGSGTDYTLTISSLQPEDFATYYCQQSWNTPWTFGQGTKLEIKRGGGGSGGGGSGGGGSQVQLQQPGAELVKPGASVKMSCKASGYAFNSYWINWMKQKPGQGLEWIGQIYPGDGDTNYNGKFKGRATLTADTSSSTAYMQLSSLTSEDSAVYFCARSITTVVGCAMDYWGQGTSVTVSSTRARSEDRYRNPLEGGSWSHPQFEKDYKDDDDKGSDYKDDDDKGSDYKDDDDKGSDYKDDDDKAWSHPQFEKHHHHHHHHTSGSGEGRGSLLTCGDVEENPGPHMTEYKPTVRLATRDDVPRAVRTLAAAFADYPATRHTVDPDRHIERVTELQELFLTRVGLDIGKVWVADDGAAVAVWTTPESVEAGAVFAEIGPRMAELSGSRLAAQQQMEGLLAPHRPKEPAWFLATVGVSPDHQGKGLGSAVVLPGVEAAERAGVPAFLETSAPRNLPFYERLGFTVTADVEVPEGPRTWCMTRKPGA

SEQ ID NO: 2645 - protein, 567 aa, synthetic construct
MALPVTALLLPLALLLHAARPDIQMTQSPSSLSASVGDRVTITCKASDHINNWLAWYQQKPGQAPKLLIYGATTLETGVPSRFSGSGSGTDYTLTISSLQPEDFATYYCQQSWNTPWTFGQGTKLEIKRGGGGSGGGGSGGGGSQVQLQQPGAELVKPGASVKMSCKASGYAFNSYWINWMKQKPGQGLEWIGQIYPGDGDTNYNGKFKGRATLTADTSSSTAYMQLSSLTSEDSAVYFCARSITTVVGCAMDYWGQGTSVTVSSTRARSEDRYRNLEGGSWSHPQFEKDYKDDDDKGSDYKDDDDKGSDYKDDDDKGSDYKDDDDKAWSHPQFEKHHHHHHHHTSGSGEGRGSLLTCGDVEENPGPHMTEYKPTVRLATRDDVPRAVRTLAAAFADYPATRHTVDPDRHIERVTELQELFLTRVGLDIGKVWVADDGAAVAVWTTPESVEAGAVFAEIGPRMAELSGSRLAAQQQMEGLLAPHRPKEPAWFLATVGVSPDHQGKGLGSAVVLPGVEAAERAGVPAFLETSAPRNLPFYERLGFTVTADVEVPEGPRTWCMTRKPGA

SEQ ID NO: 2646 - protein, 569 aa, synthetic construct
MALPVTALLLPLALLLHAARPDIQMTQSPSSLSASVGDRVTITCKASDHINNWLAWYQQKPGQAPKLLIYGATTLETGVPSRFSGSGSGTDYTLTISSLQPEDFATYYCQQSWNTPWTFGQGTKLEIKRGGGGSGGGGSGGGGSQVQLQQPGAELVKPGASVKMSCKASGYAFNSYWINWMKQKPGQGLEWIGQIYPGDGDTNYNGKFKGRATLTADTSSSTAYMQLSSLTSEDSAVYFCARSITTVVGCAMDYWGQGTSVTVSSTRARSEDRYRNPTLEGGSWSHPQFEKDYKDDDDKGSDYKDDDDKGSDYKDDDDKGSDYKDDDDKAWSHPQFEKHHHHHHHHTSGSGEGRGSLLTCGDVEENPGPHMTEYKPTVRLATRDDVPRAVRTLAAAFADYPATRHTVDPDRHIERVTELQELFLTRVGLDIGKVWVADDGAAVAVWTTPESVEAGAVFAEIGPRMAELSGSRLAAQQQMEGLLAPHRPKEPAWFLATVGVSPDHQGKGLGSAVVLPGVEAAERAGVPAFLETSAPRNLPFYERLGFTVTADVEVPEGPRTWCMTRKPGA

SEQ ID NO: 2647 - protein, 569 aa, synthetic construct
MALPVTALLLPLALLLHAARPDIQMTQSPSSLSASVGDRVTITCKASDHINNWLAWYQQKPGQAPKLLIYGATTLETGVPSRFSGSGSGTDYTLTISSLQPEDFATYYCQQSWNTPWTFGQGTKLEIKRGGGGSGGGGSGGGGSQVQLQQPGAELVKPGASVKMSCKASGYAFNSYWINWMKQKPGQGLEWIGQIYPGDGDTNYNGKFKGRATLTADTSSSTAYMQLSSLTSEDSAVYFCARSITTVVGCAMDYWGQGTSVTVSSTRARSEDRYRNPILEGGSWSHPQFEKDYKDDDDKGSDYKDDDDKGSDYKDDDDKGSDYKDDDDKAWSHPQFEKHHHHHHHHTSGSGEGRGSLLTCGDVEENPGPHMTEYKPTVRLATRDDVPRAVRTLAAAFADYPATRHTVDPDRHIERVTELQELFLTRVGLDIGKVWVADDGAAVAVWTTPESVEAGAVFAEIGPRMAELSGSRLAAQQQMEGLLAPHRPKEPAWFLATVGVSPDHQGKGLGSAVVLPGVEAAERAGVPAFLETSAPRNLPFYERLGFTVTADVEVPEGPRTWCMTRKPGA

SEQ ID NO: 2648 - protein, 569 aa, synthetic construct
MALPVTALLLPLALLLHAARPDIQMTQSPSSLSASVGDRVTITCKASDHINNWLAWYQQKPGQAPKLLIYGATTLETGVPSRFSGSGSGTDYTLTISSLQPEDFATYYCQQSWNTPWTFGQGTKLEIKRGGGGSGGGGSGGGGSQVQLQQPGAELVKPGASVKMSCKASGYAFNSYWINWMKQKPGQGLEWIGQIYPGDGDTNYNGKFKGRATLTADTSSSTAYMQLSSLTSEDSAVYFCARSITTVVGCAMDYWGQGTSVTVSSTRARSEDRYRNPMLEGGSWSHPQFEKDYKDDDDKGSDYKDDDDKGSDYKDDDDKGSDYKDDDDKAWSHPQFEKHHHHHHHHTSGSGEGRGSLLTCGDVEENPGPHMTEYKPTVRLATRDDVPRAVRTLAAAFADYPATRHTVDPDRHIERVTELQELFLTRVGLDIGKVWVADDGAAVAVWTTPESVEAGAVFAEIGPRMAELSGSRLAAQQQMEGLLAPHRPKEPAWFLATVGVSPDHQGKGLGSAVVLPGVEAAERAGVPAFLETSAPRNLPFYERLGFTVTADVEVPEGPRTWCMTRKPGA

SEQ ID NO: 2649 - protein, 569 aa, synthetic construct
MALPVTALLLPLALLLHAARPDIQMTQSPSSLSASVGDRVTITCKASDHINNWLAWYQQKPGQAPKLLIYGATTLETGVPSRFSGSGSGTDYTLTISSLQPEDFATYYCQQSWNTPWTFGQGTKLEIKRGGGGSGGGGSGGGGSQVQLQQPGAELVKPGASVKMSCKASGYAFNSYWINWMKQKPGQGLEWIGQIYPGDGDTNYNGKFKGRATLTADTSSSTAYMQLSSLTSEDSAVYFCARSITTVVGCAMDYWGQGTSVTVSSTRARSEDRYRNPDLEGGSWSHPQFEKDYKDDDDKGSDYKDDDDKGSDYKDDDDKGSDYKDDDDKAWSHPQFEKHHHHHHHHTSGSGEGRGSLLTCGDVEENPGPHMTEYKPTVRLATRDDVPRAVRTLAAAFADYPATRHTVDPDRHIERVTELQELFLTRVGLDIGKVWVADDGAAVAVWTTPESVEAGAVFAEIGPRMAELSGSRLAAQQQMEGLLAPHRPKEPAWFLATVGVSPDHQGKGLGSAVVLPGVEAAERAGVPAFLETSAPRNLPFYERLGFTVTADVEVPEGPRTWCMTRKPGA

SEQ ID NO: 2650 - protein, 569 aa, synthetic construct
MALPVTALLLPLALLLHAARPDIQMTQSPSSLSASVGDRVTITCKASDHINNWLAWYQQKPGQAPKLLIYGATTLETGVPSRFSGSGSGTDYTLTISSLQPEDFATYYCQQSWNTPWTFGQGTKLEIKRGGGGSGGGGSGGGGSQVQLQQPGAELVKPGASVKMSCKASGYAFNSYWINWMKQKPGQGLEWIGQIYPGDGDTNYNGKFKGRATLTADTSSSTAYMQLSSLTSEDSAVYFCARSITTVVGCAMDYWGQGTSVTVSSTRARSEDRYRNQKLEGGSWSHPQFEKDYKDDDDKGSDYKDDDDKGSDYKDDDDKGSDYKDDDDKAWSHPQFEKHHHHHHHHTSGSGEGRGSLLTCGDVEENPGPHMTEYKPTVRLATRDDVPRAVRTLAAAFADYPATRHTVDPDRHIERVTELQELFLTRVGLDIGKVWVADDGAAVAVWTTPESVEAGAVFAEIGPRMAELSGSRLAAQQQMEGLLAPHRPKEPAWFLATVGVSPDHQGKGLGSAVVLPGVEAAERAGVPAFLETSAPRNLPFYERLGFTVTADVEVPEGPRTWCMTRKPGA

SEQ ID NO: 2651 - protein, 569 aa, synthetic construct
MALPVTALLLPLALLLHAARPDIQMTQSPSSLSASVGDRVTITCKASDHINNWLAWYQQKPGQAPKLLIYGATTLETGVPSRFSGSGSGTDYTLTISSLQPEDFATYYCQQSWNTPWTFGQGTKLEIKRGGGGSGGGGSGGGGSQVQLQQPGAELVKPGASVKMSCKASGYAFNSYWINWMKQKPGQGLEWIGQIYPGDGDTNYNGKFKGRATLTADTSSSTAYMQLSSLTSEDSAVYFCARSITTVVGCAMDYWGQGTSVTVSSTRARSEDRYRNGKLEGGSWSHPQFEKDYKDDDDKGSDYKDDDDKGSDYKDDDDKGSDYKDDDDKAWSHPQFEKHHHHHHHHTSGSGEGRGSLLTCGDVEENPGPHMTEYKPTVRLATRDDVPRAVRTLAAAFADYPATRHTVDPDRHIERVTELQELFLTRVGLDIGKVWVADDGAAVAVWTTPESVEAGAVFAEIGPRMAELSGSRLAAQQQMEGLLAPHRPKEPAWFLATVGVSPDHQGKGLGSAVVLPGVEAAERAGVPAFLETSAPRNLPFYERLGFTVTADVEVPEGPRTWCMTRKPGA

SEQ ID NO: 2652 - protein, 276 aa, synthetic construct
MALPVTALLLPLALLLHAARPDIQMTQSPSSLSASVGDRVTITCKASDHINNWLAWYQQKPGQAPKLLIYGATTLETGVPSRFSGSGSGTDYTLTISSLQPEDFATYYCQQSWNTPWTFGQGTKLEIKRGGGGSGGGGSGGGGSQVQLQQPGAELVKPGASVKMSCKASGYAFNSYWINWMKQKPGQGLEWIGQIYPGDGDTNYNGKFKGRATLTADTSSSTAYMQLSSLTSEDSAVYFCARSITTVVGCAMDYWGQGTSVTVSSTRARSEDRYRN

SEQ ID NO: 2653 - protein, 569 aa, synthetic construct
MALPVTALLLPLALLLHAARPDIQMTQSPSSLSASVGDRVTITCKASDHINNWLAWYQQKPGQAPKLLIYGATTLETGVPSRFSGSGSGTDYTLTISSLQPEDFATYYCQQSWNTPWTFGQGTKLEIKRGGGGSGGGGSGGGGSQVQLQQPGAELVKPGASVKMSCKASGYAFNSYWINWMKQKPGQGLEWIGQIYPGDGDTNYNGKFKGRATLTADTSSSTAYMQLSSLTSEDSAVYFCARSITTVVGCAMDYWGQGTSVTVSSTRARSEDRYRNSKLEGGSWSHPQFEKDYKDDDDKGSDYKDDDDKGSDYKDDDDKGSDYKDDDDKAWSHPQFEKHHHHHHHHTSGSGEGRGSLLTCGDVEENPGPHMTEYKPTVRLATRDDVPRAVRTLAAAFADYPATRHTVDPDRHIERVTELQELFLTRVGLDIGKVWVADDGAAVAVWTTPESVEAGAVFAEIGPRMAELSGSRLAAQQQMEGLLAPHRPKEPAWFLATVGVSPDHQGKGLGSAVVLPGVEAAERAGVPAFLETSAPRNLPFYERLGFTVTADVEVPEGPRTWCMTRKPGA

SEQ ID NO: 2654 - protein, 569 aa, synthetic construct
MALPVTALLLPLALLLHAARPDIQMTQSPSSLSASVGDRVTITCKASDHINNWLAWYQQKPGQAPKLLIYGATTLETGVPSRFSGSGSGTDYTLTISSLQPEDFATYYCQQSWNTPWTFGQGTKLEIKRGGGGSGGGGSGGGGSQVQLQQPGAELVKPGASVKMSCKASGYAFNSYWINWMKQKPGQGLEWIGQIYPGDGDTNYNGKFKGRATLTADTSSSTAYMQLSSLTSEDSAVYFCARSITTVVGCAMDYWGQGTSVTVSSTRARSEDRYRIPKLEGGSWSHPQFEKDYKDDDDKGSDYKDDDDKGSDYKDDDDKGSDYKDDDDKAWSHPQFEKHHHHHHHHTSGSGEGRGSLLTCGDVEENPGPHMTEYKPTVRLATRDDVPRAVRTLAAAFADYPATRHTVDPDRHIERVTELQELFLTRVGLDIGKVWVADDGAAVAVWTTPESVEAGAVFAEIGPRMAELSGSRLAAQQQMEGLLAPHRPKEPAWFLATVGVSPDHQGKGLGSAVVLPGVEAAERAGVPAFLETSAPRNLPFYERLGFTVTADVEVPEGPRTWCMTRKPGA

SEQ ID NO: 2655 - protein, 569 aa, synthetic construct
MALPVTALLLPLALLLHAARPDIQMTQSPSSLSASVGDRVTITCKASDHINNWLAWYQQKPGQAPKLLIYGATTLETGVPSRFSGSGSGTDYTLTISSLQPEDFATYYCQQSWNTPWTFGQGTKLEIKRGGGGSGGGGSGGGGSQVQLQQPGAELVKPGASVKMSCKASGYAFNSYWINWMKQKPGQGLEWIGQIYPGDGDTNYNGKFKGRATLTADTSSSTAYMQLSSLTSEDSAVYFCARSITTVVGCAMDYWGQGTSVTVSSTRARSEDRYRYPKLEGGSWSHPQFEKDYKDDDDKGSDYKDDDDKGSDYKDDDDKGSDYKDDDDKAWSHPQFEKHHHHHHHHTSGSGEGRGSLLTCGDVEENPGPHMTEYKPTVRLATRDDVPRAVRTLAAAFADYPATRHTVDPDRHIERVTELQELFLTRVGLDIGKVWVADDGAAVAVWTTPESVEAGAVFAEIGPRMAELSGSRLAAQQQMEGLLAPHRPKEPAWFLATVGVSPDHQGKGLGSAVVLPGVEAAERAGVPAFLETSAPRNLPFYERLGFTVTADVEVPEGPRTWCMTRKPGA

SEQ ID NO: 2656 - protein, 569 aa, synthetic construct
MALPVTALLLPLALLLHAARPDIQMTQSPSSLSASVGDRVTITCKASDHINNWLAWYQQKPGQAPKLLIYGATTLETGVPSRFSGSGSGTDYTLTISSLQPEDFATYYCQQSWNTPWTFGQGTKLEIKRGGGGSGGGGSGGGGSQVQLQQPGAELVKPGASVKMSCKASGYAFNSYWINWMKQKPGQGLEWIGQIYPGDGDTNYNGKFKGRATLTADTSSSTAYMQLSSLTSEDSAVYFCARSITTVVGCAMDYWGQGTSVTVSSTRARSEDRYRPPKLEGGSWSHPQFEKDYKDDDDKGSDYKDDDDKGSDYKDDDDKGSDYKDDDDKAWSHPQFEKHHHHHHHHTSGSGEGRGSLLTCGDVEENPGPHMTEYKPTVRLATRDDVPRAVRTLAAAFADYPATRHTVDPDRHIERVTELQELFLTRVGLDIGKVWVADDGAAVAVWTTPESVEAGAVFAEIGPRMAELSGSRLAAQQQMEGLLAPHRPKEPAWFLATVGVSPDHQGKGLGSAVVLPGVEAAERAGVPAFLETSAPRNLPFYERLGFTVTADVEVPEGPRTWCMTRKPGA

SEQ ID NO: 2657 - protein, 569 aa, synthetic construct
MALPVTALLLPLALLLHAARPDIQMTQSPSSLSASVGDRVTITCKASDHINNWLAWYQQKPGQAPKLLIYGATTLETGVPSRFSGSGSGTDYTLTISSLQPEDFATYYCQQSWNTPWTFGQGTKLEIKRGGGGSGGGGSGGGGSQVQLQQPGAELVKPGASVKMSCKASGYAFNSYWINWMKQKPGQGLEWIGQIYPGDGDTNYNGKFKGRATLTADTSSSTAYMQLSSLTSEDSAVYFCARSITTVVGCAMDYWGQGTSVTVSSTRARSEDRYRTPKLEGGSWSHPQFEKDYKDDDDKGSDYKDDDDKGSDYKDDDDKGSDYKDDDDKAWSHPQFEKHHHHHHHHTSGSGEGRGSLLTCGDVEENPGPHMTEYKPTVRLATRDDVPRAVRTLAAAFADYPATRHTVDPDRHIERVTELQELFLTRVGLDIGKVWVADDGAAVAVWTTPESVEAGAVFAEIGPRMAELSGSRLAAQQQMEGLLAPHRPKEPAWFLATVGVSPDHQGKGLGSAVVLPGVEAAERAGVPAFLETSAPRNLPFYERLGFTVTADVEVPEGPRTWCMTRKPGA

SEQ ID NO: 2658 - protein, 569 aa, synthetic construct
MALPVTALLLPLALLLHAARPDIQMTQSPSSLSASVGDRVTITCKASDHINNWLAWYQQKPGQAPKLLIYGATTLETGVPSRFSGSGSGTDYTLTISSLQPEDFATYYCQQSWNTPWTFGQGTKLEIKRGGGGSGGGGSGGGGSQVQLQQPGAELVKPGASVKMSCKASGYAFNSYWINWMKQKPGQGLEWIGQIYPGDGDTNYNGKFKGRATLTADTSSSTAYMQLSSLTSEDSAVYFCARSITTVVGCAMDYWGQGTSVTVSSTRARSEDRYRAPKLEGGSWSHPQFEKDYKDDDDKGSDYKDDDDKGSDYKDDDDKGSDYKDDDDKAWSHPQFEKHHHHHHHHTSGSGEGRGSLLTCGDVEENPGPHMTEYKPTVRLATRDDVPRAVRTLAAAFADYPATRHTVDPDRHIERVTELQELFLTRVGLDIGKVWVADDGAAVAVWTTPESVEAGAVFAEIGPRMAELSGSRLAAQQQMEGLLAPHRPKEPAWFLATVGVSPDHQGKGLGSAVVLPGVEAAERAGVPAFLETSAPRNLPFYERLGFTVTADVEVPEGPRTWCMTRKPGA

SEQ ID NO: 2659 - protein, 569 aa, synthetic construct; identical to SEQ ID NO: 2646

SEQ ID NO: 2660 - protein, 569 aa, synthetic construct; identical to SEQ ID NO: 2651

SEQ ID NO: 2661 - protein, 569 aa, synthetic construct; identical to SEQ ID NO: 2646

SEQ ID NO: 2662 - protein, 569 aa, synthetic construct; identical to SEQ ID NO: 2651

SEQ ID NO: 2663 - protein, 566 aa, synthetic construct
MALPVTALLLPLALLLHAARPDIQMTQSPSSLSASVGDRVTITCKASDHINNWLAWYQQKPGQAPKLLIYGATTLETGVPSRFSGSGSGTDYTLTISSLQPEDFATYYCQQSWNTPWTFGQGTKLEIKRGGGGSGGGGSGGGGSQVQLQQPGAELVKPGASVKMSCKASGYAFNSYWINWMKQKPGQGLEWIGQIYPGDGDTNYNGKFKGRATLTADTSSSTAYMQLSSLTSEDSAVYFCARSITTVVGCAMDYWGQGTSVTVSSTRARSEDRYRLEGGSWSHPQFEKDYKDDDDKGSDYKDDDDKGSDYKDDDDKGSDYKDDDDKAWSHPQFEKHHHHHHHHTSGSGEGRGSLLTCGDVEENPGPHMTEYKPTVRLATRDDVPRAVRTLAAAFADYPATRHTVDPDRHIERVTELQELFLTRVGLDIGKVWVADDGAAVAVWTTPESVEAGAVFAEIGPRMAELSGSRLAAQQQMEGLLAPHRPKEPAWFLATVGVSPDHQGKGLGSAVVLPGVEAAERAGVPAFLETSAPRNLPFYERLGFTVTADVEVPEGPRTWCMTRKPGA

SEQ ID NO: 2664 - protein, 565 aa, synthetic construct
MALPVTALLLPLALLLHAARPDIQMTQSPSSLSASVGDRVTITCKASDHINNWLAWYQQKPGQAPKLLIYGATTLETGVPSRFSGSGSGTDYTLTISSLQPEDFATYYCQQSWNTPWTFGQGTKLEIKRGGGGSGGGGSGGGGSQVQLQQPGAELVKPGASVKMSCKASGYAFNSYWINWMKQKPGQGLEWIGQIYPGDGDTNYNGKFKGRATLTADTSSSTAYMQLSSLTSEDSAVYFCARSITTVVGCAMDYWGQGTSVTVSSTRARSEDRYLEGGSWSHPQFEKDYKDDDDKGSDYKDDDDKGSDYKDDDDKGSDYKDDDDKAWSHPQFEKHHHHHHHHTSGSGEGRGSLLTCGDVEENPGPHMTEYKPTVRLATRDDVPRAVRTLAAAFADYPATRHTVDPDRHIERVTELQELFLTRVGLDIGKVWVADDGAAVAVWTTPESVEAGAVFAEIGPRMAELSGSRLAAQQQMEGLLAPHRPKEPAWFLATVGVSPDHQGKGLGSAVVLPGVEAAERAGVPAFLETSAPRNLPFYERLGFTVTADVEVPEGPRTWCMTRKPGA

SEQ ID NO: 2665 - protein, 566 aa, synthetic construct
MALPVTALLLPLALLLHAARPDIQMTQSPSSLSASVGDRVTITCKASDHINNWLAWYQQKPGQAPKLLIYGATTLETGVPSRFSGSGSGTDYTLTISSLQPEDFATYYCQQSWNTPWTFGQGTKLEIKRGGGGSGGGGSGGGGSQVQLQQPGAELVKPGASVKMSCKASGYAFNSYWINWMKQKPGQGLEWIGQIYPGDGDTNYNGKFKGRATLTADTSSSTAYMQLSSLTSEDSAVYFCARSITTVVGCAMDYWGQGTSVTVSSTRRSEDRYRNLEGGSWSHPQFEKDYKDDDDKGSDYKDDDDKGSDYKDDDDKGSDYKDDDDKAWSHPQFEKHHHHHHHHTSGSGEGRGSLLTCGDVEENPGPHMTEYKPTVRLATRDDVPRAVRTLAAAFADYPATRHTVDPDRHIERVTELQELFLTRVGLDIGKVWVADDGAAVAVWTTPESVEAGAVFAEIGPRMAELSGSRLAAQQQMEGLLAPHRPKEPAWFLATVGVSPDHQGKGLGSAVVLPGVEAAERAGVPAFLETSAPRNLPFYERLGFTVTADVEVPEGPRTWCMTRKPGA

SEQ ID NO: 2666 - protein, 566 aa, synthetic construct
MALPVTALLLPLALLLHAARPDIQMTQSPSSLSASVGDRVTITCKASDHINNWLAWYQQKPGQAPKLLIYGATTLETGVPSRFSGSGSGTDYTLTISSLQPEDFATYYCQQSWNTPWTFGQGTKLEIKRGGGGSGGGGSGGGGSQVQLQQPGAELVKPGASVKMSCKASGYAFNSYWINWMKQKPGQGLEWIGQIYPGDGDTNYNGKFKGRATLTADTSSSTAYMQLSSLTSEDSAVYFCARSITTVVGCAMDYWGQGTSVTVSSTRARSEDRYKLEGGSWSHPQFEKDYKDDDDKGSDYKDDDDKGSDYKDDDDKGSDYKDDDDKAWSHPQFEKHHHHHHHHTSGSGEGRGSLLTCGDVEENPGPHMTEYKPTVRLATRDDVPRAVRTLAAAFADYPATRHTVDPDRHIERVTELQELFLTRVGLDIGKVWVADDGAAVAVWTTPESVEAGAVFAEIGPRMAELSGSRLAAQQQMEGLLAPHRPKEPAWFLATVGVSPDHQGKGLGSAVVLPGVEAAERAGVPAFLETSAPRNLPFYERLGFTVTADVEVPEGPRTWCMTRKPGA

SEQ ID NO: 2667 - protein, 566 aa, synthetic construct
MALPVTALLLPLALLLHAARPDIQMTQSPSSLSASVGDRVTITCKASDHINNWLAWYQQKPGQAPKLLIYGATTLETGVPSRFSGSGSGTDYTLTISSLQPEDFATYYCQQSWNTPWTFGQGTKLEIKRGGGGSGGGGSGGGGSQVQLQQPGAELVKPGASVKMSCKASGYAFNSYWINWMKQKPGQGLEWIGQIYPGDGDTNYNGKFKGRATLTADTSSSTAYMQLSSLTSEDSAVYFCARSITTVVGCAMDYWGQGTSVTVSSTRARSEDRYSLEGGSWSHPQFEKDYKDDDDKGSDYKDDDDKGSDYKDDDDKGSDYKDDDDKAWSHPQFEKHHHHHHHHTSGSGEGRGSLLTCGDVEENPGPHMTEYKPTVRLATRDDVPRAVRTLAAAFADYPATRHTVDPDRHIERVTELQELFLTRVGLDIGKVWVADDGAAVAVWTTPESVEAGAVFAEIGPRMAELSGSRLAAQQQMEGLLAPHRPKEPAWFLATVGVSPDHQGKGLGSAVVLPGVEAAERAGVPAFLETSAPRNLPFYERLGFTVTADVEVPEGPRTWCMTRKPGA

SEQ ID NO: 2668 - protein, 566 aa, synthetic construct
MALPVTALLLPLALLLHAARPDIQMTQSPSSLSASVGDRVTITCKASDHINNWLAWYQQKPGQAPKLLIYGATTLETGVPSRFSGSGSGTDYTLTISSLQPEDFATYYCQQSWNTPWTFGQGTKLEIKRGGGGSGGGGSGGGGSQVQLQQPGAELVKPGASVKMSCKASGYAFNSYWINWMKQKPGQGLEWIGQIYPGDGDTNYNGKFKGRATLTADTSSSTAYMQLSSLTSEDSAVYFCARSITTVVGCAMDYWGQGTSVTVSSTRARSEDRRRLEGGSWSHPQFEKDYKDDDDKGSDYKDDDDKGSDYKDDDDKGSDYKDDDDKAWSHPQFEKHHHHHHHHTSGSGEGRGSLLTCGDVEENPGPHMTEYKPTVRLATRDDVPRAVRTLAAAFADYPATRHTVDPDRHIERVTELQELFLTRVGLDIGKVWVADDGAAVAVWTTPESVEAGAVFAEIGPRMAELSGSRLAAQQQMEGLLAPHRPKEPAWFLATVGVSPDHQGKGLGSAVVLPGVEAAERAGVPAFLETSAPRNLPFYERLGFTVTADVEVPEGPRTWCMTRKPGA

SEQ ID NO: 2669 - protein, 566 aa, synthetic construct
MALPVTALLLPLALLLHAARPDIQMTQSPSSLSASVGDRVTITCKASDHINNWLAWYQQKPGQAPKLLIYGATTLETGVPSRFSGSGSGTDYTLTISSLQPEDFATYYCQQSWNTPWTFGQGTKLEIKRGGGGSGGGGSGGGGSQVQLQQPGAELVKPGASVKMSCKASGYAFNSYWINWMKQKPGQGLEWIGQIYPGDGDTNYNGKFKGRATLTADTSSSTAYMQLSSLTSEDSAVYFCARSITTVVGCAMDYWGQGTSVTVSSTRARSEDRYFLEGGSWSHPQFEKDYKDDDDKGSDYKDDDDKGSDYKDDDDKGSDYKDDDDKAWSHPQFEKHHHHHHHHTSGSGEGRGSLLTCGDVEENPGPHMTEYKPTVRLATRDDVPRAVRTLAAAFADYPATRHTVDPDRHIERVTELQELFLTRVGLDIGKVWVADDGAAVAVWTTPESVEAGAVFAEIGPRMAELSGSRLAAQQQMEGLLAPHRPKEPAWFLATVGVSPDHQGKGLGSAVVLPGVEAAERAGVPAFLETSAPRNLPFYERLGFTVTADVEVPEGPRTWCMTRKPGA

SEQ ID NO: 2670 - protein, 566 aa, synthetic construct; identical to SEQ ID NO: 2667

SEQ ID NO: 2671 - protein, 566 aa, synthetic construct
MALPVTALLLPLALLLHAARPDIQMTQSPSSLSASVGDRVTITCKASDHINNWLAWYQQKPGQAPKLLIYGATTLETGVPSRFSGSGSGTDYTLTISSLQPEDFATYYCQQSWNTPWTFGQGTKLEIKRGGGGSGGGGSGGGGSQVQLQQPGAELVKPGASVKMSCKASGYAFNSYWINWMKQKPGQGLEWIGQIYPGDGDTNYNGKFKGRATLTADTSSSTAYMQLSSLTSEDSAVYFCARSITTVVGCAMDYWGQGTSVTVSSTRARSEDRYILEGGSWSHPQFEKDYKDDDDKGSDYKDDDDKGSDYKDDDDKGSDYKDDDDKAWSHPQFEKHHHHHHHHTSGSGEGRGSLLTCGDVEENPGPHMTEYKPTVRLATRDDVPRAVRTLAAAFADYPATRHTVDPDRHIERVTELQELFLTRVGLDIGKVWVADDGAAVAVWTTPESVEAGAVFAEIGPRMAELSGSRLAAQQQMEGLLAPHRPKEPAWFLATVGVSPDHQGKGLGSAVVLPGVEAAERAGVPAFLETSAPRNLPFYERLGFTVTADVEVPEGPRTWCMTRKPGA

SEQ ID NO: 2672 - protein, 566 aa, synthetic construct
MALPVTALLLPLALLLHAARPDIQMTQSPSSLSASVGDRVTITCKASDHINNWLAWYQQKPGQAPKLLIYGATTLETGVPSRFSGSGSGTDYTLTISSLQPEDFATYYCQQSWNTPWTFGQGTKLEIKRGGGGSGGGGSGGGGSQVQLQQPGAELVKPGASVKMSCKASGYAFNSYWINWMKQKPGQGLEWIGQIYPGDGDTNYNGKFKGRATLTADTSSSTAYMQLSSLTSEDSAVYFCARSITTVVGCAMDYWGQGTSVTVSSTRARSEDRYYLEGGSWSHPQFEKDYKDDDDKGSDYKDDDDKGSDYKDDDDKGSDYKDDDDKAWSHPQFEKHHHHHHHHTSGSGEGRGSLLTCGDVEENPGPHMTEYKPTVRLATRDDVPRAVRTLAAAFADYPATRHTVDPDRHIERVTELQELFLTRVGLDIGKVWVADDGAAVAVWTTPESVEAGAVFAEIGPRMAELSGSRLAAQQQMEGLLAPHRPKEPAWFLATVGVSPDHQGKGLGSAVVLPGVEAAERAGVPAFLETSAPRNLPFYERLGFTVTADVEVPEGPRTWCMTRKPGA

SEQ ID NO: 2673 - protein, 566 aa, synthetic construct
MALPVTALLLPLALLLHAARPDIQMTQSPSSLSASVGDRVTITCKASDHINNWLAWYQQKPGQAPKLLIYGATTLETGVPSRFSGSGSGTDYTLTISSLQPEDFATYYCQQSWNTPWTFGQGTKLEIKRGGGGSGGGGSGGGGSQVQLQQPGAELVKPGASVKMSCKASGYAFNSYWINWMKQKPGQGLEWIGQIYPGDGDTNYNGKFKGRATLTADTSSSTAYMQLSSLTSEDSAVYFCARSITTVVGCAMDYWGQGTSVTVSSTRARSEDRYALEGGSWSHPQFEKDYKDDDDKGSDYKDDDDKGSDYKDDDDKGSDYKDDDDKAWSHPQFEKHHHHHHHHTSGSGEGRGSLLTCGDVEENPGPHMTEYKPTVRLATRDDVPRAVRTLAAAFADYPATRHTVDPDRHIERVTELQELFLTRVGLDIGKVWVADDGAAVAVWTTPESVEAGAVFAEIGPRMAELSGSRLAAQQQMEGLLAPHRPKEPAWFLATVGVSPDHQGKGLGSAVVLPGVEAAERAGVPAFLETSAPRNLPFYERLGFTVTADVEVPEGPRTWCMTRKPGA

SEQ ID NO: 2674 - protein, 566 aa, synthetic construct
MALPVTALLLPLALLLHAARPDIQMTQSPSSLSASVGDRVTITCKASDHINNWLAWYQQKPGQAPKLLIYGATTLETGVPSRFSGSGSGTDYTLTISSLQPEDFATYYCQQSWNTPWTFGQGTKLEIKRGGGGSGGGGSGGGGSQVQLQQPGAELVKPGASVKMSCKASGYAFNSYWINWMKQKPGQGLEWIGQIYPGDGDTNYNGKFKGRATLTADTSSSTAYMQLSSLTSEDSAVYFCARSITTVVGCAMDYWGQGTSVTVSSTRARSEDRVRLEGGSWSHPQFEKDYKDDDDKGSDYKDDDDKGSDYKDDDDKGSDYKDDDDKAWSHPQFEKHHHHHHHHTSGSGEGRGSLLTCGDVEENPGPHMTEYKPTVRLATRDDVPRAVRTLAAAFADYPATRHTVDPDRHIERVTELQELFLTRVGLDIGKVWVADDGAAVAVWTTPESVEAGAVFAEIGPRMAELSGSRLAAQQQMEGLLAPHRPKEPAWFLATVGVSPDHQGKGLGSAVVLPGVEAAERAGVPAFLETSAPRNLPFYERLGFTVTADVEVPEGPRTWCMTRKPGA

SEQ ID NO: 2675 - protein, 566 aa, synthetic construct
MALPVTALLLPLALLLHAARPDIQMTQSPSSLSASVGDRVTITCKASDHINNWLAWYQQKPGQAPKLLIYGATTLETGVPSRFSGSGSGTDYTLTISSLQPEDFATYYCQQSWNTPWTFGQGTKLEIKRGGGGSGGGGSGGGGSQVQLQQPGAELVKPGASVKMSCKASGYAFNSYWINWMKQKPGQGLEWIGQIYPGDGDTNYNGKFKGRATLTADTSSSTAYMQLSSLTSEDSAVYFCARSITTVVGCAMDYWGQGTSVTVSSTRARSEDRLRLEGGSWSHPQFEKDYKDDDDKGSDYKDDDDKGSDYKDDDDKGSDYKDDDDKAWSHPQFEKHHHHHHHHTSGSGEGRGSLLTCGDVEENPGPHMTEYKPTVRLATRDDVPRAVRTLAAAFADYPATRHTVDPDRHIERVTELQELFLTRVGLDIGKVWVADDGAAVAVWTTPESVEAGAVFAEIGPRMAELSGSRLAAQQQMEGLLAPHRPKEPAWFLATVGVSPDHQGKGLGSAVVLPGVEAAERAGVPAFLETSAPRNLPFYERLGFTVTADVEVPEGPRTWCMTRKPGA

SEQ ID NO: 2676 - protein, 566 aa, synthetic construct
MALPVTALLLPLALLLHAARPDIQMTQSPSSLSASVGDRVTITCKASDHINNWLAWYQQKPGQAPKLLIYGATTLETGVPSRFSGSGSGTDYTLTISSLQPEDFATYYCQQSWNTPWTFGQGTKLEIKRGGGGSGGGGSGGGGSQVQLQQPGAELVKPGASVKMSCKASGYAFNSYWINWMKQKPGQGLEWIGQIYPGDGDTNYNGKFKGRATLTADTSSSTAYMQLSSLTSEDSAVYFCARSITTVVGCAMDYWGQGTSVTVSSTRARSEDRIRLEGGSWSHPQFEKDYKDDDDKGSDYKDDDDKGSDYKDDDDKGSDYKDDDDKAWSHPQFEKHHHHHHHHTSGSGEGRGSLLTCGDVEENPGPHMTEYKPTVRLATRDDVPRAVRTLAAAFADYPATRHTVDPDRHIERVTELQELFLTRVGLDIGKVWVADDGAAVAVWTTPESVEAGAVFAEIGPRMAELSGSRLAAQQQMEGLLAPHRPKEPAWFLATVGVSPDHQGKGLGSAVVLPGVEAAERAGVPAFLETSAPRNLPFYERLGFTVTADVEVPEGPRTWCMTRKPGA

SEQ ID NO: 2677 - protein, 566 aa, synthetic construct
MALPVTALLLPLALLLHAARPDIQMTQSPSSLSASVGDRVTITCKASDHINNWLAWYQQKPGQAPKLLIYGATTLETGVPSRFSGSGSGTDYTLTISSLQPEDFATYYCQQSWNTPWTFGQGTKLEIKRGGGGSGGGGSGGGGSQVQLQQPGAELVKPGASVKMSCKASGYAFNSYWINWMKQKPGQGLEWIGQIYPGDGDTNYNGKFKGRATLTADTSSSTAYMQLSSLTSEDSAVYFCARSITTVVGCAMDYWGQGTSVTVSSTRARSEDRSRLEGGSWSHPQFEKDYKDDDDKGSDYKDDDDKGSDYKDDDDKGSDYKDDDDKAWSHPQFEKHHHHHHHHTSGSGEGRGSLLTCGDVEENPGPHMTEYKPTVRLATRDDVPRAVRTLAAAFADYPATRHTVDPDRHIERVTELQELFLTRVGLDIGKVWVADDGAAVAVWTTPESVEAGAVFAEIGPRMAELSGSRLAAQQQMEGLLAPHRPKEPAWFLATVGVSPDHQGKGLGSAVVLPGVEAAERAGVPAFLETSAPRNLPFYERLGFTVTADVEVPEGPRTWCMTRKPGA

SEQ ID NO: 2678 - protein, 566 aa, synthetic construct; identical to SEQ ID NO: 2674

SEQ ID NO: 2679 - protein, 566 aa, synthetic construct
MALPVTALLLPLALLLHAARPDIQMTQSPSSLSASVGDRVTITCKASDHINNWLAWYQQKPGQAPKLLIYGATTLETGVPSRFSGSGSGTDYTLTISSLQPEDFATYYCQQSWNTPWTFGQGTKLEIKRGGGGSGGGGSGGGGSQVQLQQPGAELVKPGASVKMSCKASGYAFNSYWINWMKQKPGQGLEWIGQIYPGDGDTNYNGKFKGRATLTADTSSSTAYMQLSSLTSEDSAVYFCARSITTVVGCAMDYWGQGTSVTVSSTRARSEDRPRLEGGSWSHPQFEKDYKDDDDKGSDYKDDDDKGSDYKDDDDKGSDYKDDDDKAWSHPQFEKHHHHHHHHTSGSGEGRGSLLTCGDVEENPGPHMTEYKPTVRLATRDDVPRAVRTLAAAFADYPATRHTVDPDRHIERVTELQELFLTRVGLDIGKVWVADDGAAVAVWTTPESVEAGAVFAEIGPRMAELSGSRLAAQQQMEGLLAPHRPKEPAWFLATVGVSPDHQGKGLGSAVVLPGVEAAERAGVPAFLETSAPRNLPFYERLGFTVTADVEVPEGPRTWCMTRKPGA

SEQ ID NO: 2680 - protein, 566 aa, synthetic construct
MALPVTALLLPLALLLHAARPDIQMTQSPSSLSASVGDRVTITCKASDHINNWLAWYQQKPGQAPKLLIYGATTLETGVPSRFSGSGSGTDYTLTISSLQPEDFATYYCQQSWNTPWTFGQGTKLEIKRGGGGSGGGGSGGGGSQVQLQQPGAELVKPGASVKMSCKASGYAFNSYWINWMKQKPGQGLEWIGQIYPGDGDTNYNGKFKGRATLTADTSSSTAYMQLSSLTSEDSAVYFCARSITTVVGCAMDYWGQGTSVTVSSTRARSEDRFRLEGGSWSHPQFEKDYKDDDDKGSDYKDDDDKGSDYKDDDDKGSDYKDDDDKAWSHPQFEKHHHHHHHHTSGSGEGRGSLLTCGDVEENPGPHMTEYKPTVRLATRDDVPRAVRTLAAAFADYPATRHTVDPDRHIERVTELQELFLTRVGLDIGKVWVADDGAAVAVWTTPESVEAGAVFAEIGPRMAELSGSRLAAQQQMEGLLAPHRPKEPAWFLATVGVSPDHQGKGLGSAVVLPGVEAAERAGVPAFLETSAPRNLPFYERLGFTVTADVEVPEGPRTWCMTRKPGA

SEQ ID NO: 2681 - protein, 566 aa, synthetic construct
MALPVTALLLPLALLLHAARPDIQMTQSPSSLSASVGDRVTITCKASDHINNWLAWYQQKPGQAPKLLIYGATTLETGVPSRFSGSGSGTDYTLTISSLQPEDFATYYCQQSWNTPWTFGQGTKLEIKRGGGGSGGGGSGGGGSQVQLQQPGAELVKPGASVKMSCKASGYAFNSYWINWMKQKPGQGLEWIGQIYPGDGDTNYNGKFKGRATLTADTSSSTAYMQLSSLTSEDSAVYFCARSITTVVGCAMDYWGQGTSVTVSSTRARSEDRHRLEGGSWSHPQFEKDYKDDDDKGSDYKDDDDKGSDYKDDDDKGSDYKDDDDKAWSHPQFEKHHHHHHHHTSGSGEGRGSLLTCGDVEENPGPHMTEYKPTVRLATRDDVPRAVRTLAAAFADYPATRHTVDPDRHIERVTELQELFLTRVGLDIGKVWVADDGAAVAVWTTPESVEAGAVFAEIGPRMAELSGSRLAAQQQMEGLLAPHRPKEPAWFLATVGVSPDHQGKGLGSAVVLPGVEAAERAGVPAFLETSAPRNLPFYERLGFTVTADVEVPEGPRTWCMTRKPGA

SEQ ID NO: 2682 - protein, 566 aa, synthetic construct; identical to SEQ ID NO: 2677

SEQ ID NO: 2683 - protein, 567 aa, synthetic construct
MALPVTALLLPLALLLHAARPDIQMTQSPSSLSASVGDRVTITCKASDHINNWLAWYQQKPGQAPKLLIYGATTLETGVPSRFSGSGSGTDYTLTISSLQPEDFATYYCQQSWNTPWTFGQGTKLEIKRGGGGSGGGGSGGGGSQVQLQQPGAELVKPGASVKMSCKASGYAFNSYWINWMKQKPGQGLEWIGQIYPGDGDTNYNGKFKGRATLTADTSSSTAYMQLSSLTSEDSAVYFCARSITTVVGCAMDYWGQGTSVTVSSTRAKSEDRYRNLEGGSWSHPQFEKDYKDDDDKGSDYKDDDDKGSDYKDDDDKGSDYKDDDDKAWSHPQFEKHHHHHHHHTSGSGEGRGSLLTCGDVEENPGPHMTEYKPTVRLATRDDVPRAVRTLAAAFADYPATRHTVDPDRHIERVTELQELFLTRVGLDIGKVWVADDGAAVAVWTTPESVEAGAVFAEIGPRMAELSGSRLAAQQQMEGLLAPHRPKEPAWFLATVGVSPDHQGKGLGSAVVLPGVEAAERAGVPAFLETSAPRNLPFYERLGFTVTADVEVPEGPRTWCMTRKPGA

SEQ ID NO: 2684 - protein, 566 aa, synthetic construct; identical to SEQ ID NO: 2671

SEQ ID NO: 2685 - protein, 566 aa, synthetic construct
MALPVTALLLPLALLLHAARPDIQMTQSPSSLSASVGDRVTITCKASDHINNWLAWYQQKPGQAPKLLIYGATTLETGVPSRFSGSGSGTDYTLTISSLQPEDFATYYCQQSWNTPWTFGQGTKLEIKRGGGGSGGGGSGGGGSQVQLQQPGAELVKPGASVKMSCKASGYAFNSYWINWMKQKPGQGLEWIGQIYPGDGDTNYNGKFKGRATLTADTSSSTAYMQLSSLTSEDSAVYFCARSITTVVGCAMDYWGQGTSVTVSSTRARSEDRYPLEGGSWSHPQFEKDYKDDDDKGSDYKDDDDKGSDYKDDDDKGSDYKDDDDKAWSHPQFEKHHHHHHHHTSGSGEGRGSLLTCGDVEENPGPHMTEYKPTVRLATRDDVPRAVRTLAAAFADYPATRHTVDPDRHIERVTELQELFLTRVGLDIGKVWVADDGAAVAVWTTPESVEAGAVFAEIGPRMAELSGSRLAAQQQMEGLLAPHRPKEPAWFLATVGVSPDHQGKGLGSAVVLPGVEAAERAGVPAFLETSAPRNLPFYERLGFTVTADVEVPEGPRTWCMTRKPGA

SEQ ID NO: 2686 - protein, 566 aa, synthetic construct
MALPVTALLLPLALLLHAARPDIQMTQSPSSLSASVGDRVTITCKASDHINNWLAWYQQKPGQAPKLLIYGATTLETGVPSRFSGSGSGTDYTLTISSLQPEDFATYYCQQSWNTPWTFGQGTKLEIKRGGGGSGGGGSGGGGSQVQLQQPGAELVKPGASVKMSCKASGYAFNSYWINWMKQKPGQGLEWIGQIYPGDGDTNYNGKFKGRATLTADTSSSTAYMQLSSLTSEDSAVYFCARSITTVVGCAMDYWGQGTSVTVSSTRARSEDRYNLEGGSWSHPQFEKDYKDDDDKGSDYKDDDDKGSDYKDDDDKGSDYKDDDDKAWSHPQFEKHHHHHHHHTSGSGEGRGSLLTCGDVEENPGPHMTEYKPTVRLATRDDVPRAVRTLAAAFADYPATRHTVDPDRHIERVTELQELFLTRVGLDIGKVWVADDGAAVAVWTTPESVEAGAVFAEIGPRMAELSGSRLAAQQQMEGLLAPHRPKEPAWFLATVGVSPDHQGKGLGSAVVLPGVEAAERAGVPAFLETSAPRNLPFYERLGFTVTADVEVPEGPRTWCMTRKPGA

SEQ ID NO: 2687 - protein, 566 aa, synthetic construct; identical to SEQ ID NO: 2672

SEQ ID NO: 2688 - protein, 566 aa, synthetic construct
MALPVTALLLPLALLLHAARPDIQMTQSPSSLSASVGDRVTITCKASDHINNWLAWYQQKPGQAPKLLIYGATTLETGVPSRFSGSGSGTDYTLTISSLQPEDFATYYCQQSWNTPWTFGQGTKLEIKRGGGGSGGGGSGGGGSQVQLQQPGAELVKPGASVKMSCKASGYAFNSYWINWMKQKPGQGLEWIGQIYPGDGDTNYNGKFKGRATLTADTSSSTAYMQLSSLTSEDSAVYFCARSITTVVGCAMDYWGQGTSVTVSSTRARSEDRYTLEGGSWSHPQFEKDYKDDDDKGSDYKDDDDKGSDYKDDDDKGSDYKDDDDKAWSHPQFEKHHHHHHHHTSGSGEGRGSLLTCGDVEENPGPHMTEYKPTVRLATRDDVPRAVRTLAAAFADYPATRHTVDPDRHIERVTELQELFLTRVGLDIGKVWVADDGAAVAVWTTPESVEAGAVFAEIGPRMAELSGSRLAAQQQMEGLLAPHRPKEPAWFLATVGVSPDHQGKGLGSAVVLPGVEAAERAGVPAFLETSAPRNLPFYERLGFTVTADVEVPEGPRTWCMTRKPGA

SEQ ID NO: 2689 - protein, 566 aa, synthetic construct
MALPVTALLLPLALLLHAARPDIQMTQSPSSLSASVGDRVTITCKASDHINNWLAWYQQKPGQAPKLLIYGATTLETGVPSRFSGSGSGTDYTLTISSLQPEDFATYYCQQSWNTPWTFGQGTKLEIKRGGGGSGGGGSGGGGSQVQLQQPGAELVKPGASVKMSCKASGYAFNSYWINWMKQKPGQGLEWIGQIYPGDGDTNYNGKFKGRATLTADTSSSTAYMQLSSLTSEDSAVYFCARSITTVVGCAMDYWGQGTSVTVSSTRARSEDRYDLEGGSWSHPQFEKDYKDDDDKGSDYKDDDDKGSDYKDDDDKGSDYKDDDDKAWSHPQFEKHHHHHHHHTSGSGEGRGSLLTCGDVEENPGPHMTEYKPTVRLATRDDVPRAVRTLAAAFADYPATRHTVDPDRHIERVTELQELFLTRVGLDIGKVWVADDGAAVAVWTTPESVEAGAVFAEIGPRMAELSGSRLAAQQQMEGLLAPHRPKEPAWFLATVGVSPDHQGKGLGSAVVLPGVEAAERAGVPAFLETSAPRNLPFYERLGFTVTADVEVPEGPRTWCMTRKPGA

SEQ ID NO: 2690 - protein, 566 aa, synthetic construct; identical to SEQ ID NO: 2663

SEQ ID NO: 2691 - protein, 273 aa, synthetic construct
MALPVTALLLPLALLLHAARPDIQMTQSPSSLSASVGDRVTITCKASDHINNWLAWYQQKPGQAPKLLIYGATTLETGVPSRFSGSGSGTDYTLTISSLQPEDFATYYCQQSWNTPWTFGQGTKLEIKRGGGGSGGGGSGGGGSQVQLQQPGAELVKPGASVKMSCKASGYAFNSYWINWMKQKPGQGLEWIGQIYPGDGDTNYNGKFKGRATLTADTSSSTAYMQLSSLTSEDSAVYFCARSITTVVGCAMDYWGQGTSVTVSSTRARSEDR

SEQ ID NO: 2692 - protein, 566 aa, synthetic construct; identical to SEQ ID NO: 2668

SEQ ID NO: 2693 - protein, 566 aa, synthetic construct
MALPVTALLLPLALLLHAARPDIQMTQSPSSLSASVGDRVTITCKASDHINNWLAWYQQKPGQAPKLLIYGATTLETGVPSRFSGSGSGTDYTLTISSLQPEDFATYYCQQSWNTPWTFGQGTKLEIKRGGGGSGGGGSGGGGSQVQLQQPGAELVKPGASVKMSCKASGYAFNSYWINWMKQKPGQGLEWIGQIYPGDGDTNYNGKFKGRATLTADTSSSTAYMQLSSLTSEDSAVYFCARSITTVVGCAMDYWGQGTSVTVSSTRARSEDRDRLEGGSWSHPQFEKDYKDDDDKGSDYKDDDDKGSDYKDDDDKGSDYKDDDDKAWSHPQFEKHHHHHHHHTSGSGEGRGSLLTCGDVEENPGPHMTEYKPTVRLATRDDVPRAVRTLAAAFADYPATRHTVDPDRHIERVTELQELFLTRVGLDIGKVWVADDGAAVAVWTTPESVEAGAVFAEIGPRMAELSGSRLAAQQQMEGLLAPHRPKEPAWFLATVGVSPDHQGKGLGSAVVLPGVEAAERAGVPAFLETSAPRNLPFYERLGFTVTADVEVPEGPRTWCMTRKPGA

SEQ ID NO: 2694 - protein, 566 aa, synthetic construct
MALPVTALLLPLALLLHAARPDIQMTQSPSSLSASVGDRVTITCKASDHINNWLAWYQQKPGQAPKLLIYGATTLETGVPSRFSGSGSGTDYTLTISSLQPEDFATYYCQQSWNTPWTFGQGTKLEIKRGGGGSGGGGSGGGGSQVQLQQPGAELVKPGASVKMSCKASGYAFNSYWINWMKQKPGQGLEWIGQIYPGDGDTNYNGKFKGRATLTADTSSSTAYMQLSSLTSEDSAVYFCARSITTVVGCAMDYWGQGTSVTVSSTRARSEDRNRLEGGSWSHPQFEKDYKDDDDKGSDYKDDDDKGSDYKDDDDKGSDYKDDDDKAWSHPQFEKHHHHHHHHTSGSGEGRGSLLTCGDVEENPGPHMTEYKPTVRLATRDDVPRAVRTLAAAFADYPATRHTVDPDRHIERVTELQELFLTRVGLDIGKVWVADDGAAVAVWTTPESVEAGAVFAEIGPRMAELSGSRLAAQQQMEGLLAPHRPKEPAWFLATVGVSPDHQGKGLGSAVVLPGVEAAERAGVPAFLETSAPRNLPFYERLGFTVTADVEVPEGPRTWCMTRKPGA

SEQ ID NO: 2695 - protein, 566 aa, synthetic construct; identical to SEQ ID NO: 2675

SEQ ID NO: 2696 - protein, 566 aa, synthetic construct; identical to SEQ ID NO: 2677

SEQ ID NO: 2697 - protein, 566 aa, synthetic construct
MALPVTALLLPLALLLHAARPDIQMTQSPSSLSASVGDRVTITCKASDHINNWLAWYQQKPGQAPKLLIYGATTLETGVPSRFSGSGSGTDYTLTISSLQPEDFATYYCQQSWNTPWTFGQGTKLEIKRGGGGSGGGGSGGGGSQVQLQQPGAELVKPGASVKMSCKASGYAFNSYWINWMKQKPGQGLEWIGQIYPGDGDTNYNGKFKGRATLTADTSSSTAYMQLSSLTSEDSAVYFCARSITTVVGCAMDYWGQGTSVTVSSTRARSEDRARLEGGSWSHPQFEKDYKDDDDKGSDYKDDDDKGSDYKDDDDKGSDYKDDDDKAWSHPQFEKHHHHHHHHTSGSGEGRGSLLTCGDVEENPGPHMTEYKPTVRLATRDDVPRAVRTLAAAFADYPATRHTVDPDRHIERVTELQELFLTRVGLDIGKVWVADDGAAVAVWTTPESVEAGAVFAEIGPRMAELSGSRLAAQQQMEGLLAPHRPKEPAWFLATVGVSPDHQGKGLGSAVVLPGVEAAERAGVPAFLETSAPRNLPFYERLGFTVTADVEVPEGPRTWCMTRKPGA

SEQ ID NO: 2698 - protein, 566 aa, synthetic construct
MALPVTALLLPLALLLHAARPDIQMTQSPSSLSASVGDRVTITCKASDHINNWLAWYQQKPGQAPKLLIYGATTLETGVPSRFSGSGSGTDYTLTISSLQPEDFATYYCQQSWNTPWTFGQGTKLEIKRGGGGSGGGGSGGGGSQVQLQQPGAELVKPGASVKMSCKASGYAFNSYWINWMKQKPGQGLEWIGQIYPGDGDTNYNGKFKGRATLTADTSSSTAYMQLSSLTSEDSAVYFCARSITTVVGCAMDYWGQGTSVTVSSTRARSEDRGRLEGGSWSHPQFEKDYKDDDDKGSDYKDDDDKGSDYKDDDDKGSDYKDDDDKAWSHPQFEKHHHHHHHHTSGSGEGRGSLLTCGDVEENPGPHMTEYKPTVRLATRDDVPRAVRTLAAAFADYPATRHTVDPDRHIERVTELQELFLTRVGLDIGKVWVADDGAAVAVWTTPESVEAGAVFAEIGPRMAELSGSRLAAQQQMEGLLAPHRPKEPAWFLATVGVSPDHQGKGLGSAVVLPGVEAAERAGVPAFLETSAPRNLPFYERLGFTVTADVEVPEGPRTWCMTRKPGA

SEQ ID NO: 2699 - protein, 566 aa, synthetic construct
MALPVTALLLPLALLLHAARPDIQMTQSPSSLSASVGDRVTITCKASDHINNWLAWYQQKPGQAPKLLIYGATTLETGVPSRFSGSGSGTDYTLTISSLQPEDFATYYCQQSWNTPWTFGQGTKLEIKRGGGGSGGGGSGGGGSQVQLQQPGAELVKPGASVKMSCKASGYAFNSYWINWMKQKPGQGLEWIGQIYPGDGDTNYNGKFKGRATLTADTSSSTAYMQLSSLTSEDSAVYFCARSITTVVGCAMDYWGQGTSVTVSSTRARSEDRKRLEGGSWSHPQFEKDYKDDDDKGSDYKDDDDKGSDYKDDDDKGSDYKDDDDKAWSHPQFEKHHHHHHHHTSGSGEGRGSLLTCGDVEENPGPHMTEYKPTVRLATRDDVPRAVRTLAAAFADYPATRHTVDPDRHIERVTELQELFLTRVGLDIGKVWVADDGAAVAVWTTPESVEAGAVFAEIGPRMAELSGSRLAAQQQMEGLLAPHRPKEPAWFLATVGVSPDHQGKGLGSAVVLPGVEAAERAGVPAFLETSAPRNLPFYERLGFTVTADVEVPEGPRTWCMTRKPGA

SEQ ID NO: 2700 - protein, 567 aa, synthetic construct; identical to SEQ ID NO: 2645

SEQ ID NO: 2701 - protein, 567 aa, synthetic construct
MALPVTALLLPLALLLHAARPDIQMTQSPSSLSASVGDRVTITCKASDHINNWLAWYQQKPGQAPKLLIYGATTLETGVPSRFSGSGSGTDYTLTISSLQPEDFATYYCQQSWNTPWTFGQGTKLEIKRGGGGSGGGGSGGGGSQVQLQQPGAELVKPGASVKMSCKASGYAFNSYWINWMKQKPGQGLEWIGQIYPGDGDTNYNGKFKGRATLTADTSSSTAYMQLSSLTSEDSAVYFCARSITTVVGCAMDYWGQGTSVTVSSTRARSEDMYRNLEGGSWSHPQFEKDYKDDDDKGSDYKDDDDKGSDYKDDDDKGSDYKDDDDKAWSHPQFEKHHHHHHHHTSGSGEGRGSLLTCGDVEENPGPHMTEYKPTVRLATRDDVPRAVRTLAAAFADYPATRHTVDPDRHIERVTELQELFLTRVGLDIGKVWVADDGAAVAVWTTPESVEAGAVFAEIGPRMAELSGSRLAAQQQMEGLLAPHRPKEPAWFLATVGVSPDHQGKGLGSAVVLPGVEAAERAGVPAFLETSAPRNLPFYERLGFTVTADVEVPEGPRTWCMTRKPGA

SEQ ID NO: 2702 - protein, 567 aa, synthetic construct
MALPVTALLLPLALLLHAARPDIQMTQSPSSLSASVGDRVTITCKASDHINNWLAWYQQKPGQAPKLLIYGATTLETGVPSRFSGSGSGTDYTLTISSLQPEDFATYYCQQSWNTPWTFGQGTKLEIKRGGGGSGGGGSGGGGSQVQLQQPGAELVKPGASVKMSCKASGYAFNSYWINWMKQKPGQGLEWIGQIYPGDGDTNYNGKFKGRATLTADTSSSTAYMQLSSLTSEDSAVYFCARSITTVVGCAMDYWGQGTSVTVSSTRARSEDHYRNLEGGSWSHPQFEKDYKDDDDKGSDYKDDDDKGSDYKDDDDKGSDYKDDDDKAWSHPQFEKHHHHHHHHTSGSGEGRGSLLTCGDVEENPGPHMTEYKPTVRLATRDDVPRAVRTLAAAFADYPATRHTVDPDRHIERVTELQELFLTRVGLDIGKVWVADDGAAVAVWTTPESVEAGAVFAEIGPRMAELSGSRLAAQQQMEGLLAPHRPKEPAWFLATVGVSPDHQGKGLGSAVVLPGVEAAERAGVPAFLETSAPRNLPFYERLGFTVTADVEVPEGPRTWCMTRKPGA

SEQ ID NO: 2703 - protein, 567 aa, synthetic construct
MALPVTALLLPLALLLHAARPDIQMTQSPSSLSASVGDRVTITCKASDHINNWLAWYQQKPGQAPKLLIYGATTLETGVPSRFSGSGSGTDYTLTISSLQPEDFATYYCQQSWNTPWTFGQGTKLEIKRGGGGSGGGGSGGGGSQVQLQQPGAELVKPGASVKMSCKASGYAFNSYWINWMKQKPGQGLEWIGQIYPGDGDTNYNGKFKGRATLTADTSSSTAYMQLSSLTSEDSAVYFCARSITTVVGCAMDYWGQGTSVTVSSTRARSEDPYRNLEGGSWSHPQFEKDYKDDDDKGSDYKDDDDKGSDYKDDDDKGSDYKDDDDKAWSHPQFEKHHHHHHHHTSGSGEGRGSLLTCGDVEENPGPHMTEYKPTVRLATRDDVPRAVRTLAAAFADYPATRHTVDPDRHIERVTELQELFLTRVGLDIGKVWVADDGAAVAVWTTPESVEAGAVFAEIGPRMAELSGSRLAAQQQMEGLLAPHRPKEPAWFLATVGVSPDHQGKGLGSAVVLPGVEAAERAGVPAFLETSAPRNLPFYERLGFTVTADVEVPEGPRTWCMTRKPGA

SEQ ID NO: 2704 - protein, 567 aa, synthetic construct
MALPVTALLLPLALLLHAARPDIQMTQSPSSLSASVGDRVTITCKASDHINNWLAWYQQKPGQAPKLLIYGATTLETGVPSRFSGSGSGTDYTLTISSLQPEDFATYYCQQSWNTPWTFGQGTKLEIKRGGGGSGGGGSGGGGSQVQLQQPGAELVKPGASVKMSCKASGYAFNSYWINWMKQKPGQGLEWIGQIYPGDGDTNYNGKFKGRATLTADTSSSTAYMQLSSLTSEDSAVYFCARSITTVVGCAMDYWGQGTSVTVSSTRARSEDLYRNLEGGSWSHPQFEKDYKDDDDKGSDYKDDDDKGSDYKDDDDKGSDYKDDDDKAWSHPQFEKHHHHHHHHTSGSGEGRGSLLTCGDVEENPGPHMTEYKPTVRLATRDDVPRAVRTLAAAFADYPATRHTVDPDRHIERVTELQELFLTRVGLDIGKVWVADDGAAVAVWTTPESVEAGAVFAEIGPRMAELSGSRLAAQQQMEGLLAPHRPKEPAWFLATVGVSPDHQGKGLGSAVVLPGVEAAERAGVPAFLETSAPRNLPFYERLGFTVTADVEVPEGPRTWCMTRKPGA

SEQ ID NO: 2705 - protein, 567 aa, synthetic construct
MALPVTALLLPLALLLHAARPDIQMTQSPSSLSASVGDRVTITCKASDHINNWLAWYQQKPGQAPKLLIYGATTLETGVPSRFSGSGSGTDYTLTISSLQPEDFATYYCQQSWNTPWTFGQGTKLEIKRGGGGSGGGGSGGGGSQVQLQQPGAELVKPGASVKMSCKASGYAFNSYWINWMKQKPGQGLEWIGQIYPGDGDTNYNGKFKGRATLTADTSSSTAYMQLSSLTSEDSAVYFCARSITTVVGCAMDYWGQGTSVTVSSTRARSEDTYRNLEGGSWSHPQFEKDYKDDDDKGSDYKDDDDKGSDYKDDDDKGSDYKDDDDKAWSHPQFEKHHHHHHHHTSGSGEGRGSLLTCGDVEENPGPHMTEYKPTVRLATRDDVPRAVRTLAAAFADYPATRHTVDPDRHIERVTELQELFLTRVGLDIGKVWVADDGAAVAVWTTPESVEAGAVFAEIGPRMAELSGSRLAAQQQMEGLLAPHRPKEPAWFLATVGVSPDHQGKGLGSAVVLPGVEAAERAGVPAFLETSAPRNLPFYERLGFTVTADVEVPEGPRTWCMTRKPGA

SEQ ID NO: 2706 - protein, 567 aa, synthetic construct
MALPVTALLLPLALLLHAARPDIQMTQSPSSLSASVGDRVTITCKASDHINNWLAWYQQKPGQAPKLLIYGATTLETGVPSRFSGSGSGTDYTLTISSLQPEDFATYYCQQSWNTPWTFGQGTKLEIKRGGGGSGGGGSGGGGSQVQLQQPGAELVKPGASVKMSCKASGYAFNSYWINWMKQKPGQGLEWIGQIYPGDGDTNYNGKFKGRATLTADTSSSTAYMQLSSLTSEDSAVYFCARSITTVVGCAMDYWGQGTSVTVSSTRARSEDAYRNLEGGSWSHPQFEKDYKDDDDKGSDYKDDDDKGSDYKDDDDKGSDYKDDDDKAWSHPQFEKHHHHHHHHTSGSGEGRGSLLTCGDVEENPGPHMTEYKPTVRLATRDDVPRAVRTLAAAFADYPATRHTVDPDRHIERVTELQELFLTRVGLDIGKVWVADDGAAVAVWTTPESVEAGAVFAEIGPRMAELSGSRLAAQQQMEGLLAPHRPKEPAWFLATVGVSPDHQGKGLGSAVVLPGVEAAERAGVPAFLETSAPRNLPFYERLGFTVTADVEVPEGPRTWCMTRKPGA

SEQ ID NO: 2707 - protein, 567 aa, synthetic construct
MALPVTALLLPLALLLHAARPDIQMTQSPSSLSASVGDRVTITCKASDHINNWLAWYQQKPGQAPKLLIYGATTLETGVPSRFSGSGSGTDYTLTISSLQPEDFATYYCQQSWNTPWTFGQGTKLEIKRGGGGSGGGGSGGGGSQVQLQQPGAELVKPGASVKMSCKASGYAFNSYWINWMKQKPGQGLEWIGQIYPGDGDTNYNGKFKGRATLTADTSSSTAYMQLSSLTSEDSAVYFCARSITTVVGCAMDYWGQGTSVTVSSTRARSEDVYRNLEGGSWSHPQFEKDYKDDDDKGSDYKDDDDKGSDYKDDDDKGSDYKDDDDKAWSHPQFEKHHHHHHHHTSGSGEGRGSLLTCGDVEENPGPHMTEYKPTVRLATRDDVPRAVRTLAAAFADYPATRHTVDPDRHIERVTELQELFLTRVGLDIGKVWVADDGAAVAVWTTPESVEAGAVFAEIGPRMAELSGSRLAAQQQMEGLLAPHRPKEPAWFLATVGVSPDHQGKGLGSAVVLPGVEAAERAGVPAFLETSAPRNLPFYERLGFTVTADVEVPEGPRTWCMTRKPGA

SEQ ID NO: 2708 - protein, 567 aa, synthetic construct
MALPVTALLLPLALLLHAARPDIQMTQSPSSLSASVGDRVTITCKASDHINNWLAWYQQKPGQAPKLLIYGATTLETGVPSRFSGSGSGTDYTLTISSLQPEDFATYYCQQSWNTPWTFGQGTKLEIKRGGGGSGGGGSGGGGSQVQLQQPGAELVKPGASVKMSCKASGYAFNSYWINWMKQKPGQGLEWIGQIYPGDGDTNYNGKFKGRATLTADTSSSTAYMQLSSLTSEDSAVYFCARSITTVVGCAMDYWGQGTSVTVSSTRARSEDSYRNLEGGSWSHPQFEKDYKDDDDKGSDYKDDDDKGSDYKDDDDKGSDYKDDDDKAWSHPQFEKHHHHHHHHTSGSGEGRGSLLTCGDVEENPGPHMTEYKPTVRLATRDDVPRAVRTLAAAFADYPATRHTVDPDRHIERVTELQELFLTRVGLDIGKVWVADDGAAVAVWTTPESVEAGAVFAEIGPRMAELSGSRLAAQQQMEGLLAPHRPKEPAWFLATVGVSPDHQGKGLGSAVVLPGVEAAERAGVPAFLETSAPRNLPFYERLGFTVTADVEVPEGPRTWCMTRKPGA

SEQ ID NO: 2709 - protein, 567 aa, synthetic construct
MALPVTALLLPLALLLHAARPDIQMTQSPSSLSASVGDRVTITCKASDHINNWLAWYQQKPGQAPKLLIYGATTLETGVPSRFSGSGSGTDYTLTISSLQPEDFATYYCQQSWNTPWTFGQGTKLEIKRGGGGSGGGGSGGGGSQVQLQQPGAELVKPGASVKMSCKASGYAFNSYWINWMKQKPGQGLEWIGQIYPGDGDTNYNGKFKGRATLTADTSSSTAYMQLSSLTSEDSAVYFCARSITTVVGCAMDYWGQGTSVTVSSTRARSEDGYRNLEGGSWSHPQFEKDYKDDDDKGSDYKDDDDKGSDYKDDDDKGSDYKDDDDKAWSHPQFEKHHHHHHHHTSGSGEGRGSLLTCGDVEENPGPHMTEYKPTVRLATRDDVPRAVRTLAAAFADYPATRHTVDPDRHIERVTELQELFLTRVGLDIGKVWVADDGAAVAVWTTPESVEAGAVFAEIGPRMAELSGSRLAAQQQMEGLLAPHRPKEPAWFLATVGVSPDHQGKGLGSAVVLPGVEAAERAGVPAFLETSAPRNLPFYERLGFTVTADVEVPEGPRTWCMTRKPGA

SEQ ID NO: 2710 - protein, 567 aa, synthetic construct
MALPVTALLLPLALLLHAARPDIQMTQSPSSLSASVGDRVTITCKASDHINNWLAWYQQKPGQAPKLLIYGATTLETGVPSRFSGSGSGTDYTLTISSLQPEDFATYYCQQSWNTPWTFGQGTKLEIKRGGGGSGGGGSGGGGSQVQLQQPGAELVKPGASVKMSCKASGYAFNSYWINWMKQKPGQGLEWIGQIYPGDGDTNYNGKFKGRATLTADTSSSTAYMQLSSLTSEDSAVYFCARSITTVVGCAMDYWGQGTSVTVSSTRARSEDCYRNLEGGSWSHPQFEKDYKDDDDKGSDYKDDDDKGSDYKDDDDKGSDYKDDDDKAWSHPQFEKHHHHHHHHTSGSGEGRGSLLTCGDVEENPGPHMTEYKPTVRLATRDDVPRAVRTLAAAFADYPATRHTVDPDRHIERVTELQELFLTRVGLDIGKVWVADDGAAVAVWTTPESVEAGAVFAEIGPRMAELSGSRLAAQQQMEGLLAPHRPKEPAWFLATVGVSPDHQGKGLGSAVVLPGVEAAERAGVPAFLETSAPRNLPFYERLGFTVTADVEVPEGPRTWCMTRKPGA

SEQ ID NO: 2711 - protein, 567 aa, synthetic construct
MALPVTALLLPLALLLHAARPDIQMTQSPSSLSASVGDRVTITCKASDHINNWLAWYQQKPGQAPKLLIYGATTLETGVPSRFSGSGSGTDYTLTISSLQPEDFATYYCQQSWNTPWTFGQGTKLEIKRGGGGSGGGGSGGGGSQVQLQQPGAELVKPGASVKMSCKASGYAFNSYWINWMKQKPGQGLEWIGQIYPGDGDTNYNGKFKGRATLTADTSSSTAYMQLSSLTSEDSAVYFCARSITTVVGCAMDYWGQGTSVTVSSTRARSEDKYRNLEGGSWSHPQFEKDYKDDDDKGSDYKDDDDKGSDYKDDDDKGSDYKDDDDKAWSHPQFEKHHHHHHHHTSGSGEGRGSLLTCGDVEENPGPHMTEYKPTVRLATRDDVPRAVRTLAAAFADYPATRHTVDPDRHIERVTELQELFLTRVGLDIGKVWVADDGAAVAVWTTPESVEAGAVFAEIGPRMAELSGSRLAAQQQMEGLLAPHRPKEPAWFLATVGVSPDHQGKGLGSAVVLPGVEAAERAGVPAFLETSAPRNLPFYERLGFTVTADVEVPEGPRTWCMTRKPGA

SEQ ID NO: 2712 - protein, 270 aa, synthetic construct
MALPVTALLLPLALLLHAARPDIQMTQSPSSLSASVGDRVTITCKASDHINNWLAWYQQKPGQAPKLLIYGATTLETGVPSRFSGSGSGTDYTLTISSLQPEDFATYYCQQSWNTPWTFGQGTKLEIKRGGGGSGGGGSGGGGSQVQLQQPGAELVKPGASVKMSCKASGYAFNSYWINWMKQKPGQGLEWIGQIYPGDGDTNYNGKFKGRATLTADTSSSTAYMQLSSLTSEDSAVYFCARSITTVVGCAMDYWGQGTSVTVSSTRARV

SEQ ID NO: 2713 - protein, 567 aa, synthetic construct
MALPVTALLLPLALLLHAARPDIQMTQSPSSLSASVGDRVTITCKASDHINNWLAWYQQKPGQAPKLLIYGATTLETGVPSRFSGSGSGTDYTLTISSLQPEDFATYYCQQSWNTPWTFGQGTKLEIKRGGGGSGGGGSGGGGSQVQLQQPGAELVKPGASVKMSCKASGYAFNSYWINWMKQKPGQGLEWIGQIYPGDGDTNYNGKFKGRATLTADTSSSTAYMQLSSLTSEDSAVYFCARSITTVVGCAMDYWGQGTSVTVSSTRARPMGRYRNLEGGSWSHPQFEKDYKDDDDKGSDYKDDDDKGSDYKDDDDKGSDYKDDDDKAWSHPQFEKHHHHHHHHTSGSGEGRGSLLTCGDVEENPGPHMTEYKPTVRLATRDDVPRAVRTLAAAFADYPATRHTVDPDRHIERVTELQELFLTRVGLDIGKVWVADDGAAVAVWTTPESVEAGAVFAEIGPRMAELSGSRLAAQQQMEGLLAPHRPKEPAWFLATVGVSPDHQGKGLGSAVVLPGVEAAERAGVPAFLETSAPRNLPFYERLGFTVTADVEVPEGPRTWCMTRKPGA

SEQ ID NO: 2714 - protein, 567 aa, synthetic construct
MALPVTALLLPLALLLHAARPDIQMTQSPSSLSASVGDRVTITCKASDHINNWLAWYQQKPGQAPKLLIYGATTLETGVPSRFSGSGSGTDYTLTISSLQPEDFATYYCQQSWNTPWTFGQGTKLEIKRGGGGSGGGGSGGGGSQVQLQQPGAELVKPGASVKMSCKASGYAFNSYWINWMKQKPGQGLEWIGQIYPGDGDTNYNGKFKGRATLTADTSSSTAYMQLSSLTSEDSAVYFCARSITTVVGCAMDYWGQGTSVTVSSTRARHLVRYRNLEGGSWSHPQFEKDYKDDDDKGSDYKDDDDKGSDYKDDDDKGSDYKDDDDKAWSHPQFEKHHHHHHHHTSGSGEGRGSLLTCGDVEENPGPHMTEYKPTVRLATRDDVPRAVRTLAAAFADYPATRHTVDPDRHIERVTELQELFLTRVGLDIGKVWVADDGAAVAVWTTPESVEAGAVFAEIGPRMAELSGSRLAAQQQMEGLLAPHRPKEPAWFLATVGVSPDHQGKGLGSAVVLPGVEAAERAGVPAFLETSAPRNLPFYERLGFTVTADVEVPEGPRTWCMTRKPGA

SEQ ID NO: 2715 - protein, 567 aa, synthetic construct
MALPVTALLLPLALLLHAARPDIQMTQSPSSLSASVGDRVTITCKASDHINNWLAWYQQKPGQAPKLLIYGATTLETGVPSRFSGSGSGTDYTLTISSLQPEDFATYYCQQSWNTPWTFGQGTKLEIKRGGGGSGGGGSGGGGSQVQLQQPGAELVKPGASVKMSCKASGYAFNSYWINWMKQKPGQGLEWIGQIYPGDGDTNYNGKFKGRATLTADTSSSTAYMQLSSLTSEDSAVYFCARSITTVVGCAMDYWGQGTSVTVSSTRARQGVRYRNLEGGSWSHPQFEKDYKDDDDKGSDYKDDDDKGSDYKDDDDKGSDYKDDDDKAWSHPQFEKHHHHHHHHTSGSGEGRGSLLTCGDVEENPGPHMTEYKPTVRLATRDDVPRAVRTLAAAFADYPATRHTVDPDRHIERVTELQELFLTRVGLDIGKVWVADDGAAVAVWTTPESVEAGAVFAEIGPRMAELSGSRLAAQQQMEGLLAPHRPKEPAWFLATVGVSPDHQGKGLGSAVVLPGVEAAERAGVPAFLETSAPRNLPFYERLGFTVTADVEVPEGPRTWCMTRKPGA

SEQ ID NO: 2716 - protein, 567 aa, synthetic construct
MALPVTALLLPLALLLHAARPDIQMTQSPSSLSASVGDRVTITCKASDHINNWLAWYQQKPGQAPKLLIYGATTLETGVPSRFSGSGSGTDYTLTISSLQPEDFATYYCQQSWNTPWTFGQGTKLEIKRGGGGSGGGGSGGGGSQVQLQQPGAELVKPGASVKMSCKASGYAFNSYWINWMKQKPGQGLEWIGQIYPGDGDTNYNGKFKGRATLTADTSSSTAYMQLSSLTSEDSAVYFCARSITTVVGCAMDYWGQGTSVTVSSTRARVKARYRNLEGGSWSHPQFEKDYKDDDDKGSDYKDDDDKGSDYKDDDDKGSDYKDDDDKAWSHPQFEKHHHHHHHHTSGSGEGRGSLLTCGDVEENPGPHMTEYKPTVRLATRDDVPRAVRTLAAAFADYPATRHTVDPDRHIERVTELQELFLTRVGLDIGKVWVADDGAAVAVWTTPESVEAGAVFAEIGPRMAELSGSRLAAQQQMEGLLAPHRPKEPAWFLATVGVSPDHQGKGLGSAVVLPGVEAAERAGVPAFLETSAPRNLPFYERLGFTVTADVEVPEGPRTWCMTRKPGA

SEQ ID NO: 2717 - protein, 567 aa, synthetic construct
MALPVTALLLPLALLLHAARPDIQMTQSPSSLSASVGDRVTITCKASDHINNWLAWYQQKPGQAPKLLIYGATTLETGVPSRFSGSGSGTDYTLTISSLQPEDFATYYCQQSWNTPWTFGQGTKLEIKRGGGGSGGGGSGGGGSQVQLQQPGAELVKPGASVKMSCKASGYAFNSYWINWMKQKPGQGLEWIGQIYPGDGDTNYNGKFKGRATLTADTSSSTAYMQLSSLTSEDSAVYFCARSITTVVGCAMDYWGQGTSVTVSSTRARWRIRYRNLEGGSWSHPQFEKDYKDDDDKGSDYKDDDDKGSDYKDDDDKGSDYKDDDDKAWSHPQFEKHHHHHHHHTSGSGEGRGSLLTCGDVEENPGPHMTEYKPTVRLATRDDVPRAVRTLAAAFADYPATRHTVDPDRHIERVTELQELFLTRVGLDIGKVWVADDGAAVAVWTTPESVEAGAVFAEIGPRMAELSGSRLAAQQQMEGLLAPHRPKEPAWFLATVGVSPDHQGKGLGSAVVLPGVEAAERAGVPAFLETSAPRNLPFYERLGFTVTADVEVPEGPRTWCMTRKPGA

SEQ ID NO: 2718 - protein, 567 aa, synthetic construct
MALPVTALLLPLALLLHAARPDIQMTQSPSSLSASVGDRVTITCKASDHINNWLAWYQQKPGQAPKLLIYGATTLETGVPSRFSGSGSGTDYTLTISSLQPEDFATYYCQQSWNTPWTFGQGTKLEIKRGGGGSGGGGSGGGGSQVQLQQPGAELVKPGASVKMSCKASGYAFNSYWINWMKQKPGQGLEWIGQIYPGDGDTNYNGKFKGRATLTADTSSSTAYMQLSSLTSEDSAVYFCARSITTVVGCAMDYWGQGTSVTVSSTRARGVYRYRNLEGGSWSHPQFEKDYKDDDDKGSDYKDDDDKGSDYKDDDDKGSDYKDDDDKAWSHPQFEKHHHHHHHHTSGSGEGRGSLLTCGDVEENPGPHMTEYKPTVRLATRDDVPRAVRTLAAAFADYPATRHTVDPDRHIERVTELQELFLTRVGLDIGKVWVADDGAAVAVWTTPESVEAGAVFAEIGPRMAELSGSRLAAQQQMEGLLAPHRPKEPAWFLATVGVSPDHQGKGLGSAVVLPGVEAAERAGVPAFLETSAPRNLPFYERLGFTVTADVEVPEGPRTWCMTRKPGA

SEQ ID NO: 2719 - protein, 567 aa, synthetic construct
MALPVTALLLPLALLLHAARPDIQMTQSPSSLSASVGDRVTITCKASDHINNWLAWYQQKPGQAPKLLIYGATTLETGVPSRFSGSGSGTDYTLTISSLQPEDFATYYCQQSWNTPWTFGQGTKLEIKRGGGGSGGGGSGGGGSQVQLQQPGAELVKPGASVKMSCKASGYAFNSYWINWMKQKPGQGLEWIGQIYPGDGDTNYNGKFKGRATLTADTSSSTAYMQLSSLTSEDSAVYFCARSITTVVGCAMDYWGQGTSVTVSSTRARSCGRYRNLEGGSWSHPQFEKDYKDDDDKGSDYKDDDDKGSDYKDDDDKGSDYKDDDDKAWSHPQFEKHHHHHHHHTSGSGEGRGSLLTCGDVEENPGPHMTEYKPTVRLATRDDVPRAVRTLAAAFADYPATRHTVDPDRHIERVTELQELFLTRVGLDIGKVWVADDGAAVAVWTTPESVEAGAVFAEIGPRMAELSGSRLAAQQQMEGLLAPHRPKEPAWFLATVGVSPDHQGKGLGSAVVLPGVEAAERAGVPAFLETSAPRNLPFYERLGFTVTADVEVPEGPRTWCMTRKPGA

SEQ ID NO: 2720 - protein, 270 aa, synthetic construct
MALPVTALLLPLALLLHAARPDIQMTQSPSSLSASVGDRVTITCKASDHINNWLAWYQQKPGQAPKLLIYGATTLETGVPSRFSGSGSGTDYTLTISSLQPEDFATYYCQQSWNTPWTFGQGTKLEIKRGGGGSGGGGSGGGGSQVQLQQPGAELVKPGASVKMSCKASGYAFNSYWINWMKQKPGQGLEWIGQIYPGDGDTNYNGKFKGRATLTADTSSSTAYMQLSSLTSEDSAVYFCARSITTVVGCAMDYWGQGTSVTVSSTRARP

SEQ ID NO: 2721 - protein, 567 aa, synthetic construct
MALPVTALLLPLALLLHAARPDIQMTQSPSSLSASVGDRVTITCKASDHINNWLAWYQQKPGQAPKLLIYGATTLETGVPSRFSGSGSGTDYTLTISSLQPEDFATYYCQQSWNTPWTFGQGTKLEIKRGGGGSGGGGSGGGGSQVQLQQPGAELVKPGASVKMSCKASGYAFNSYWINWMKQKPGQGLEWIGQIYPGDGDTNYNGKFKGRATLTADTSSSTAYMQLSSLTSEDSAVYFCARSITTVVGCAMDYWGQGTSVTVSSTRARFVRRYRNLEGGSWSHPQFEKDYKDDDDKGSDYKDDDDKGSDYKDDDDKGSDYKDDDDKAWSHPQFEKHHHHHHHHTSGSGEGRGSLLTCGDVEENPGPHMTEYKPTVRLATRDDVPRAVRTLAAAFADYPATRHTVDPDRHIERVTELQELFLTRVGLDIGKVWVADDGAAVAVWTTPESVEAGAVFAEIGPRMAELSGSRLAAQQQMEGLLAPHRPKEPAWFLATVGVSPDHQGKGLGSAVVLPGVEAAERAGVPAFLETSAPRNLPFYERLGFTVTADVEVPEGPRTWCMTRKPGA

SEQ ID NO: 2722 - protein, 567 aa, synthetic construct
MALPVTALLLPLALLLHAARPDIQMTQSPSSLSASVGDRVTITCKASDHINNWLAWYQQKPGQAPKLLIYGATTLETGVPSRFSGSGSGTDYTLTISSLQPEDFATYYCQQSWNTPWTFGQGTKLEIKRGGGGSGGGGSGGGGSQVQLQQPGAELVKPGASVKMSCKASGYAFNSYWINWMKQKPGQGLEWIGQIYPGDGDTNYNGKFKGRATLTADTSSSTAYMQLSSLTSEDSAVYFCARSITTVVGCAMDYWGQGTSVTVSSTRARLISRYRNLEGGSWSHPQFEKDYKDDDDKGSDYKDDDDKGSDYKDDDDKGSDYKDDDDKAWSHPQFEKHHHHHHHHTSGSGEGRGSLLTCGDVEENPGPHMTEYKPTVRLATRDDVPRAVRTLAAAFADYPATRHTVDPDRHIERVTELQELFLTRVGLDIGKVWVADDGAAVAVWTTPESVEAGAVFAEIGPRMAELSGSRLAAQQQMEGLLAPHRPKEPAWFLATVGVSPDHQGKGLGSAVVLPGVEAAERAGVPAFLETSAPRNLPFYERLGFTVTADVEVPEGPRTWCMTRKPGA

SEQ ID NO: 2723 - protein, 567 aa, synthetic construct
MALPVTALLLPLALLLHAARPDIQMTQSPSSLSASVGDRVTITCKASDHINNWLAWYQQKPGQAPKLLIYGATTLETGVPSRFSGSGSGTDYTLTISSLQPEDFATYYCQQSWNTPWTFGQGTKLEIKRGGGGSGGGGSGGGGSQVQLQQPGAELVKPGASVKMSCKASGYAFNSYWINWMKQKPGQGLEWIGQIYPGDGDTNYNGKFKGRATLTADTSSSTAYMQLSSLTSEDSAVYFCARSITTVVGCAMDYWGQGTSVTVSSTRARSNSRYRNLEGGSWSHPQFEKDYKDDDDKGSDYKDDDDKGSDYKDDDDKGSDYKDDDDKAWSHPQFEKHHHHHHHHTSGSGEGRGSLLTCGDVEENPGPHMTEYKPTVRLATRDDVPRAVRTLAAAFADYPATRHTVDPDRHIERVTELQELFLTRVGLDIGKVWVADDGAAVAVWTTPESVEAGAVFAEIGPRMAELSGSRLAAQQQMEGLLAPHRPKEPAWFLATVGVSPDHQGKGLGSAVVLPGVEAAERAGVPAFLETSAPRNLPFYERLGFTVTADVEVPEGPRTWCMTRKPGA

SEQ ID NO: 2724 - protein, 269 aa, synthetic construct
MALPVTALLLPLALLLHAARPDIQMTQSPSSLSASVGDRVTITCKASDHINNWLAWYQQKPGQAPKLLIYGATTLETGVPSRFSGSGSGTDYTLTISSLQPEDFATYYCQQSWNTPWTFGQGTKLEIKRGGGGSGGGGSGGGGSQVQLQQPGAELVKPGASVKMSCKASGYAFNSYWINWMKQKPGQGLEWIGQIYPGDGDTNYNGKFKGRATLTADTSSSTAYMQLSSLTSEDSAVYFCARSITTVVGCAMDYWGQGTSVTVSSTRAR

SEQ ID NO: 2725 - protein, 567 aa, synthetic construct
MALPVTALLLPLALLLHAARPDIQMTQSPSSLSASVGDRVTITCKASDHINNWLAWYQQKPGQAPKLLIYGATTLETGVPSRFSGSGSGTDYTLTISSLQPEDFATYYCQQSWNTPWTFGQGTKLEIKRGGGGSGGGGSGGGGSQVQLQQPGAELVKPGASVKMSCKASGYAFNSYWINWMKQKPGQGLEWIGQIYPGDGDTNYNGKFKGRATLTADTSSSTAYMQLSSLTSEDSAVYFCARSITTVVGCAMDYWGQGTSVTVSSTRARILARYRNLEGGSWSHPQFEKDYKDDDDKGSDYKDDDDKGSDYKDDDDKGSDYKDDDDKAWSHPQFEKHHHHHHHHTSGSGEGRGSLLTCGDVEENPGPHMTEYKPTVRLATRDDVPRAVRTLAAAFADYPATRHTVDPDRHIERVTELQELFLTRVGLDIGKVWVADDGAAVAVWTTPESVEAGAVFAEIGPRMAELSGSRLAAQQQMEGLLAPHRPKEPAWFLATVGVSPDHQGKGLGSAVVLPGVEAAERAGVPAFLETSAPRNLPFYERLGFTVTADVEVPEGPRTWCMTRKPGA

SEQ ID NO: 2726 - protein, 567 aa, synthetic construct
MALPVTALLLPLALLLHAARPDIQMTQSPSSLSASVGDRVTITCKASDHINNWLAWYQQKPGQAPKLLIYGATTLETGVPSRFSGSGSGTDYTLTISSLQPEDFATYYCQQSWNTPWTFGQGTKLEIKRGGGGSGGGGSGGGGSQVQLQQPGAELVKPGASVKMSCKASGYAFNSYWINWMKQKPGQGLEWIGQIYPGDGDTNYNGKFKGRATLTADTSSSTAYMQLSSLTSEDSAVYFCARSITTVVGCAMDYWGQGTSVTVSSTRARRSSRYRNLEGGSWSHPQFEKDYKDDDDKGSDYKDDDDKGSDYKDDDDKGSDYKDDDDKAWSHPQFEKHHHHHHHHTSGSGEGRGSLLTCGDVEENPGPHMTEYKPTVRLATRDDVPRAVRTLAAAFADYPATRHTVDPDRHIERVTELQELFLTRVGLDIGKVWVADDGAAVAVWTTPESVEAGAVFAEIGPRMAELSGSRLAAQQQMEGLLAPHRPKEPAWFLATVGVSPDHQGKGLGSAVVLPGVEAAERAGVPAFLETSAPRNLPFYERLGFTVTADVEVPEGPRTWCMTRKPGA

SEQ ID NO: 2727 - protein, 567 aa, synthetic construct
MALPVTALLLPLALLLHAARPDIQMTQSPSSLSASVGDRVTITCKASDHINNWLAWYQQKPGQAPKLLIYGATTLETGVPSRFSGSGSGTDYTLTISSLQPEDFATYYCQQSWNTPWTFGQGTKLEIKRGGGGSGGGGSGGGGSQVQLQQPGAELVKPGASVKMSCKASGYAFNSYWINWMKQKPGQGLEWIGQIYPGDGDTNYNGKFKGRATLTADTSSSTAYMQLSSLTSEDSAVYFCARSITTVVGCAMDYWGQGTSVTVSSTRARFLKRYRNLEGGSWSHPQFEKDYKDDDDKGSDYKDDDDKGSDYKDDDDKGSDYKDDDDKAWSHPQFEKHHHHHHHHTSGSGEGRGSLLTCGDVEENPGPHMTEYKPTVRLATRDDVPRAVRTLAAAFADYPATRHTVDPDRHIERVTELQELFLTRVGLDIGKVWVADDGAAVAVWTTPESVEAGAVFAEIGPRMAELSGSRLAAQQQMEGLLAPHRPKEPAWFLATVGVSPDHQGKGLGSAVVLPGVEAAERAGVPAFLETSAPRNLPFYERLGFTVTADVEVPEGPRTWCMTRKPGA

SEQ ID NO: 2728 - protein, 567 aa, synthetic construct; identical to SEQ ID NO: 2645

SEQ ID NO: 2729 - protein, 712 aa, synthetic construct
MALPVTALLLPLALLLHAARPARSEDRYRNPKGSGGSELPTQGTFSNVSTNVSPAKPTTTACARSEDRYRNPKGSGGSPAPRPPTPAPTIASQPLSLRPEACRPAAGGAVHTRGLDFACDIYIWAPLAGTCGVLLLSLVITLYCNHRNRRRVCKCPRPVVGGSGGSSHHWGYGKHNGPEHWHKDFPIAKGERQSPVDIDTHTAKYDPSLKPLSVSYDQATSLRILNNGHAFNVEFDDSQDKAVLKGGPLDGTYRLIQFHFHWGSLDGQGSEHTVDKKKYAAELHLVHWNTKYGDFGKAVQQPDGLAVLGIFLKVGSAKPGPQKVVDVLDSIKTKGKSADFTNFDPRGLLPESLDYWTYPGSLTTPPLLECVTWIVLKEPISVSSEQVLKFRKLNFNGEGEPEELMVDNWRPAQPLKNRQIKASFKRAKRSGSGATNFSLLKQAGDVEENPGPEFMKPTENNEDFNIVAVASNFATTDLDADRGKLPGKKLPLEVLKEMEANARKAGCTRGCLICLSHIKCTPKMKKFIPGRCHTYEGDKESAQGGIGEAIVDIPEIPGFKDLEPMEQFIAQVDLCVDCTTGCLKGLANVQCSDLLKKWLPQRCATFASKIQGQVDKIKGAGGDLEQKLISEEDLAKPTTTPAPRPPTPAPTIASQPLSLRPEACRPAAGGAVHTRGLDFACDIYIWAPLAGTCGVLLLSLVITLYCKRGRKK

SEQ ID NO: 2730 - protein, 794 aa, synthetic construct
MALPVTALLLPLALLLHAARPARSEDRYRNPKGSGGSAPTSSSTKKTQLQLEHLLLDLQMILNGINNYKNPKLTRMLTFKFYMPKKATELKHLQCLEEELKPLEEVLNLAQSKNFHLRPRDLISNINVIVLELKGSETTFMCEYADETATIVEFLNRWITFCQSIISTLTAKPTTTPAPRPPTPAPTIASQPLSLRPEACRPAAGGAVHTRGLDFACDIYIWAPLAGTCGVLLLSLVITLYCGGSGGSSHHWGYGKHNGPEHWHKDFPIAKGERQSPVDIDTHTAKYDPSLKPLSVSYDQATSLRILNNGHAFNVEFDDSQDKAVLKGGPLDGTYRLIQFHFHWGSLDGQGSEHTVDKKKYAAELHLVHWNTKYGDFGKAVQQPDGLAVLGIFLKVGSAKPGPQKVVDVLDSIKTKGKSADFTNFDPRGLLPESLDYWTYPGSLTTPPLLECVTWIVLKEPISVSSEQVLKFRKLNFNGEGEPEELMVDNWRPAQPLKNRQIKASFKRAKRSGSGATNFSLLKQAGDVEENPGPEFMKPTENNEDFNIVAVASNFATTDLDADRGKLPGKKLPLEVLKEMEANARKAGCTRGCLICLSHIKCTPKMKKFIPGRCHTYEGDKESAQGGIGEAIVDIPEIPGFKDLEPMEQFIAQVDLCVDCTTGCLKGLANVQCSDLLKKWLPQRCATFASKIQGQVDKIKGAGGDLEQKLISEEDLAKPTTTPAPRPPTPAPTIASQPLSLRPEACRPAAGGAVHTRGLDFACDIYIWAPLAGTCGVLLLSLVITLYCKRGRKK

SEQ ID NO: 2731 - protein, 835 aa, synthetic construct
MALPVTALLLPLALLLHAARPARSEDRYRNPKGSGGSELPTQGTFSNVSTNVSPAKPTTTACARSEDRYRNPKGSGGSAPTSSSTKKTQLQLEHLLLDLQMILNGINNYKNPKLTRMLTFKFYMPKKATELKHLQCLEEELKPLEEVLNLAQSKNFHLRPRDLISNINVIVLELKGSETTFMCEYADETATIVEFLNRWITFCQSIISTLTAKPTTTPAPRPPTPAPTIASQPLSLRPEACRPAAGGAVHTRGLDFACDIYIWAPLAGTCGVLLLSLVITLYCGGSGRSSHHWGYGKHNGPEHWHKDFPIAKGERQSPVDIDTHTAKYDPSLKPLSVSYDQATSLRILNNGHAFNVEFDDSQDKAVLKGGPLDGTYRLIQFHFHWGSLDGQGSEHTVDKKKYAAELHLVHWNTKYGDFGKAVQQPDGLAVLGIFLKVGSAKPGPQKVVDVLDSIKTKGKSADFTNFDPRGLLPESLDYWTYPGSLTTPPLLECVTWIVLKEPISVSSEQVLKFRKLNFNGEGEPEELMVDNWRPAQPLKNRQIKASFKRAKRSGSGATNFSLLKQAGDVEENPGPEFMKPTENNEDFNIVAVASNFATTDLDADRGKLPGKKLPLEVLKEMEANARKAGCTRGCLICLSHIKCTPKMKKFIPGRCHTYEGDKESAQGGIGEAIVDIPEIPGFKDLEPMEQFIAQVDLCVDCTTGCLKGLANVQCSDLLKKWLPQRCATFASKIQGQVDKIKGAGGDLEQKLISEEDLAKPTTTPAPRPPTPAPTIASQPLSLRPEACRPAAGGAVHTRGLDFACDIYIWAPLAGTCGVLLLSLVITLYCKRGRKK

SEQ ID NO: 2732 - protein, 712 aa, synthetic construct
MALPVTALLLPLALLLHAARPARSEDRYRNPKGSGGSELPTQGTFSNVSTNVSPAKPTTTACARSEDRYRNPKGSGGSPAPRPPTPAPTIASQPLSLRPEACRPAAGGAVHTRGLDFACDIYIWAPLAGTCGVLLLSLVITLYCNHRNRRRVCKCPRPVVGGSGGSSHHWGYGKHNGPEHWHKDFPIAKGERQSPVDIDTHTAKYDPSLKPLSVSYDQATSLRILNNGHAFNVEFDDSQDKAVLKGGPLDGTYRLIQFHFHWGSLDGQGSEHTVDKKKYAAELHLVHWNTKYGDFGKAVQQPDGLAVLGIFLKVGSAKPGHQKVVDVLDSIKTKGKSADFTNFDPRGLLPESLDYWTYPGSLTTPPLLECVTWIVLKEPISVSSEQVLKFRKLNFNGEGEPEELMVDNWRPAQPLKNRQIKASFKRAKRSGSGATNFSLLKQAGDVEENPGPEFMKPTENNEDFNIVAVASNFATTDLDADRGKLPGKKLPLEVLKEMEANARKAGCTRGCLICLSHIKCTPKMKKFIPGRCHTYEGDKESAQGGIGEAIVDIPEIPGFKDLEPMEQFIAQVDLCVDCTTGCLKGLANVQCSDLLKKWLPQRCATFASKIQGQVDKIKGAGGDLEQKLISEEDLAKPTTTPAPRPPTPAPTIASQPLSLRPEACRPAAGGAVHTRGLDFACDIYIWAPLAGTCGVLLLSLVITLYCKRGRKK

SEQ ID NO: 2733 - protein, 781 aa, synthetic construct
MARLALSPVPSHWMVALLLLLSAEPVPAARSEDRYRNPKGSACSRIWQSPRFIARKRGFTVKMHCYMNSASGNVSWLWKQEMDENPQQLKLEKGRMEESQNESLATLTIQGIRFEDNGIYFCQQKCNNTSEVYQGCGTELRVMGFSTLAQLKQRNTLKDGIIMIQTLLIILFIIVPIFLLLDKDDSKAGMEEDHTYEGLDIDQTATYEDIVTLRTGEVKWSVGEHPGQEGGSGKSSHHWGYGKHNGPEHWHKDFPIAKGERQSPVDIDTHTAKYDPSLKPLSVSYDQATSLRILNNGHAFNVEFDDSQDKAVLKGGPLDGTYRLIQFHFHWGSLDGQGSEHTVDKKKYAAELHLVHWNTKYGDFGKAVQQPDGLAVLGIFLKVGSAKPGPQKVVDVLDSIKTKGKSADFTNFDPRGLLPESLDYWTYPGSLTTPPLLECVTWIVLKEPISVSSEQVLKFRKLNFNGEGEPEELMVDNWRPAQPLKNRQIKASFKRAKRSGSGATNFSLLKQAGDVEENPGPEFMKPTENNEDFNIVAVASNFATTDLDADRGKLPGKKLPLEVLKEMEANARKAGCTRGCLICLSHIKCTPKMKKFIPGRCHTYEGDKESAQGGIGEAIVDIPEIPGFKDLEPMEQFIAQVDLCVDCTTGCLKGLANVQCSDLLKKWLPQRCATFASKIQGQVDKIKGAGGDLEQKLISEEDLAKPTTTPAPRPPTPAPTIASQPLSLRPEACRPAAGGAVHTRGLDFACDIYIWAPLAGTCGVLLLSLVITLYCKRGRKK

SEQ ID NO: 2734 - protein, 781 aa, synthetic construct
MARLALSPVPSHWMVALLLLLSAEPVPAARSEDRYRNPKGSACSRIWQSPRFIARKRGFTVKMHCYMNSASGNVSWLWKQEMDENPQQLKLEKGRMEESQNESLATLTIQGIRFEDNGIYFCQQKCNNTSEVYQGCGTELRVMGFSTLAQLKQRNTLKDGIIMIQTLLIILFIIVPIFLLLDKDDSKAGMEEDHTYEGLDIDQTATYEDIVTLRTGEVKWSVGEHPGQEGGSGRSSHHWGYGKHNGPEHWHKDFPIAKGERQSPVDIDTHTAKYDPSLKPLSVSYDQATSLRILNNGHAFNVEFDDSQDKAVLKGGPLDGTYRLIQFHFHWGSLDGQGSEHTVDKKKYAAELHLVHWNTKYGDFGKAVQQPDGLAVLGIFLKVGSAKPGHQKVVDVLDSIKTKGKSADFTNFDPRGLLPESLDYWTYPGSLTTPPLLECVTWIVLKEPISVSSEQVLKFRKLNFNGEGEPEELMVDNWRPAQPLKNRQIKASFKRAKRSGSGATNFSLLKQAGDVEENPGPEFMKPTENNEDFNIVAVASNFATTDLDADRGKLPGKKLPLEVLKEMEANARKAGCTRGCLICLSHIKCTPKMKKFIPGRCHTYEGDKESAQGGIGEAIVDIPEIPGFKDLEPMEQFIAQVDLCVDCTTGCLKGLANVQCSDLLKKWLPQRCATFASKIQGQVDKIKGAGGDLEQKLISEEDLAKPTTTPAPRPPTPAPTIASQPLSLRPEACRPAAGGAVHTRGLDFACDIYIWAPLAGTCGVLLLSLVITLYCKRGRKK

SEQ ID NO: 2735 - protein, 794 aa, synthetic construct
MALPVTALLLPLALLLHAARPARSEDRYRNPKGSGGSAPTSSSTKKTQLQLEHLLLDLQMILNGINNYKNPKLTRMLTFKFYMPKKATELKHLQCLEEELKPLEEVLNLAQSKNFHLRPRDLISNINVIVLELKGSETTFMCEYADETATIVEFLNRWITFCQSIISTLTAKPTTTPAPRPPTPAPTIASQPLSLRPEACRPAAGGAVHTRGLDFACDIYIWAPLAGTCGVLLLSLVITLYCGGSGRSSHHWGYGKHNGPEHWHKDFPIAKGERQSPVDIDTHTAKYDPSLKPLSVSYDQATSLRHLNNGHAFNVEFDDSQDKAVLKGGPLDGTYRLIQFHFHWGSLDKQGSEHTVDKKKYAAELHLVHWNTKYGDFGKAVQQPDGLAVLGIFLKVGSAKPGLQKVVDVLDSIKTKGKSADFTNFDPRGLLPESLDYWTYPGSLTTPPLLECVTWIVLKEPISVSSEQVLKFRKLNFNGEGEPEELMVDNWRPAQPLKNRQIKASFKRAKRSGSGATNFSLLKQAGDVEENPGPEFMKPTENNEDFNIVAVASNFATTDLDADRGKLPGKKLPLEVLKEMEANARKAGCTRGCLICLSHIKCTPKMKKFIPGRCHTYEGDKESAQGGIGEAIVDIPEIPGFKDLEPMEQFIAQVDLCVDCTTGCLKGLANVQCSDLLKKWLPQRCATFASKIQGQVDKIKGAGGDLEQKLISEEDLAKPTTTPAPRPPTPAPTIASQPLSLRPEACRPAAGGAVHTRGLDFACDIYIWAPLAGTCGVLLLSLVITLYCKRGRKK

SEQ ID NO: 2736 - protein, 835 aa, synthetic construct
MALPVTALLLPLALLLHAARPARSEDRYRNPKGSGGSELPTQGTFSNVSTNVSPAKPTTTACARSEDRYRNPKGSGGSAPTSSSTKKTQLQLEHLLLDLQMILNGINNYKNPKLTRMLTFKFYMPKKATELKHLQCLEEELKPLEEVLNLAQSKNFHLRPRDLISNINVIVLELKGSETTFMCEYADETATIVEFLNRWITFCQSIISTLTAKPTTTPAPRPPTPAPTIASQPLSLRPEACRPAAGGAVHTRGLDFACDIYIWAPLAGTCGVLLLSLVITLYCGGSGRSSHHWGYGKHNGPEHWHKDFPIAKGERQSPVDIDTHTAKYDPSLKPLSVSYDQATSLRHLNNGHAFNVEFDDSQDKAVLKGGPLDGTYRLIQFHFHWGSLDKQGSEHTVDKKKYAAELHLVHWNTKYGDFGKAVQQPDGLAVLGIFLKVGSAKPGLQKVVDVLDSIKTKGKSADFTNFDPRGLLPESLDYWTYPGSLTTPPLLECVTWIVLKEPISVSSEQVLKFRKLNFNGEGEPEELMVDNWRPAQPLKNRQIKASFKRAKRSGSGATNFSLLKQAGDVEENPGPEFMKPTENNEDFNIVAVASNFATTDLDADRGKLPGKKLPLEVLKEMEANARKAGCTRGCLICLSHIKCTPKMKKFIPGRCHTYEGDKESAQGGIGEAIVDIPEIPGFKDLEPMEQFIAQVDLCVDCTTGCLKGLANVQCSDLLKKWLPQRCATFASKIQGQVDKIKGAGGDLEQKLISEEDLAKPTTTPAPRPPTPAPTIASQPLSLRPEACRPAAGGAVHTRGLDFACDIYIWAPLAGTCGVLLLSLVITLYCKRGRKK

SEQ ID NO: 2737 - protein, 567 aa, synthetic construct; identical to SEQ ID NO: 2714

SEQ ID NO: 2738 - protein, 566 aa, synthetic construct
MALPVTALLLPLALLLHAARPDIQMTQSPSSLSASVGDRVTITCKASDHINNWLAWYQQKPGQAPKLLIYGATTLETGVPSRFSGSGSGTDYTLTISSLQPEDFATYYCQQSWNTPWTFGQGTKLEIKRGGGGSGGGGSGGGGSQVQLQQPGAELVKPGASVKMSCKASGYAFNSYWINWMKQKPGQGLEWIGQIYPGDGDTNYNGKFKGRATLTADTSSSTAYMQLSSLTSEDSAVYFCARSITTVVGCAMDYWGQGTSVTVSSTRAKSEDRYKLEGGSWSHPQFEKDYKDDDDKGSDYKDDDDKGSDYKDDDDKGSDYKDDDDKAWSHPQFEKHHHHHHHHTSGSGEGRGSLLTCGDVEENPGPHMTEYKPTVRLATRDDVPRAVRTLAAAFADYPATRHTVDPDRHIERVTELQELFLTRVGLDIGKVWVADDGAAVAVWTTPESVEAGAVFAEIGPRMAELSGSRLAAQQQMEGLLAPHRPKEPAWFLATVGVSPDHQGKGLGSAVVLPGVEAAERAGVPAFLETSAPRNLPFYERLGFTVTADVEVPEGPRTWCMTRKPGA

SEQ ID NO: 2739 - protein, 567 aa, synthetic construct
MALPVTALLLPLALLLHAARPDIQMTQSPSSLSASVGDRVTITCKASDHINNWLAWYQQKPGQAPKLLIYGATTLETGVPSRFSGSGSGTDYTLTISSLQPEDFATYYCQQSWNTPWTFGQGTKLEIKRGGGGSGGGGSGGGGSQVQLQQPGAELVKPGASVKMSCKASGYAFNSYWINWMKQKPGQGLEWIGQIYPGDGDTNYNGKFKGRATLTADTSSSTAYMQLSSLTSEDSAVYFCARSITTVVGCAMDYWGQGTSVTVSSTRAVSEDRYRNLEGGSWSHPQFEKDYKDDDDKGSDYKDDDDKGSDYKDDDDKGSDYKDDDDKAWSHPQFEKHHHHHHHHTSGSGEGRGSLLTCGDVEENPGPHMTEYKPTVRLATRDDVPRAVRTLAAAFADYPATRHTVDPDRHIERVTELQELFLTRVGLDIGKVWVADDGAAVAVWTTPESVEAGAVFAEIGPRMAELSGSRLAAQQQMEGLLAPHRPKEPAWFLATVGVSPDHQGKGLGSAVVLPGVEAAERAGVPAFLETSAPRNLPFYERLGFTVTADVEVPEGPRTWCMTRKPGA

SEQ ID NO: 2740 - protein, 566 aa, synthetic construct
MALPVTALLLPLALLLHAARPDIQMTQSPSSLSASVGDRVTITCKASDHINNWLAWYQQKPGQAPKLLIYGATTLETGVPSRFSGSGSGTDYTLTISSLQPEDFATYYCQQSWNTPWTFGQGTKLEIKRGGGGSGGGGSGGGGSQVQLQQPGAELVKPGASVKMSCKASGYAFNSYWINWMKQKPGQGLEWIGQIYPGDGDTNYNGKFKGRATLTADTSSSTAYMQLSSLTSEDSAVYFCARSITTVVGCAMDYWGQGTSVTVSSTRRSSDRYRNLEGGSWSHPQFEKDYKDDDDKGSDYKDDDDKGSDYKDDDDKGSDYKDDDDKAWSHPQFEKHHHHHHHHTSGSGEGRGSLLTCGDVEENPGPHMTEYKPTVRLATRDDVPRAVRTLAAAFADYPATRHTVDPDRHIERVTELQELFLTRVGLDIGKVWVADDGAAVAVWTTPESVEAGAVFAEIGPRMAELSGSRLAAQQQMEGLLAPHRPKEPAWFLATVGVSPDHQGKGLGSAVVLPGVEAAERAGVPAFLETSAPRNLPFYERLGFTVTADVEVPEGPRTWCMTRKPGA

SEQ ID NO: 2741 - protein, 566 aa, synthetic construct
MALPVTALLLPLALLLHAARPDIQMTQSPSSLSASVGDRVTITCKASDHINNWLAWYQQKPGQAPKLLIYGATTLETGVPSRFSGSGSGTDYTLTISSLQPEDFATYYCQQSWNTPWTFGQGTKLEIKRGGGGSGGGGSGGGGSQVQLQQPGAELVKPGASVKMSCKASGYAFNSYWINWMKQKPGQGLEWIGQIYPGDGDTNYNGKFKGRATLTADTSSSTAYMQLSSLTSEDSAVYFCARSITTVVGCAMDYWGQGTSVTVSSTRRSIDRYRNLEGGSWSHPQFEKDYKDDDDKGSDYKDDDDKGSDYKDDDDKGSDYKDDDDKAWSHPQFEKHHHHHHHHTSGSGEGRGSLLTCGDVEENPGPHMTEYKPTVRLATRDDVPRAVRTLAAAFADYPATRHTVDPDRHIERVTELQELFLTRVGLDIGKVWVADDGAAVAVWTTPESVEAGAVFAEIGPRMAELSGSRLAAQQQMEGLLAPHRPKEPAWFLATVGVSPDHQGKGLGSAVVLPGVEAAERAGVPAFLETSAPRNLPFYERLGFTVTADVEVPEGPRTWCMTRKPGA

SEQ ID NO: 2742 - protein, 566 aa, synthetic construct
MALPVTALLLPLALLLHAARPDIQMTQSPSSLSASVGDRVTITCKASDHINNWLAWYQQKPGQAPKLLIYGATTLETGVPSRFSGSGSGTDYTLTISSLQPEDFATYYCQQSWNTPWTFGQGTKLEIKRGGGGSGGGGSGGGGSQVQLQQPGAELVKPGASVKMSCKASGYAFNSYWINWMKQKPGQGLEWIGQIYPGDGDTNYNGKFKGRATLTADTSSSTAYMQLSSLTSEDSAVYFCARSITTVVGCAMDYWGQGTSVTVSSTRRSESRYRNLEGGSWSHPQFEKDYKDDDDKGSDYKDDDDKGSDYKDDDDKGSDYKDDDDKAWSHPQFEKHHHHHHHHTSGSGEGRGSLLTCGDVEENPGPHMTEYKPTVRLATRDDVPRAVRTLAAAFADYPATRHTVDPDRHIERVTELQELFLTRVGLDIGKVWVADDGAAVAVWTTPESVEAGAVFAEIGPRMAELSGSRLAAQQQMEGLLAPHRPKEPAWFLATVGVSPDHQGKGLGSAVVLPGVEAAERAGVPAFLETSAPRNLPFYERLGFTVTADVEVPEGPRTWCMTRKPGA

SEQ ID NO: 2743 - protein, 566 aa, synthetic construct; identical to SEQ ID NO: 2665

SEQ ID NO: 2744 - protein, 564 aa, synthetic construct
MALPVTALLLPLALLLHAARPDIQMTQSPSSLSASVGDRVTITCKASDHINNWLAWYQQKPGQAPKLLIYGATTLETGVPSRFSGSGSGTDYTLTISSLQPEDFATYYCQQSWNTPWTFGQGTKLEIKRGGGGSGGGGSGGGGSQVQLQQPGAELVKPGASVKMSCKASGYAFNSYWINWMKQKPGQGLEWIGQIYPGDGDTNYNGKFKGRATLTADTSSSTAYMQLSSLTSEDSAVYFCARSITTVVGCAMDYWGQGTSVTVSSTRSEDRYRLEGGSWSHPQFEKDYKDDDDKGSDYKDDDDKGSDYKDDDDKGSDYKDDDDKAWSHPQFEKHHHHHHHHTSGSGEGRGSLLTCGDVEENPGPHMTEYKPTVRLATRDDVPRAVRTLAAAFADYPATRHTVDPDRHIERVTELQELFLTRVGLDIGKVWVADDGAAVAVWTTPESVEAGAVFAEIGPRMAELSGSRLAAQQQMEGLLAPHRPKEPAWFLATVGVSPDHQGKGLGSAVVLPGVEAAERAGVPAFLETSAPRNLPFYERLGFTVTADVEVPEGPRTWCMTRKPGA

SEQ ID NO: 2745 - protein, 565 aa, synthetic construct
MALPVTALLLPLALLLHAARPDIQMTQSPSSLSASVGDRVTITCKASDHINNWLAWYQQKPGQAPKLLIYGATTLETGVPSRFSGSGSGTDYTLTISSLQPEDFATYYCQQSWNTPWTFGQGTKLEIKRGGGGSGGGGSGGGGSQVQLQQPGAELVKPGASVKMSCKASGYAFNSYWINWMKQKPGQGLEWIGQIYPGDGDTNYNGKFKGRATLTADTSSSTAYMQLSSLTSEDSAVYFCARSITTVVGCAMDYWGQGTSVTVSSTRRIEDRYRLEGGSWSHPQFEKDYKDDDDKGSDYKDDDDKGSDYKDDDDKGSDYKDDDDKAWSHPQFEKHHHHHHHHTSGSGEGRGSLLTCGDVEENPGPHMTEYKPTVRLATRDDVPRAVRTLAAAFADYPATRHTVDPDRHIERVTELQELFLTRVGLDIGKVWVADDGAAVAVWTTPESVEAGAVFAEIGPRMAELSGSRLAAQQQMEGLLAPHRPKEPAWFLATVGVSPDHQGKGLGSAVVLPGVEAAERAGVPAFLETSAPRNLPFYERLGFTVTADVEVPEGPRTWCMTRKPGA

SEQ ID NO: 2746 - protein, 565 aa, synthetic construct
MALPVTALLLPLALLLHAARPDIQMTQSPSSLSASVGDRVTITCKASDHINNWLAWYQQKPGQAPKLLIYGATTLETGVPSRFSGSGSGTDYTLTISSLQPEDFATYYCQQSWNTPWTFGQGTKLEIKRGGGGSGGGGSGGGGSQVQLQQPGAELVKPGASVKMSCKASGYAFNSYWINWMKQKPGQGLEWIGQIYPGDGDTNYNGKFKGRATLTADTSSSTAYMQLSSLTSEDSAVYFCARSITTVVGCAMDYWGQGTSVTVSSTRRGEDRYRLEGGSWSHPQFEKDYKDDDDKGSDYKDDDDKGSDYKDDDDKGSDYKDDDDKAWSHPQFEKHHHHHHHHTSGSGEGRGSLLTCGDVEENPGPHMTEYKPTVRLATRDDVPRAVRTLAAAFADYPATRHTVDPDRHIERVTELQELFLTRVGLDIGKVWVADDGAAVAVWTTPESVEAGAVFAEIGPRMAELSGSRLAAQQQMEGLLAPHRPKEPAWFLATVGVSPDHQGKGLGSAVVLPGVEAAERAGVPAFLETSAPRNLPFYERLGFTVTADVEVPEGPRTWCMTRKPGA

SEQ ID NO: 2747 - protein, 565 aa, synthetic construct
MALPVTALLLPLALLLHAARPDIQMTQSPSSLSASVGDRVTITCKASDHINNWLAWYQQKPGQAPKLLIYGATTLETGVPSRFSGSGSGTDYTLTISSLQPEDFATYYCQQSWNTPWTFGQGTKLEIKRGGGGSGGGGSGGGGSQVQLQQPGAELVKPGASVKMSCKASGYAFNSYWINWMKQKPGQGLEWIGQIYPGDGDTNYNGKFKGRATLTADTSSSTAYMQLSSLTSEDSAVYFCARSITTVVGCAMDYWGQGTSVTVSSTRRSGDRYRLEGGSWSHPQFEKDYKDDDDKGSDYKDDDDKGSDYKDDDDKGSDYKDDDDKAWSHPQFEKHHHHHHHHTSGSGEGRGSLLTCGDVEENPGPHMTEYKPTVRLATRDDVPRAVRTLAAAFADYPATRHTVDPDRHIERVTELQELFLTRVGLDIGKVWVADDGAAVAVWTTPESVEAGAVFAEIGPRMAELSGSRLAAQQQMEGLLAPHRPKEPAWFLATVGVSPDHQGKGLGSAVVLPGVEAAERAGVPAFLETSAPRNLPFYERLGFTVTADVEVPEGPRTWCMTRKPGA

SEQ ID NO: 2748 - protein, 565 aa, synthetic construct
MALPVTALLLPLALLLHAARPDIQMTQSPSSLSASVGDRVTITCKASDHINNWLAWYQQKPGQAPKLLIYGATTLETGVPSRFSGSGSGTDYTLTISSLQPEDFATYYCQQSWNTPWTFGQGTKLEIKRGGGGSGGGGSGGGGSQVQLQQPGAELVKPGASVKMSCKASGYAFNSYWINWMKQKPGQGLEWIGQIYPGDGDTNYNGKFKGRATLTADTSSSTAYMQLSSLTSEDSAVYFCARSITTVVGCAMDYWGQGTSVTVSSTRRSCDRYRLEGGSWSHPQFEKDYKDDDDKGSDYKDDDDKGSDYKDDDDKGSDYKDDDDKAWSHPQFEKHHHHHHHHTSGSGEGRGSLLTCGDVEENPGPHMTEYKPTVRLATRDDVPRAVRTLAAAFADYPATRHTVDPDRHIERVTELQELFLTRVGLDIGKVWVADDGAAVAVWTTPESVEAGAVFAEIGPRMAELSGSRLAAQQQMEGLLAPHRPKEPAWFLATVGVSPDHQGKGLGSAVVLPGVEAAERAGVPAFLETSAPRNLPFYERLGFTVTADVEVPEGPRTWCMTRKPGA

SEQ ID NO: 2749 - protein, 565 aa, synthetic construct
MALPVTALLLPLALLLHAARPDIQMTQSPSSLSASVGDRVTITCKASDHINNWLAWYQQKPGQAPKLLIYGATTLETGVPSRFSGSGSGTDYTLTISSLQPEDFATYYCQQSWNTPWTFGQGTKLEIKRGGGGSGGGGSGGGGSQVQLQQPGAELVKPGASVKMSCKASGYAFNSYWINWMKQKPGQGLEWIGQIYPGDGDTNYNGKFKGRATLTADTSSSTAYMQLSSLTSEDSAVYFCARSITTVVGCAMDYWGQGTSVTVSSTRRSEDRYRLEGGSWSHPQFEKDYKDDDDKGSDYKDDDDKGSDYKDDDDKGSDYKDDDDKAWSHPQFEKHHHHHHHHTSGSGEGRGSLLTCGDVEENPGPHMTEYKPTVRLATRDDVPRAVRTLAAAFADYPATRHTVDPDRHIERVTELQELFLTRVGLDIGKVWVADDGAAVAVWTTPESVEAGAVFAEIGPRMAELSGSRLAAQQQMEGLLAPHRPKEPAWFLATVGVSPDHQGKGLGSAVVLPGVEAAERAGVPAFLETSAPRNLPFYERLGFTVTADVEVPEGPRTWCMTRKPGA

SEQ ID NO: 2750 - protein, 566 aa, synthetic construct
MALPVTALLLPLALLLHAARPDIQMTQSPSSLSASVGDRVTITCKASDHINNWLAWYQQKPGQAPKLLIYGATTLETGVPSRFSGSGSGTDYTLTISSLQPEDFATYYCQQSWNTPWTFGQGTKLEIKRGGGGSGGGGSGGGGSQVQLQQPGAELVKPGASVKMSCKASGYAFNSYWINWMKQKPGQGLEWIGQIYPGDGDTNYNGKFKGRATLTADTSSSTAYMQLSSLTSEDSAVYFCARSITTVVGCAMDYWGQGTSVTVSSTRRWEDRYRNLEGGSWSHPQFEKDYKDDDDKGSDYKDDDDKGSDYKDDDDKGSDYKDDDDKAWSHPQFEKHHHHHHHHTSGSGEGRGSLLTCGDVEENPGPHMTEYKPTVRLATRDDVPRAVRTLAAAFADYPATRHTVDPDRHIERVTELQELFLTRVGLDIGKVWVADDGAAVAVWTTPESVEAGAVFAEIGPRMAELSGSRLAAQQQMEGLLAPHRPKEPAWFLATVGVSPDHQGKGLGSAVVLPGVEAAERAGVPAFLETSAPRNLPFYERLGFTVTADVEVPEGPRTWCMTRKPGA

SEQ ID NO: 2751 - protein, 566 aa, synthetic construct; identical to SEQ ID NO: 2738

SEQ ID NO: 2752 - protein, 566 aa, synthetic construct; identical to SEQ ID NO: 2738

SEQ ID NO: 2753 - protein, 567 aa, synthetic construct
MALPVTALLLPLALLLHAARPDIQMTQSPSSLSASVGDRVTITCKASDHINNWLAWYQQKPGQAPKLLIYGATTLETGVPSRFSGSGSGTDYTLTISSLQPEDFATYYCQQSWNTPWTFGQGTKLEIKRGGGGSGGGGSGGGGSQVQLQQPGAELVKPGASVKMSCKASGYAFNSYWINWMKQKPGQGLEWIGQIYPGDGDTNYNGKFKGRATLTADTSSSTAYMQLSSLTSEDSAVYFCARSITTVVGCAMDYWGQGTSVTVSSTRATSEDRYRNLEGGSWSHPQFEKDYKDDDDKGSDYKDDDDKGSDYKDDDDKGSDYKDDDDKAWSHPQFEKHHHHHHHHTSGSGEGRGSLLTCGDVEENPGPHMTEYKPTVRLATRDDVPRAVRTLAAAFADYPATRHTVDPDRHIERVTELQELFLTRVGLDIGKVWVADDGAAVAVWTTPESVEAGAVFAEIGPRMAELSGSRLAAQQQMEGLLAPHRPKEPAWFLATVGVSPDHQGKGLGSAVVLPGVEAAERAGVPAFLETSAPRNLPFYERLGFTVTADVEVPEGPRTWCMTRKPGA

SEQ ID NO: 2754 - protein, 567 aa, synthetic construct
MALPVTALLLPLALLLHAARPDIQMTQSPSSLSASVGDRVTITCKASDHINNWLAWYQQKPGQAPKLLIYGATTLETGVPSRFSGSGSGTDYTLTISSLQPEDFATYYCQQSWNTPWTFGQGTKLEIKRGGGGSGGGGSGGGGSQVQLQQPGAELVKPGASVKMSCKASGYAFNSYWINWMKQKPGQGLEWIGQIYPGDGDTNYNGKFKGRATLTADTSSSTAYMQLSSLTSEDSAVYFCARSITTVVGCAMDYWGQGTSVTVSSTRAGSEDRYRNLEGGSWSHPQFEKDYKDDDDKGSDYKDDDDKGSDYKDDDDKGSDYKDDDDKAWSHPQFEKHHHHHHHHTSGSGEGRGSLLTCGDVEENPGPHMTEYKPTVRLATRDDVPRAVRTLAAAFADYPATRHTVDPDRHIERVTELQELFLTRVGLDIGKVWVADDGAAVAVWTTPESVEAGAVFAEIGPRMAELSGSRLAAQQQMEGLLAPHRPKEPAWFLATVGVSPDHQGKGLGSAVVLPGVEAAERAGVPAFLETSAPRNLPFYERLGFTVTADVEVPEGPRTWCMTRKPGA

SEQ ID NO: 2755 - protein, 567 aa, synthetic construct
MALPVTALLLPLALLLHAARPDIQMTQSPSSLSASVGDRVTITCKASDHINNWLAWYQQKPGQAPKLLIYGATTLETGVPSRFSGSGSGTDYTLTISSLQPEDFATYYCQQSWNTPWTFGQGTKLEIKRGGGGSGGGGSGGGGSQVQLQQPGAELVKPGASVKMSCKASGYAFNSYWINWMKQKPGQGLEWIGQIYPGDGDTNYNGKFKGRATLTADTSSSTAYMQLSSLTSEDSAVYFCARSITTVVGCAMDYWGQGTSVTVSSTRASSEDRYRNLEGGSWSHPQFEKDYKDDDDKGSDYKDDDDKGSDYKDDDDKGSDYKDDDDKAWSHPQFEKHHHHHHHHTSGSGEGRGSLLTCGDVEENPGPHMTEYKPTVRLATRDDVPRAVRTLAAAFADYPATRHTVDPDRHIERVTELQELFLTRVGLDIGKVWVADDGAAVAVWTTPESVEAGAVFAEIGPRMAELSGSRLAAQQQMEGLLAPHRPKEPAWFLATVGVSPDHQGKGLGSAVVLPGVEAAERAGVPAFLETSAPRNLPFYERLGFTVTADVEVPEGPRTWCMTRKPGA

SEQ ID NO: 2756 - protein, 567 aa, synthetic construct
MALPVTALLLPLALLLHAARPDIQMTQSPSSLSASVGDRVTITCKASDHINNWLAWYQQKPGQAPKLLIYGATTLETGVPSRFSGSGSGTDYTLTISSLQPEDFATYYCQQSWNTPWTFGQGTKLEIKRGGGGSGGGGSGGGGSQVQLQQPGAELVKPGASVKMSCKASGYAFNSYWINWMKQKPGQGLEWIGQIYPGDGDTNYNGKFKGRATLTADTSSSTAYMQLSSLTSEDSAVYFCARSITTVVGCAMDYWGQGTSVTVSSTRACSEDRYRNLEGGSWSHPQFEKDYKDDDDKGSDYKDDDDKGSDYKDDDDKGSDYKDDDDKAWSHPQFEKHHHHHHHHTSGSGEGRGSLLTCGDVEENPGPHMTEYKPTVRLATRDDVPRAVRTLAAAFADYPATRHTVDPDRHIERVTELQELFLTRVGLDIGKVWVADDGAAVAVWTTPESVEAGAVFAEIGPRMAELSGSRLAAQQQMEGLLAPHRPKEPAWFLATVGVSPDHQGKGLGSAVVLPGVEAAERAGVPAFLETSAPRNLPFYERLGFTVTADVEVPEGPRTWCMTRKPGA

SEQ ID NO: 2757 - protein, 567 aa, synthetic construct; identical to SEQ ID NO: 2753

SEQ ID NO: 2758 - protein, 567 aa, synthetic construct
MALPVTALLLPLALLLHAARPDIQMTQSPSSLSASVGDRVTITCKASDHINNWLAWYQQKPGQAPKLLIYGATTLETGVPSRFSGSGSGTDYTLTISSLQPEDFATYYCQQSWNTPWTFGQGTKLEIKRGGGGSGGGGSGGGGSQVQLQQPGAELVKPGASVKMSCKASGYAFNSYWINWMKQKPGQGLEWIGQIYPGDGDTNYNGKFKGRATLTADTSSSTAYMQLSSLTSEDSAVYFCARSITTVVGCAMDYWGQGTSVTVSSTRAYSEDRYRNLEGGSWSHPQFEKDYKDDDDKGSDYKDDDDKGSDYKDDDDKGSDYKDDDDKAWSHPQFEKHHHHHHHHTSGSGEGRGSLLTCGDVEENPGPHMTEYKPTVRLATRDDVPRAVRTLAAAFADYPATRHTVDPDRHIERVTELQELFLTRVGLDIGKVWVADDGAAVAVWTTPESVEAGAVFAEIGPRMAELSGSRLAAQQQMEGLLAPHRPKEPAWFLATVGVSPDHQGKGLGSAVVLPGVEAAERAGVPAFLETSAPRNLPFYERLGFTVTADVEVPEGPRTWCMTRKPGA

SEQ ID NO: 2759 - protein, 567 aa, synthetic construct
MALPVTALLLPLALLLHAARPDIQMTQSPSSLSASVGDRVTITCKASDHINNWLAWYQQKPGQAPKLLIYGATTLETGVPSRFSGSGSGTDYTLTISSLQPEDFATYYCQQSWNTPWTFGQGTKLEIKRGGGGSGGGGSGGGGSQVQLQQPGAELVKPGASVKMSCKASGYAFNSYWINWMKQKPGQGLEWIGQIYPGDGDTNYNGKFKGRATLTADTSSSTAYMQLSSLTSEDSAVYFCARSITTVVGCAMDYWGQGTSVTVSSTRAHSEDRYRNLEGGSWSHPQFEKDYKDDDDKGSDYKDDDDKGSDYKDDDDKGSDYKDDDDKAWSHPQFEKHHHHHHHHTSGSGEGRGSLLTCGDVEENPGPHMTEYKPTVRLATRDDVPRAVRTLAAAFADYPATRHTVDPDRHIERVTELQELFLTRVGLDIGKVWVADDGAAVAVWTTPESVEAGAVFAEIGPRMAELSGSRLAAQQQMEGLLAPHRPKEPAWFLATVGVSPDHQGKGLGSAVVLPGVEAAERAGVPAFLETSAPRNLPFYERLGFTVTADVEVPEGPRTWCMTRKPGA

SEQ ID NO: 2760 - protein, 567 aa, synthetic construct
MALPVTALLLPLALLLHAARPDIQMTQSPSSLSASVGDRVTITCKASDHINNWLAWYQQKPGQAPKLLIYGATTLETGVPSRFSGSGSGTDYTLTISSLQPEDFATYYCQQSWNTPWTFGQGTKLEIKRGGGGSGGGGSGGGGSQVQLQQPGAELVKPGASVKMSCKASGYAFNSYWINWMKQKPGQGLEWIGQIYPGDGDTNYNGKFKGRATLTADTSSSTAYMQLSSLTSEDSAVYFCARSITTVVGCAMDYWGQGTSVTVSSTRAFSEDRYRNLEGGSWSHPQFEKDYKDDDDKGSDYKDDDDKGSDYKDDDDKGSDYKDDDDKAWSHPQFEKHHHHHHHHTSGSGEGRGSLLTCGDVEENPGPHMTEYKPTVRLATRDDVPRAVRTLAAAFADYPATRHTVDPDRHIERVTELQELFLTRVGLDIGKVWVADDGAAVAVWTTPESVEAGAVFAEIGPRMAELSGSRLAAQQQMEGLLAPHRPKEPAWFLATVGVSPDHQGKGLGSAVVLPGVEAAERAGVPAFLETSAPRNLPFYERLGFTVTADVEVPEGPRTWCMTRKPGA

SEQ ID NO: 2761 - protein, 567 aa, synthetic construct; identical to SEQ ID NO: 2683

SEQ ID NO: 2762 - protein, 565 aa, synthetic construct
MALPVTALLLPLALLLHAARPDIQMTQSPSSLSASVGDRVTITCKASDHINNWLAWYQQKPGQAPKLLIYGATTLETGVPSRFSGSGSGTDYTLTISSLQPEDFATYYCQQSWNTPWTFGQGTKLEIKRGGGGSGGGGSGGGGSQVQLQQPGAELVKPGASVKMSCKASGYAFNSYWINWMKQKPGQGLEWIGQIYPGDGDTNYNGKFKGRATLTADTSSSTAYMQLSSLTSEDSAVYFCARSITTVVGCAMDYWGQGTSVTVSSTRSEDRYRNLEGGSWSHPQFEKDYKDDDDKGSDYKDDDDKGSDYKDDDDKGSDYKDDDDKAWSHPQFEKHHHHHHHHTSGSGEGRGSLLTCGDVEENPGPHMTEYKPTVRLATRDDVPRAVRTLAAAFADYPATRHTVDPDRHIERVTELQELFLTRVGLDIGKVWVADDGAAVAVWTTPESVEAGAVFAEIGPRMAELSGSRLAAQQQMEGLLAPHRPKEPAWFLATVGVSPDHQGKGLGSAVVLPGVEAAERAGVPAFLETSAPRNLPFYERLGFTVTADVEVPEGPRTWCMTRKPGA

SEQ ID NO: 2763 - protein, 566 aa, synthetic construct
MALPVTALLLPLALLLHAARPDIQMTQSPSSLSASVGDRVTITCKASDHINNWLAWYQQKPGQAPKLLIYGATTLETGVPSRFSGSGSGTDYTLTISSLQPEDFATYYCQQSWNTPWTFGQGTKLEIKRGGGGSGGGGSGGGGSQVQLQQPGAELVKPGASVKMSCKASGYAFNSYWINWMKQKPGQGLEWIGQIYPGDGDTNYNGKFKGRATLTADTSSSTAYMQLSSLTSEDSAVYFCARSITTVVGCAMDYWGQGTSVTVSSTRRSRDRYRNLEGGSWSHPQFEKDYKDDDDKGSDYKDDDDKGSDYKDDDDKGSDYKDDDDKAWSHPQFEKHHHHHHHHTSGSGEGRGSLLTCGDVEENPGPHMTEYKPTVRLATRDDVPRAVRTLAAAFADYPATRHTVDPDRHIERVTELQELFLTRVGLDIGKVWVADDGAAVAVWTTPESVEAGAVFAEIGPRMAELSGSRLAAQQQMEGLLAPHRPKEPAWFLATVGVSPDHQGKGLGSAVVLPGVEAAERAGVPAFLETSAPRNLPFYERLGFTVTADVEVPEGPRTWCMTRKPGA

SEQ ID NO: 2764 - protein, 566 aa, synthetic construct
MALPVTALLLPLALLLHAARPDIQMTQSPSSLSASVGDRVTITCKASDHINNWLAWYQQKPGQAPKLLIYGATTLETGVPSRFSGSGSGTDYTLTISSLQPEDFATYYCQQSWNTPWTFGQGTKLEIKRGGGGSGGGGSGGGGSQVQLQQPGAELVKPGASVKMSCKASGYAFNSYWINWMKQKPGQGLEWIGQIYPGDGDTNYNGKFKGRATLTADTSSSTAYMQLSSLTSEDSAVYFCARSITTVVGCAMDYWGQGTSVTVSSTRRSKDRYRNLEGGSWSHPQFEKDYKDDDDKGSDYKDDDDKGSDYKDDDDKGSDYKDDDDKAWSHPQFEKHHHHHHHHTSGSGEGRGSLLTCGDVEENPGPHMTEYKPTVRLATRDDVPRAVRTLAAAFADYPATRHTVDPDRHIERVTELQELFLTRVGLDIGKVWVADDGAAVAVWTTPESVEAGAVFAEIGPRMAELSGSRLAAQQQMEGLLAPHRPKEPAWFLATVGVSPDHQGKGLGSAVVLPGVEAAERAGVPAFLETSAPRNLPFYERLGFTVTADVEVPEGPRTWCMTRKPGA

SEQ ID NO: 2765 - protein, 566 aa, synthetic construct; identical to SEQ ID NO: 2763

SEQ ID NO: 2766 - protein, 566 aa, synthetic construct
MALPVTALLLPLALLLHAARPDIQMTQSPSSLSASVGDRVTITCKASDHINNWLAWYQQKPGQAPKLLIYGATTLETGVPSRFSGSGSGTDYTLTISSLQPEDFATYYCQQSWNTPWTFGQGTKLEIKRGGGGSGGGGSGGGGSQVQLQQPGAELVKPGASVKMSCKASGYAFNSYWINWMKQKPGQGLEWIGQIYPGDGDTNYNGKFKGRATLTADTSSSTAYMQLSSLTSEDSAVYFCARSITTVVGCAMDYWGQGTSVTVSSTRRSLDRYRNLEGGSWSHPQFEKDYKDDDDKGSDYKDDDDKGSDYKDDDDKGSDYKDDDDKAWSHPQFEKHHHHHHHHTSGSGEGRGSLLTCGDVEENPGPHMTEYKPTVRLATRDDVPRAVRTLAAAFADYPATRHTVDPDRHIERVTELQELFLTRVGLDIGKVWVADDGAAVAVWTTPESVEAGAVFAEIGPRMAELSGSRLAAQQQMEGLLAPHRPKEPAWFLATVGVSPDHQGKGLGSAVVLPGVEAAERAGVPAFLETSAPRNLPFYERLGFTVTADVEVPEGPRTWCMTRKPGA

SEQ ID NO: 2767 - protein, 566 aa, synthetic construct
MALPVTALLLPLALLLHAARPDIQMTQSPSSLSASVGDRVTITCKASDHINNWLAWYQQKPGQAPKLLIYGATTLETGVPSRFSGSGSGTDYTLTISSLQPEDFATYYCQQSWNTPWTFGQGTKLEIKRGGGGSGGGGSGGGGSQVQLQQPGAELVKPGASVKMSCKASGYAFNSYWINWMKQKPGQGLEWIGQIYPGDGDTNYNGKFKGRATLTADTSSSTAYMQLSSLTSEDSAVYFCARSITTVVGCAMDYWGQGTSVTVSSTRRSADRYRNLEGGSWSHPQFEKDYKDDDDKGSDYKDDDDKGSDYKDDDDKGSDYKDDDDKAWSHPQFEKHHHHHHHHTSGSGEGRGSLLTCGDVEENPGPHMTEYKPTVRLATRDDVPRAVRTLAAAFADYPATRHTVDPDRHIERVTELQELFLTRVGLDIGKVWVADDGAAVAVWTTPESVEAGAVFAEIGPRMAELSGSRLAAQQQMEGLLAPHRPKEPAWFLATVGVSPDHQGKGLGSAVVLPGVEAAERAGVPAFLETSAPRNLPFYERLGFTVTADVEVPEGPRTWCMTRKPGA

SEQ ID NO: 2768 - protein, 566 aa, synthetic construct; identical to SEQ ID NO: 2766

SEQ ID NO: 2769 - protein, 566 aa, synthetic construct
MALPVTALLLPLALLLHAARPDIQMTQSPSSLSASVGDRVTITCKASDHINNWLAWYQQKPGQAPKLLIYGATTLETGVPSRFSGSGSGTDYTLTISSLQPEDFATYYCQQSWNTPWTFGQGTKLEIKRGGGGSGGGGSGGGGSQVQLQQPGAELVKPGASVKMSCKASGYAFNSYWINWMKQKPGQGLEWIGQIYPGDGDTNYNGKFKGRATLTADTSSSTAYMQLSSLTSEDSAVYFCARSITTVVGCAMDYWGQGTSVTVSSTRRSWDRYRNLEGGSWSHPQFEKDYKDDDDKGSDYKDDDDKGSDYKDDDDKGSDYKDDDDKAWSHPQFEKHHHHHHHHTSGSGEGRGSLLTCGDVEENPGPHMTEYKPTVRLATRDDVPRAVRTLAAAFADYPATRHTVDPDRHIERVTELQELFLTRVGLDIGKVWVADDGAAVAVWTTPESVEAGAVFAEIGPRMAELSGSRLAAQQQMEGLLAPHRPKEPAWFLATVGVSPDHQGKGLGSAVVLPGVEAAERAGVPAFLETSAPRNLPFYERLGFTVTADVEVPEGPRTWCMTRKPGA

SEQ ID NO: 2770 - protein, 566 aa, synthetic construct
MALPVTALLLPLALLLHAARPDIQMTQSPSSLSASVGDRVTITCKASDHINNWLAWYQQKPGQAPKLLIYGATTLETGVPSRFSGSGSGTDYTLTISSLQPEDFATYYCQQSWNTPWTFGQGTKLEIKRGGGGSGGGGSGGGGSQVQLQQPGAELVKPGASVKMSCKASGYAFNSYWINWMKQKPGQGLEWIGQIYPGDGDTNYNGKFKGRATLTADTSSSTAYMQLSSLTSEDSAVYFCARSITTVVGCAMDYWGQGTSVTVSSTRRSERRYRNLEGGSWSHPQFEKDYKDDDDKGSDYKDDDDKGSDYKDDDDKGSDYKDDDDKAWSHPQFEKHHHHHHHHTSGSGEGRGSLLTCGDVEENPGPHMTEYKPTVRLATRDDVPRAVRTLAAAFADYPATRHTVDPDRHIERVTELQELFLTRVGLDIGKVWVADDGAAVAVWTTPESVEAGAVFAEIGPRMAELSGSRLAAQQQMEGLLAPHRPKEPAWFLATVGVSPDHQGKGLGSAVVLPGVEAAERAGVPAFLETSAPRNLPFYERLGFTVTADVEVPEGPRTWCMTRKPGA

SEQ ID NO: 2771 - protein, 566 aa, synthetic construct
MALPVTALLLPLALLLHAARPDIQMTQSPSSLSASVGDRVTITCKASDHINNWLAWYQQKPGQAPKLLIYGATTLETGVPSRFSGSGSGTDYTLTISSLQPEDFATYYCQQSWNTPWTFGQGTKLEIKRGGGGSGGGGSGGGGSQVQLQQPGAELVKPGASVKMSCKASGYAFNSYWINWMKQKPGQGLEWIGQIYPGDGDTNYNGKFKGRATLTADTSSSTAYMQLSSLTSEDSAVYFCARSITTVVGCAMDYWGQGTSVTVSSTRRSEVRYRNLEGGSWSHPQFEKDYKDDDDKGSDYKDDDDKGSDYKDDDDKGSDYKDDDDKAWSHPQFEKHHHHHHHHTSGSGEGRGSLLTCGDVEENPGPHMTEYKPTVRLATRDDVPRAVRTLAAAFADYPATRHTVDPDRHIERVTELQELFLTRVGLDIGKVWVADDGAAVAVWTTPESVEAGAVFAEIGPRMAELSGSRLAAQQQMEGLLAPHRPKEPAWFLATVGVSPDHQGKGLGSAVVLPGVEAAERAGVPAFLETSAPRNLPFYERLGFTVTADVEVPEGPRTWCMTRKPGA

SEQ ID NO: 2772 - protein, 566 aa, synthetic construct; identical to SEQ ID NO: 2771

SEQ ID NO: 2773 - protein, 566 aa, synthetic construct
MALPVTALLLPLALLLHAARPDIQMTQSPSSLSASVGDRVTITCKASDHINNWLAWYQQKPGQAPKLLIYGATTLETGVPSRFSGSGSGTDYTLTISSLQPEDFATYYCQQSWNTPWTFGQGTKLEIKRGGGGSGGGGSGGGGSQVQLQQPGAELVKPGASVKMSCKASGYAFNSYWINWMKQKPGQGLEWIGQIYPGDGDTNYNGKFKGRATLTADTSSSTAYMQLSSLTSEDSAVYFCARSITTVVGCAMDYWGQGTSVTVSSTRRSENRYRNLEGGSWSHPQFEKDYKDDDDKGSDYKDDDDKGSDYKDDDDKGSDYKDDDDKAWSHPQFEKHHHHHHHHTSGSGEGRGSLLTCGDVEENPGPHMTEYKPTVRLATRDDVPRAVRTLAAAFADYPATRHTVDPDRHIERVTELQELFLTRVGLDIGKVWVADDGAAVAVWTTPESVEAGAVFAEIGPRMAELSGSRLAAQQQMEGLLAPHRPKEPAWFLATVGVSPDHQGKGLGSAVVLPGVEAAERAGVPAFLETSAPRNLPFYERLGFTVTADVEVPEGPRTWCMTRKPGA

SEQ ID NO: 2774 - protein, 566 aa, synthetic construct
MALPVTALLLPLALLLHAARPDIQMTQSPSSLSASVGDRVTITCKASDHINNWLAWYQQKPGQAPKLLIYGATTLETGVPSRFSGSGSGTDYTLTISSLQPEDFATYYCQQSWNTPWTFGQGTKLEIKRGGGGSGGGGSGGGGSQVQLQQPGAELVKPGASVKMSCKASGYAFNSYWINWMKQKPGQGLEWIGQIYPGDGDTNYNGKFKGRATLTADTSSSTAYMQLSSLTSEDSAVYFCARSITTVVGCAMDYWGQGTSVTVSSTRRSEGRYRNLEGGSWSHPQFEKDYKDDDDKGSDYKDDDDKGSDYKDDDDKGSDYKDDDDKAWSHPQFEKHHHHHHHHTSGSGEGRGSLLTCGDVEENPGPHMTEYKPTVRLATRDDVPRAVRTLAAAFADYPATRHTVDPDRHIERVTELQELFLTRVGLDIGKVWVADDGAAVAVWTTPESVEAGAVFAEIGPRMAELSGSRLAAQQQMEGLLAPHRPKEPAWFLATVGVSPDHQGKGLGSAVVLPGVEAAERAGVPAFLETSAPRNLPFYERLGFTVTADVEVPEGPRTWCMTRKPGA

SEQ ID NO: 2775 - protein, 566 aa, synthetic construct
MALPVTALLLPLALLLHAARPDIQMTQSPSSLSASVGDRVTITCKASDHINNWLAWYQQKPGQAPKLLIYGATTLETGVPSRFSGSGSGTDYTLTISSLQPEDFATYYCQQSWNTPWTFGQGTKLEIKRGGGGSGGGGSGGGGSQVQLQQPGAELVKPGASVKMSCKASGYAFNSYWINWMKQKPGQGLEWIGQIYPGDGDTNYNGKFKGRATLTADTSSSTAYMQLSSLTSEDSAVYFCARSITTVVGCAMDYWGQGTSVTVSSTRRSECRYRNLEGGSWSHPQFEKDYKDDDDKGSDYKDDDDKGSDYKDDDDKGSDYKDDDDKAWSHPQFEKHHHHHHHHTSGSGEGRGSLLTCGDVEENPGPHMTEYKPTVRLATRDDVPRAVRTLAAAFADYPATRHTVDPDRHIERVTELQELFLTRVGLDIGKVWVADDGAAVAVWTTPESVEAGAVFAEIGPRMAELSGSRLAAQQQMEGLLAPHRPKEPAWFLATVGVSPDHQGKGLGSAVVLPGVEAAERAGVPAFLETSAPRNLPFYERLGFTVTADVEVPEGPRTWCMTRKPGA

SEQ ID NO: 2776 - protein, 565 aa, synthetic construct
MALPVTALLLPLALLLHAARPDIQMTQSPSSLSASVGDRVTITCKASDHINNWLAWYQQKPGQAPKLLIYGATTLETGVPSRFSGSGSGTDYTLTISSLQPEDFATYYCQQSWNTPWTFGQGTKLEIKRGGGGSGGGGSGGGGSQVQLQQPGAELVKPGASVKMSCKASGYAFNSYWINWMKQKPGQGLEWIGQIYPGDGDTNYNGKFKGRATLTADTSSSTAYMQLSSLTSEDSAVYFCARSITTVVGCAMDYWGQGTSVTVSSTRREEDRYRLEGGSWSHPQFEKDYKDDDDKGSDYKDDDDKGSDYKDDDDKGSDYKDDDDKAWSHPQFEKHHHHHHHHTSGSGEGRGSLLTCGDVEENPGPHMTEYKPTVRLATRDDVPRAVRTLAAAFADYPATRHTVDPDRHIERVTELQELFLTRVGLDIGKVWVADDGAAVAVWTTPESVEAGAVFAEIGPRMAELSGSRLAAQQQMEGLLAPHRPKEPAWFLATVGVSPDHQGKGLGSAVVLPGVEAAERAGVPAFLETSAPRNLPFYERLGFTVTADVEVPEGPRTWCMTRKPGA

SEQ ID NO: 2777 - protein, 565 aa, synthetic construct
MALPVTALLLPLALLLHAARPDIQMTQSPSSLSASVGDRVTITCKASDHINNWLAWYQQKPGQAPKLLIYGATTLETGVPSRFSGSGSGTDYTLTISSLQPEDFATYYCQQSWNTPWTFGQGTKLEIKRGGGGSGGGGSGGGGSQVQLQQPGAELVKPGASVKMSCKASGYAFNSYWINWMKQKPGQGLEWIGQIYPGDGDTNYNGKFKGRATLTADTSSSTAYMQLSSLTSEDSAVYFCARSITTVVGCAMDYWGQGTSVTVSSTRRVEDRYRLEGGSWSHPQFEKDYKDDDDKGSDYKDDDDKGSDYKDDDDKGSDYKDDDDKAWSHPQFEKHHHHHHHHTSGSGEGRGSLLTCGDVEENPGPHMTEYKPTVRLATRDDVPRAVRTLAAAFADYPATRHTVDPDRHIERVTELQELFLTRVGLDIGKVWVADDGAAVAVWTTPESVEAGAVFAEIGPRMAELSGSRLAAQQQMEGLLAPHRPKEPAWFLATVGVSPDHQGKGLGSAVVLPGVEAAERAGVPAFLETSAPRNLPFYERLGFTVTADVEVPEGPRTWCMTRKPGA

SEQ ID NO: 2778 - protein, 565 aa, synthetic construct
MALPVTALLLPLALLLHAARPDIQMTQSPSSLSASVGDRVTITCKASDHINNWLAWYQQKPGQAPKLLIYGATTLETGVPSRFSGSGSGTDYTLTISSLQPEDFATYYCQQSWNTPWTFGQGTKLEIKRGGGGSGGGGSGGGGSQVQLQQPGAELVKPGASVKMSCKASGYAFNSYWINWMKQKPGQGLEWIGQIYPGDGDTNYNGKFKGRATLTADTSSSTAYMQLSSLTSEDSAVYFCARSITTVVGCAMDYWGQGTSVTVSSTRRTEDRYRLEGGSWSHPQFEKDYKDDDDKGSDYKDDDDKGSDYKDDDDKGSDYKDDDDKAWSHPQFEKHHHHHHHHTSGSGEGRGSLLTCGDVEENPGPHMTEYKPTVRLATRDDVPRAVRTLAAAFADYPATRHTVDPDRHIERVTELQELFLTRVGLDIGKVWVADDGAAVAVWTTPESVEAGAVFAEIGPRMAELSGSRLAAQQQMEGLLAPHRPKEPAWFLATVGVSPDHQGKGLGSAVVLPGVEAAERAGVPAFLETSAPRNLPFYERLGFTVTADVEVPEGPRTWCMTRKPGA

SEQ ID NO: 2779 - protein, 565 aa, synthetic construct
MALPVTALLLPLALLLHAARPDIQMTQSPSSLSASVGDRVTITCKASDHINNWLAWYQQKPGQAPKLLIYGATTLETGVPSRFSGSGSGTDYTLTISSLQPEDFATYYCQQSWNTPWTFGQGTKLEIKRGGGGSGGGGSGGGGSQVQLQQPGAELVKPGASVKMSCKASGYAFNSYWINWMKQKPGQGLEWIGQIYPGDGDTNYNGKFKGRATLTADTSSSTAYMQLSSLTSEDSAVYFCARSITTVVGCAMDYWGQGTSVTVSSTRRPEDRYRLEGGSWSHPQFEKDYKDDDDKGSDYKDDDDKGSDYKDDDDKGSDYKDDDDKAWSHPQFEKHHHHHHHHTSGSGEGRGSLLTCGDVEENPGPHMTEYKPTVRLATRDDVPRAVRTLAAAFADYPATRHTVDPDRHIERVTELQELFLTRVGLDIGKVWVADDGAAVAVWTTPESVEAGAVFAEIGPRMAELSGSRLAAQQQMEGLLAPHRPKEPAWFLATVGVSPDHQGKGLGSAVVLPGVEAAERAGVPAFLETSAPRNLPFYERLGFTVTADVEVPEGPRTWCMTRKPGA

SEQ ID NO: 2780 - protein, 565 aa, synthetic construct; identical to SEQ ID NO: 2746

SEQ ID NO: 2781 - protein, 268 aa, synthetic construct
MALPVTALLLPLALLLHAARPDIQMTQSPSSLSASVGDRVTITCKASDHINNWLAWYQQKPGQAPKLLIYGATTLETGVPSRFSGSGSGTDYTLTISSLQPEDFATYYCQQSWNTPWTFGQGTKLEIKRGGGGSGGGGSGGGGSQVQLQQPGAELVKPGASVKMSCKASGYAFNSYWINWMKQKPGQGLEWIGQIYPGDGDTNYNGKFKGRATLTADTSSSTAYMQLSSLTSEDSAVYFCARSITTVVGCAMDYWGQGTSVTVSSTRR

SEQ ID NO: 2782 - protein, 565 aa, synthetic construct
MALPVTALLLPLALLLHAARPDIQMTQSPSSLSASVGDRVTITCKASDHINNWLAWYQQKPGQAPKLLIYGATTLETGVPSRFSGSGSGTDYTLTISSLQPEDFATYYCQQSWNTPWTFGQGTKLEIKRGGGGSGGGGSGGGGSQVQLQQPGAELVKPGASVKMSCKASGYAFNSYWINWMKQKPGQGLEWIGQIYPGDGDTNYNGKFKGRATLTADTSSSTAYMQLSSLTSEDSAVYFCARSITTVVGCAMDYWGQGTSVTVSSTRRSADRYRLEGGSWSHPQFEKDYKDDDDKGSDYKDDDDKGSDYKDDDDKGSDYKDDDDKAWSHPQFEKHHHHHHHHTSGSGEGRGSLLTCGDVEENPGPHMTEYKPTVRLATRDDVPRAVRTLAAAFADYPATRHTVDPDRHIERVTELQELFLTRVGLDIGKVWVADDGAAVAVWTTPESVEAGAVFAEIGPRMAELSGSRLAAQQQMEGLLAPHRPKEPAWFLATVGVSPDHQGKGLGSAVVLPGVEAAERAGVPAFLETSAPRNLPFYERLGFTVTADVEVPEGPRTWCMTRKPGA

SEQ ID NO: 2783 - protein, 565 aa, synthetic construct
MALPVTALLLPLALLLHAARPDIQMTQSPSSLSASVGDRVTITCKASDHINNWLAWYQQKPGQAPKLLIYGATTLETGVPSRFSGSGSGTDYTLTISSLQPEDFATYYCQQSWNTPWTFGQGTKLEIKRGGGGSGGGGSGGGGSQVQLQQPGAELVKPGASVKMSCKASGYAFNSYWINWMKQKPGQGLEWIGQIYPGDGDTNYNGKFKGRATLTADTSSSTAYMQLSSLTSEDSAVYFCARSITTVVGCAMDYWGQGTSVTVSSTRRSFDRYRLEGGSWSHPQFEKDYKDDDDKGSDYKDDDDKGSDYKDDDDKGSDYKDDDDKAWSHPQFEKHHHHHHHHTSGSGEGRGSLLTCGDVEENPGPHMTEYKPTVRLATRDDVPRAVRTLAAAFADYPATRHTVDPDRHIERVTELQELFLTRVGLDIGKVWVADDGAAVAVWTTPESVEAGAVFAEIGPRMAELSGSRLAAQQQMEGLLAPHRPKEPAWFLATVGVSPDHQGKGLGSAVVLPGVEAAERAGVPAFLETSAPRNLPFYERLGFTVTADVEVPEGPRTWCMTRKPGA

SEQ ID NO: 2784 - protein, 565 aa, synthetic construct
MALPVTALLLPLALLLHAARPDIQMTQSPSSLSASVGDRVTITCKASDHINNWLAWYQQKPGQAPKLLIYGATTLETGVPSRFSGSGSGTDYTLTISSLQPEDFATYYCQQSWNTPWTFGQGTKLEIKRGGGGSGGGGSGGGGSQVQLQQPGAELVKPGASVKMSCKASGYAFNSYWINWMKQKPGQGLEWIGQIYPGDGDTNYNGKFKGRATLTADTSSSTAYMQLSSLTSEDSAVYFCARSITTVVGCAMDYWGQGTSVTVSSTRRSLDRYRLEGGSWSHPQFEKDYKDDDDKGSDYKDDDDKGSDYKDDDDKGSDYKDDDDKAWSHPQFEKHHHHHHHHTSGSGEGRGSLLTCGDVEENPGPHMTEYKPTVRLATRDDVPRAVRTLAAAFADYPATRHTVDPDRHIERVTELQELFLTRVGLDIGKVWVADDGAAVAVWTTPESVEAGAVFAEIGPRMAELSGSRLAAQQQMEGLLAPHRPKEPAWFLATVGVSPDHQGKGLGSAVVLPGVEAAERAGVPAFLETSAPRNLPFYERLGFTVTADVEVPEGPRTWCMTRKPGA

SEQ ID NO: 2785 - protein, 642 aa, synthetic construct
MALPVTALLLPLALLLHAARPDIQMTQSPSSLSASVGDRVTITCKASDHINNWLAWYQQKPGQAPKLLIYGATTLETGVPSRFSGSGSGTDYTLTISSLQPEDFATYYCQQSWNTPWTFGQGTKLEIKRGGGGSGGGGSGGGGSQVQLQQPGAELVKPGASVKMSCKASGYAFNSYWINWMKQKPGQGLEWIGQIYPGDGDTNYNGKFKGRATLTADTSSSTAYMQLSSLTSEDSAVYFCARSITTVVGCAMDYWGQGTSVTVSSTRRSVDRYRLEGGSWSHPQFEKDYKDDDDKGSDYKDDDDKGSDYKDDDDKGSDYKDDDDKAWSHPQFEKHHHHHHHHTRRSKDRYRLEGGSWSHPQFEKDYKDDDDKGSDYKDDDDKGSDYKDDDDKGSDYKDDDDKAWSHPQFEKHHHHHHHHTSGSGEGRGSLLTCGDVEENPGPHMTEYKPTVRLATRDDVPRAVRTLAAAFADYPATRHTVDPDRHIERVTELQELFLTRVGLDIGKVWVADDGAAVAVWTTPESVEAGAVFAEIGPRMAELSGSRLAAQQQMEGLLAPHRPKEPAWFLATVGVSPDHQGKGLGSAVVLPGVEAAERAGVPAFLETSAPRNLPFYERLGFTVTADVEVPEGPRTWCMTRKPGA

SEQ ID NO: 2786 - protein, 565 aa, synthetic construct
MALPVTALLLPLALLLHAARPDIQMTQSPSSLSASVGDRVTITCKASDHINNWLAWYQQKPGQAPKLLIYGATTLETGVPSRFSGSGSGTDYTLTISSLQPEDFATYYCQQSWNTPWTFGQGTKLEIKRGGGGSGGGGSGGGGSQVQLQQPGAELVKPGASVKMSCKASGYAFNSYWINWMKQKPGQGLEWIGQIYPGDGDTNYNGKFKGRATLTADTSSSTAYMQLSSLTSEDSAVYFCARSITTVVGCAMDYWGQGTSVTVSSTRRSPDRYRLEGGSWSHPQFEKDYKDDDDKGSDYKDDDDKGSDYKDDDDKGSDYKDDDDKAWSHPQFEKHHHHHHHHTSGSGEGRGSLLTCGDVEENPGPHMTEYKPTVRLATRDDVPRAVRTLAAAFADYPATRHTVDPDRHIERVTELQELFLTRVGLDIGKVWVADDGAAVAVWTTPESVEAGAVFAEIGPRMAELSGSRLAAQQQMEGLLAPHRPKEPAWFLATVGVSPDHQGKGLGSAVVLPGVEAAERAGVPAFLETSAPRNLPFYERLGFTVTADVEVPEGPRTWCMTRKPGA

SEQ ID NO: 2787 - protein, 565 aa, synthetic construct
MALPVTALLLPLALLLHAARPDIQMTQSPSSLSASVGDRVTITCKASDHINNWLAWYQQKPGQAPKLLIYGATTLETGVPSRFSGSGSGTDYTLTISSLQPEDFATYYCQQSWNTPWTFGQGTKLEIKRGGGGSGGGGSGGGGSQVQLQQPGAELVKPGASVKMSCKASGYAFNSYWINWMKQKPGQGLEWIGQIYPGDGDTNYNGKFKGRATLTADTSSSTAYMQLSSLTSEDSAVYFCARSITTVVGCAMDYWGQGTSVTVSSTRRSEKRYRLEGGSWSHPQFEKDYKDDDDKGSDYKDDDDKGSDYKDDDDKGSDYKDDDDKAWSHPQFEKHHHHHHHHTSGSGEGRGSLLTCGDVEENPGPHMTEYKPTVRLATRDDVPRAVRTLAAAFADYPATRHTVDPDRHIERVTELQELFLTRVGLDIGKVWVADDGAAVAVWTTPESVEAGAVFAEIGPRMAELSGSRLAAQQQMEGLLAPHRPKEPAWFLATVGVSPDHQGKGLGSAVVLPGVEAAERAGVPAFLETSAPRNLPFYERLGFTVTADVEVPEGPRTWCMTRKPGA

SEQ ID NO: 2788 - protein, 565 aa, synthetic construct
MALPVTALLLPLALLLHAARPDIQMTQSPSSLSASVGDRVTITCKASDHINNWLAWYQQKPGQAPKLLIYGATTLETGVPSRFSGSGSGTDYTLTISSLQPEDFATYYCQQSWNTPWTFGQGTKLEIKRGGGGSGGGGSGGGGSQVQLQQPGAELVKPGASVKMSCKASGYAFNSYWINWMKQKPGQGLEWIGQIYPGDGDTNYNGKFKGRATLTADTSSSTAYMQLSSLTSEDSAVYFCARSITTVVGCAMDYWGQGTSVTVSSTRRSEGRYRLEGGSWSHPQFEKDYKDDDDKGSDYKDDDDKGSDYKDDDDKGSDYKDDDDKAWSHPQFEKHHHHHHHHTSGSGEGRGSLLTCGDVEENPGPHMTEYKPTVRLATRDDVPRAVRTLAAAFADYPATRHTVDPDRHIERVTELQELFLTRVGLDIGKVWVADDGAAVAVWTTPESVEAGAVFAEIGPRMAELSGSRLAAQQQMEGLLAPHRPKEPAWFLATVGVSPDHQGKGLGSAVVLPGVEAAERAGVPAFLETSAPRNLPFYERLGFTVTADVEVPEGPRTWCMTRKPGA

SEQ ID NO: 2789 - protein, 565 aa, synthetic construct
MALPVTALLLPLALLLHAARPDIQMTQSPSSLSASVGDRVTITCKASDHINNWLAWYQQKPGQAPKLLIYGATTLETGVPSRFSGSGSGTDYTLTISSLQPEDFATYYCQQSWNTPWTFGQGTKLEIKRGGGGSGGGGSGGGGSQVQLQQPGAELVKPGASVKMSCKASGYAFNSYWINWMKQKPGQGLEWIGQIYPGDGDTNYNGKFKGRATLTADTSSSTAYMQLSSLTSEDSAVYFCARSITTVVGCAMDYWGQGTSVTVSSTRRSELRYRLEGGSWSHPQFEKDYKDDDDKGSDYKDDDDKGSDYKDDDDKGSDYKDDDDKAWSHPQFEKHHHHHHHHTSGSGEGRGSLLTCGDVEENPGPHMTEYKPTVRLATRDDVPRAVRTLAAAFADYPATRHTVDPDRHIERVTELQELFLTRVGLDIGKVWVADDGAAVAVWTTPESVEAGAVFAEIGPRMAELSGSRLAAQQQMEGLLAPHRPKEPAWFLATVGVSPDHQGKGLGSAVVLPGVEAAERAGVPAFLETSAPRNLPFYERLGFTVTADVEVPEGPRTWCMTRKPGA

SEQ ID NO: 2790 - protein, 566 aa, synthetic construct
MALPVTALLLPLALLLHAARPDIQMTQSPSSLSASVGDRVTITCKASDHINNWLAWYQQKPGQAPKLLIYGATTLETGVPSRFSGSGSGTDYTLTISSLQPEDFATYYCQQSWNTPWTFGQGTKLEIKRGGGGSGGGGSGGGGSQVQLQQPGAELVKPGASVKMSCKASGYAFNSYWINWMKQKPGQGLEWIGQIYPGDGDTNYNGKFKGRATLTADTSSSTAYMQLSSLTSEDSAVYFCARSITTVVGCAMDYWGQGTSVTVSSTRRSEHRYRNLEGGSWSHPQFEKDYKDDDDKGSDYKDDDDKGSDYKDDDDKGSDYKDDDDKAWSHPQFEKHHHHHHHHTSGSGEGRGSLLTCGDVEENPGPHMTEYKPTVRLATRDDVPRAVRTLAAAFADYPATRHTVDPDRHIERVTELQELFLTRVGLDIGKVWVADDGAAVAVWTTPESVEAGAVFAEIGPRMAELSGSRLAAQQQMEGLLAPHRPKEPAWFLATVGVSPDHQGKGLGSAVVLPGVEAAERAGVPAFLETSAPRNLPFYERLGFTVTADVEVPEGPRTWCMTRKPGA

SEQ ID NO: 2791 - protein, 270 aa, synthetic construct
MALPVTALLLPLALLLHAARPDIQMTQSPSSLSASVGDRVTITCKASDHINNWLAWYQQKPGQAPKLLIYGATTLETGVPSRFSGSGSGTDYTLTISSLQPEDFATYYCQQSWNTPWTFGQGTKLEIKRGGGGSGGGGSGGGGSQVQLQQPGAELVKPGASVKMSCKASGYAFNSYWINWMKQKPGQGLEWIGQIYPGDGDTNYNGKFKGRATLTADTSSSTAYMQLSSLTSEDSAVYFCARSITTVVGCAMDYWGQGTSVTVSSTRRSE

SEQ ID NO: 2792 - protein, 565 aa, synthetic construct
MALPVTALLLPLALLLHAARPDIQMTQSPSSLSASVGDRVTITCKASDHINNWLAWYQQKPGQAPKLLIYGATTLETGVPSRFSGSGSGTDYTLTISSLQPEDFATYYCQQSWNTPWTFGQGTKLEIKRGGGGSGGGGSGGGGSQVQLQQPGAELVKPGASVKMSCKASGYAFNSYWINWMKQKPGQGLEWIGQIYPGDGDTNYNGKFKGRATLTADTSSSTAYMQLSSLTSEDSAVYFCARSITTVVGCAMDYWGQGTSVTVSSTRRSEARYRLEGGSWSHPQFEKDYKDDDDKGSDYKDDDDKGSDYKDDDDKGSDYKDDDDKAWSHPQFEKHHHHHHHHTSGSGEGRGSLLTCGDVEENPGPHMTEYKPTVRLATRDDVPRAVRTLAAAFADYPATRHTVDPDRHIERVTELQELFLTRVGLDIGKVWVADDGAAVAVWTTPESVEAGAVFAEIGPRMAELSGSRLAAQQQMEGLLAPHRPKEPAWFLATVGVSPDHQGKGLGSAVVLPGVEAAERAGVPAFLETSAPRNLPFYERLGFTVTADVEVPEGPRTWCMTRKPGA

SEQ ID NO: 2793 - protein, 565 aa, synthetic construct
MALPVTALLLPLALLLHAARPDIQMTQSPSSLSASVGDRVTITCKASDHINNWLAWYQQKPGQAPKLLIYGATTLETGVPSRFSGSGSGTDYTLTISSLQPEDFATYYCQQSWNTPWTFGQGTKLEIKRGGGGSGGGGSGGGGSQVQLQQPGAELVKPGASVKMSCKASGYAFNSYWINWMKQKPGQGLEWIGQIYPGDGDTNYNGKFKGRATLTADTSSSTAYMQLSSLTSEDSAVYFCARSITTVVGCAMDYWGQGTSVTVSSTRRSEWRYRLEGGSWSHPQFEKDYKDDDDKGSDYKDDDDKGSDYKDDDDKGSDYKDDDDKAWSHPQFEKHHHHHHHHTSGSGEGRGSLLTCGDVEENPGPHMTEYKPTVRLATRDDVPRAVRTLAAAFADYPATRHTVDPDRHIERVTELQELFLTRVGLDIGKVWVADDGAAVAVWTTPESVEAGAVFAEIGPRMAELSGSRLAAQQQMEGLLAPHRPKEPAWFLATVGVSPDHQGKGLGSAVVLPGVEAAERAGVPAFLETSAPRNLPFYERLGFTVTADVEVPEGPRTWCMTRKPGA

SEQ ID NO: 2794 - protein, 565 aa, synthetic construct
MALPVTALLLPLALLLHAARPDIQMTQSPSSLSASVGDRVTITCKASDHINNWLAWYQQKPGQAPKLLIYGATTLETGVPSRFSGSGSGTDYTLTISSLQPEDFATYYCQQSWNTPWTFGQGTKLEIKRGGGGSGGGGSGGGGSQVQLQQPGAELVKPGASVKMSCKASGYAFNSYWINWMKQKPGQGLEWIGQIYPGDGDTNYNGKFKGRATLTADTSSSTAYMQLSSLTSEDSAVYFCARSITTVVGCAMDYWGQGTSVTVSSTRRSERRYRLEGGSWSHPQFEKDYKDDDDKGSDYKDDDDKGSDYKDDDDKGSDYKDDDDKAWSHPQFEKHHHHHHHHTSGSGEGRGSLLTCGDVEENPGPHMTEYKPTVRLATRDDVPRAVRTLAAAFADYPATRHTVDPDRHIERVTELQELFLTRVGLDIGKVWVADDGAAVAVWTTPESVEAGAVFAEIGPRMAELSGSRLAAQQQMEGLLAPHRPKEPAWFLATVGVSPDHQGKGLGSAVVLPGVEAAERAGVPAFLETSAPRNLPFYERLGFTVTADVEVPEGPRTWCMTRKPGA

SEQ ID NO: 2795 - protein, 566 aa, synthetic construct
MALPVTALLLPLALLLHAARPDIQMTQSPSSLSASVGDRVTITCKASDHINNWLAWYQQKPGQAPKLLIYGATTLETGVPSRFSGSGSGTDYTLTISSLQPEDFATYYCQQSWNTPWTFGQGTKLEIKRGGGGSGGGGSGGGGSQVQLQQPGAELVKPGASVKMSCKASGYAFNSYWINWMKQKPGQGLEWIGQIYPGDGDTNYNGKFKGRATLTADTSSSTAYMQLSSLTSEDSAVYFCARSITTVVGCAMDYWGQGTSVTVSSTRRSELRYRNLEGGSWSHPQFEKDYKDDDDKGSDYKDDDDKGSDYKDDDDKGSDYKDDDDKAWSHPQFEKHHHHHHHHTSGSGEGRGSLLTCGDVEENPGPHMTEYKPTVRLATRDDVPRAVRTLAAAFADYPATRHTVDPDRHIERVTELQELFLTRVGLDIGKVWVADDGAAVAVWTTPESVEAGAVFAEIGPRMAELSGSRLAAQQQMEGLLAPHRPKEPAWFLATVGVSPDHQGKGLGSAVVLPGVEAAERAGVPAFLETSAPRNLPFYERLGFTVTADVEVPEGPRTWCMTRKPGA

SEQ ID NO: 2796 - protein, 566 aa, synthetic construct
MALPVTALLLPLALLLHAARPDIQMTQSPSSLSASVGDRVTITCKASDHINNWLAWYQQKPGQAPKLLIYGATTLETGVPSRFSGSGSGTDYTLTISSLQPEDFATYYCQQSWNTPWTFGQGTKLEIKRGGGGSGGGGSGGGGSQVQLQQPGAELVKPGASVKMSCKASGYAFNSYWINWMKQKPGQGLEWIGQIYPGDGDTNYNGKFKGRATLTADTSSSTAYMQLSSLTSEDSAVYFCARSITTVVGCAMDYWGQGTSVTVSSTRRLEDRYRNLEGGSWSHPQFEKDYKDDDDKGSDYKDDDDKGSDYKDDDDKGSDYKDDDDKAWSHPQFEKHHHHHHHHTSGSGEGRGSLLTCGDVEENPGPHMTEYKPTVRLATRDDVPRAVRTLAAAFADYPATRHTVDPDRHIERVTELQELFLTRVGLDIGKVWVADDGAAVAVWTTPESVEAGAVFAEIGPRMAELSGSRLAAQQQMEGLLAPHRPKEPAWFLATVGVSPDHQGKGLGSAVVLPGVEAAERAGVPAFLETSAPRNLPFYERLGFTVTADVEVPEGPRTWCMTRKPGA

SEQ ID NO: 2797 - protein, 566 aa, synthetic construct
MALPVTALLLPLALLLHAARPDIQMTQSPSSLSASVGDRVTITCKASDHINNWLAWYQQKPGQAPKLLIYGATTLETGVPSRFSGSGSGTDYTLTISSLQPEDFATYYCQQSWNTPWTFGQGTKLEIKRGGGGSGGGGSGGGGSQVQLQQPGAELVKPGASVKMSCKASGYAFNSYWINWMKQKPGQGLEWIGQIYPGDGDTNYNGKFKGRATLTADTSSSTAYMQLSSLTSEDSAVYFCARSITTVVGCAMDYWGQGTSVTVSSTRRGEDRYRNLEGGSWSHPQFEKDYKDDDDKGSDYKDDDDKGSDYKDDDDKGSDYKDDDDKAWSHPQFEKHHHHHHHHTSGSGEGRGSLLTCGDVEENPGPHMTEYKPTVRLATRDDVPRAVRTLAAAFADYPATRHTVDPDRHIERVTELQELFLTRVGLDIGKVWVADDGAAVAVWTTPESVEAGAVFAEIGPRMAELSGSRLAAQQQMEGLLAPHRPKEPAWFLATVGVSPDHQGKGLGSAVVLPGVEAAERAGVPAFLETSAPRNLPFYERLGFTVTADVEVPEGPRTWCMTRKPGA

SEQ ID NO: 2798 - protein, 566 aa, synthetic construct
MALPVTALLLPLALLLHAARPDIQMTQSPSSLSASVGDRVTITCKASDHINNWLAWYQQKPGQAPKLLIYGATTLETGVPSRFSGSGSGTDYTLTISSLQPEDFATYYCQQSWNTPWTFGQGTKLEIKRGGGGSGGGGSGGGGSQVQLQQPGAELVKPGASVKMSCKASGYAFNSYWINWMKQKPGQGLEWIGQIYPGDGDTNYNGKFKGRATLTADTSSSTAYMQLSSLTSEDSAVYFCARSITTVVGCAMDYWGQGTSVTVSSTRRREDRYRNLEGGSWSHPQFEKDYKDDDDKGSDYKDDDDKGSDYKDDDDKGSDYKDDDDKAWSHPQFEKHHHHHHHHTSGSGEGRGSLLTCGDVEENPGPHMTEYKPTVRLATRDDVPRAVRTLAAAFADYPATRHTVDPDRHIERVTELQELFLTRVGLDIGKVWVADDGAAVAVWTTPESVEAGAVFAEIGPRMAELSGSRLAAQQQMEGLLAPHRPKEPAWFLATVGVSPDHQGKGLGSAVVLPGVEAAERAGVPAFLETSAPRNLPFYERLGFTVTADVEVPEGPRTWCMTRKPGA

SEQ ID NO: 2799 - protein, 566 aa, synthetic construct
MALPVTALLLPLALLLHAARPDIQMTQSPSSLSASVGDRVTITCKASDHINNWLAWYQQKPGQAPKLLIYGATTLETGVPSRFSGSGSGTDYTLTISSLQPEDFATYYCQQSWNTPWTFGQGTKLEIKRGGGGSGGGGSGGGGSQVQLQQPGAELVKPGASVKMSCKASGYAFNSYWINWMKQKPGQGLEWIGQIYPGDGDTNYNGKFKGRATLTADTSSSTAYMQLSSLTSEDSAVYFCARSITTVVGCAMDYWGQGTSVTVSSTRRQEDRYRNLEGGSWSHPQFEKDYKDDDDKGSDYKDDDDKGSDYKDDDDKGSDYKDDDDKAWSHPQFEKHHHHHHHHTSGSGEGRGSLLTCGDVEENPGPHMTEYKPTVRLATRDDVPRAVRTLAAAFADYPATRHTVDPDRHIERVTELQELFLTRVGLDIGKVWVADDGAAVAVWTTPESVEAGAVFAEIGPRMAELSGSRLAAQQQMEGLLAPHRPKEPAWFLATVGVSPDHQGKGLGSAVVLPGVEAAERAGVPAFLETSAPRNLPFYERLGFTVTADVEVPEGPRTWCMTRKPGA

SEQ ID NO: 2800 - protein, 566 aa, synthetic construct; identical to SEQ ID NO: 2665

SEQ ID NO: 2801 - protein, 566 aa, synthetic construct; identical to SEQ ID NO: 2798

SEQ ID NO: 2802 - protein, 567 aa, synthetic construct
MALPVTALLLPLALLLHAARPDIQMTQSPSSLSASVGDRVTITCKASDHINNWLAWYQQKPGQAPKLLIYGATTLETGVPSRFSGSGSGTDYTLTISSLQPEDFATYYCQQSWNTPWTFGQGTKLEIKRGGGGSGGGGSGGGGSQVQLQQPGAELVKPGASVKMSCKASGYAFNSYWINWMKQKPGQGLEWIGQIYPGDGDTNYNGKFKGRATLTADTSSSTAYMQLSSLTSEDSAVYFCARSITTVVGCAMDYWGQGTSVTVSSTRAPSEDRYRNLEGGSWSHPQFEKDYKDDDDKGSDYKDDDDKGSDYKDDDDKGSDYKDDDDKAWSHPQFEKHHHHHHHHTSGSGEGRGSLLTCGDVEENPGPHMTEYKPTVRLATRDDVPRAVRTLAAAFADYPATRHTVDPDRHIERVTELQELFLTRVGLDIGKVWVADDGAAVAVWTTPESVEAGAVFAEIGPRMAELSGSRLAAQQQMEGLLAPHRPKEPAWFLATVGVSPDHQGKGLGSAVVLPGVEAAERAGVPAFLETSAPRNLPFYERLGFTVTADVEVPEGPRTWCMTRKPGA

SEQ ID NO: 2803 - protein, 567 aa, synthetic construct
MALPVTALLLPLALLLHAARPDIQMTQSPSSLSASVGDRVTITCKASDHINNWLAWYQQKPGQAPKLLIYGATTLETGVPSRFSGSGSGTDYTLTISSLQPEDFATYYCQQSWNTPWTFGQGTKLEIKRGGGGSGGGGSGGGGSQVQLQQPGAELVKPGASVKMSCKASGYAFNSYWINWMKQKPGQGLEWIGQIYPGDGDTNYNGKFKGRATLTADTSSSTAYMQLSSLTSEDSAVYFCARSITTVVGCAMDYWGQGTSVTVSSTRADSEDRYRNLEGGSWSHPQFEKDYKDDDDKGSDYKDDDDKGSDYKDDDDKGSDYKDDDDKAWSHPQFEKHHHHHHHHTSGSGEGRGSLLTCGDVEENPGPHMTEYKPTVRLATRDDVPRAVRTLAAAFADYPATRHTVDPDRHIERVTELQELFLTRVGLDIGKVWVADDGAAVAVWTTPESVEAGAVFAEIGPRMAELSGSRLAAQQQMEGLLAPHRPKEPAWFLATVGVSPDHQGKGLGSAVVLPGVEAAERAGVPAFLETSAPRNLPFYERLGFTVTADVEVPEGPRTWCMTRKPGA

SEQ ID NO: 2804 - protein, 567 aa, synthetic construct; identical to SEQ ID NO: 2802

SEQ ID NO: 2805 - protein, 567 aa, synthetic construct
MALPVTALLLPLALLLHAARPDIQMTQSPSSLSASVGDRVTITCKASDHINNWLAWYQQKPGQAPKLLIYGATTLETGVPSRFSGSGSGTDYTLTISSLQPEDFATYYCQQSWNTPWTFGQGTKLEIKRGGGGSGGGGSGGGGSQVQLQQPGAELVKPGASVKMSCKASGYAFNSYWINWMKQKPGQGLEWIGQIYPGDGDTNYNGKFKGRATLTADTSSSTAYMQLSSLTSEDSAVYFCARSITTVVGCAMDYWGQGTSVTVSSTRAISEDRYRNLEGGSWSHPQFEKDYKDDDDKGSDYKDDDDKGSDYKDDDDKGSDYKDDDDKAWSHPQFEKHHHHHHHHTSGSGEGRGSLLTCGDVEENPGPHMTEYKPTVRLATRDDVPRAVRTLAAAFADYPATRHTVDPDRHIERVTELQELFLTRVGLDIGKVWVADDGAAVAVWTTPESVEAGAVFAEIGPRMAELSGSRLAAQQQMEGLLAPHRPKEPAWFLATVGVSPDHQGKGLGSAVVLPGVEAAERAGVPAFLETSAPRNLPFYERLGFTVTADVEVPEGPRTWCMTRKPGA

SEQ ID NO: 2806 - protein, 567 aa, synthetic construct; identical to SEQ ID NO: 2754

SEQ ID NO: 2807 - protein, 567 aa, synthetic construct
MALPVTALLLPLALLLHAARPDIQMTQSPSSLSASVGDRVTITCKASDHINNWLAWYQQKPGQAPKLLIYGATTLETGVPSRFSGSGSGTDYTLTISSLQPEDFATYYCQQSWNTPWTFGQGTKLEIKRGGGGSGGGGSGGGGSQVQLQQPGAELVKPGASVKMSCKASGYAFNSYWINWMKQKPGQGLEWIGQIYPGDGDTNYNGKFKGRATLTADTSSSTAYMQLSSLTSEDSAVYFCARSITTVVGCAMDYWGQGTSVTVSSTRALSEDRYRNLEGGSWSHPQFEKDYKDDDDKGSDYKDDDDKGSDYKDDDDKGSDYKDDDDKAWSHPQFEKHHHHHHHHTSGSGEGRGSLLTCGDVEENPGPHMTEYKPTVRLATRDDVPRAVRTLAAAFADYPATRHTVDPDRHIERVTELQELFLTRVGLDIGKVWVADDGAAVAVWTTPESVEAGAVFAEIGPRMAELSGSRLAAQQQMEGLLAPHRPKEPAWFLATVGVSPDHQGKGLGSAVVLPGVEAAERAGVPAFLETSAPRNLPFYERLGFTVTADVEVPEGPRTWCMTRKPGA

SEQ ID NO: 2808 - protein, 567 aa, synthetic construct; identical to SEQ ID NO: 2755

SEQ ID NO: 2809 - protein, 566 aa, synthetic construct
MALPVTALLLPLALLLHAARPDIQMTQSPSSLSASVGDRVTITCKASDHINNWLAWYQQKPGQAPKLLIYGATTLETGVPSRFSGSGSGTDYTLTISSLQPEDFATYYCQQSWNTPWTFGQGTKLEIKRGGGGSGGGGSGGGGSQVQLQQPGAELVKPGASVKMSCKASGYAFNSYWINWMKQKPGQGLEWIGQIYPGDGDTNYNGKFKGRATLTADTSSSTAYMQLSSLTSEDSAVYFCARSITTVVGCAMDYWGQGTSVTVSSTRRSYDRYRNLEGGSWSHPQFEKDYKDDDDKGSDYKDDDDKGSDYKDDDDKGSDYKDDDDKAWSHPQFEKHHHHHHHHTSGSGEGRGSLLTCGDVEENPGPHMTEYKPTVRLATRDDVPRAVRTLAAAFADYPATRHTVDPDRHIERVTELQELFLTRVGLDIGKVWVADDGAAVAVWTTPESVEAGAVFAEIGPRMAELSGSRLAAQQQMEGLLAPHRPKEPAWFLATVGVSPDHQGKGLGSAVVLPGVEAAERAGVPAFLETSAPRNLPFYERLGFTVTADVEVPEGPRTWCMTRKPGA

SEQ ID NO: 2810 - protein, 566 aa, synthetic construct; identical to SEQ ID NO: 2764

SEQ ID NO: 2811 - protein, 566 aa, synthetic construct
MALPVTALLLPLALLLHAARPDIQMTQSPSSLSASVGDRVTITCKASDHINNWLAWYQQKPGQAPKLLIYGATTLETGVPSRFSGSGSGTDYTLTISSLQPEDFATYYCQQSWNTPWTFGQGTKLEIKRGGGGSGGGGSGGGGSQVQLQQPGAELVKPGASVKMSCKASGYAFNSYWINWMKQKPGQGLEWIGQIYPGDGDTNYNGKFKGRATLTADTSSSTAYMQLSSLTSEDSAVYFCARSITTVVGCAMDYWGQGTSVTVSSTRRSDDRYRNLEGGSWSHPQFEKDYKDDDDKGSDYKDDDDKGSDYKDDDDKGSDYKDDDDKAWSHPQFEKHHHHHHHHTSGSGEGRGSLLTCGDVEENPGPHMTEYKPTVRLATRDDVPRAVRTLAAAFADYPATRHTVDPDRHIERVTELQELFLTRVGLDIGKVWVADDGAAVAVWTTPESVEAGAVFAEIGPRMAELSGSRLAAQQQMEGLLAPHRPKEPAWFLATVGVSPDHQGKGLGSAVVLPGVEAAERAGVPAFLETSAPRNLPFYERLGFTVTADVEVPEGPRTWCMTRKPGA

SEQ ID NO: 2812 - protein, 566 aa, synthetic construct; identical to SEQ ID NO: 2665

SEQ ID NO: 2813 - protein, 566 aa, synthetic construct
MALPVTALLLPLALLLHAARPDIQMTQSPSSLSASVGDRVTITCKASDHINNWLAWYQQKPGQAPKLLIYGATTLETGVPSRFSGSGSGTDYTLTISSLQPEDFATYYCQQSWNTPWTFGQGTKLEIKRGGGGSGGGGSGGGGSQVQLQQPGAELVKPGASVKMSCKASGYAFNSYWINWMKQKPGQGLEWIGQIYPGDGDTNYNGKFKGRATLTADTSSSTAYMQLSSLTSEDSAVYFCARSITTVVGCAMDYWGQGTSVTVSSTRRSGDRYRNLEGGSWSHPQFEKDYKDDDDKGSDYKDDDDKGSDYKDDDDKGSDYKDDDDKAWSHPQFEKHHHHHHHHTSGSGEGRGSLLTCGDVEENPGPHMTEYKPTVRLATRDDVPRAVRTLAAAFADYPATRHTVDPDRHIERVTELQELFLTRVGLDIGKVWVADDGAAVAVWTTPESVEAGAVFAEIGPRMAELSGSRLAAQQQMEGLLAPHRPKEPAWFLATVGVSPDHQGKGLGSAVVLPGVEAAERAGVPAFLETSAPRNLPFYERLGFTVTADVEVPEGPRTWCMTRKPGA

SEQ ID NO: 2814 - protein, 270 aa, synthetic construct; identical to SEQ ID NO: 2791

SEQ ID NO: 2815 - protein, 566 aa, synthetic construct; identical to SEQ ID NO: 2774

SEQ ID NO: 2816 - protein, 566 aa, synthetic construct
MALPVTALLLPLALLLHAARPDIQMTQSPSSLSASVGDRVTITCKASDHINNWLAWYQQKPGQAPKLLIYGATTLETGVPSRFSGSGSGTDYTLTISSLQPEDFATYYCQQSWNTPWTFGQGTKLEIKRGGGGSGGGGSGGGGSQVQLQQPGAELVKPGASVKMSCKASGYAFNSYWINWMKQKPGQGLEWIGQIYPGDGDTNYNGKFKGRATLTADTSSSTAYMQLSSLTSEDSAVYFCARSITTVVGCAMDYWGQGTSVTVSSTRRSETRYRNLEGGSWSHPQFEKDYKDDDDKGSDYKDDDDKGSDYKDDDDKGSDYKDDDDKAWSHPQFEKHHHHHHHHTSGSGEGRGSLLTCGDVEENPGPHMTEYKPTVRLATRDDVPRAVRTLAAAFADYPATRHTVDPDRHIERVTELQELFLTRVGLDIGKVWVADDGAAVAVWTTPESVEAGAVFAEIGPRMAELSGSRLAAQQQMEGLLAPHRPKEPAWFLATVGVSPDHQGKGLGSAVVLPGVEAAERAGVPAFLETSAPRNLPFYERLGFTVTADVEVPEGPRTWCMTRKPGA

SEQ ID NO: 2817 - protein, 566 aa, synthetic construct; identical to SEQ ID NO: 2742

SEQ ID NO: 2818 - protein, 566 aa, synthetic construct
MALPVTALLLPLALLLHAARPDIQMTQSPSSLSASVGDRVTITCKASDHINNWLAWYQQKPGQAPKLLIYGATTLETGVPSRFSGSGSGTDYTLTISSLQPEDFATYYCQQSWNTPWTFGQGTKLEIKRGGGGSGGGGSGGGGSQVQLQQPGAELVKPGASVKMSCKASGYAFNSYWINWMKQKPGQGLEWIGQIYPGDGDTNYNGKFKGRATLTADTSSSTAYMQLSSLTSEDSAVYFCARSITTVVGCAMDYWGQGTSVTVSSTRRSEPRYRNLEGGSWSHPQFEKDYKDDDDKGSDYKDDDDKGSDYKDDDDKGSDYKDDDDKAWSHPQFEKHHHHHHHHTSGSGEGRGSLLTCGDVEENPGPHMTEYKPTVRLATRDDVPRAVRTLAAAFADYPATRHTVDPDRHIERVTELQELFLTRVGLDIGKVWVADDGAAVAVWTTPESVEAGAVFAEIGPRMAELSGSRLAAQQQMEGLLAPHRPKEPAWFLATVGVSPDHQGKGLGSAVVLPGVEAAERAGVPAFLETSAPRNLPFYERLGFTVTADVEVPEGPRTWCMTRKPGA

SEQ ID NO: 2819 - protein, 566 aa, synthetic construct; identical to SEQ ID NO: 2742

SEQ ID NO: 2820 - protein, 565 aa, synthetic construct; identical to SEQ ID NO: 2749

SEQ ID NO: 2821 - protein, 565 aa, synthetic construct; identical to SEQ ID NO: 2746

SEQ ID NO: 2822 - protein, 565 aa, synthetic construct
MALPVTALLLPLALLLHAARPDIQMTQSPSSLSASVGDRVTITCKASDHINNWLAWYQQKPGQAPKLLIYGATTLETGVPSRFSGSGSGTDYTLTISSLQPEDFATYYCQQSWNTPWTFGQGTKLEIKRGGGGSGGGGSGGGGSQVQLQQPGAELVKPGASVKMSCKASGYAFNSYWINWMKQKPGQGLEWIGQIYPGDGDTNYNGKFKGRATLTADTSSSTAYMQLSSLTSEDSAVYFCARSITTVVGCAMDYWGQGTSVTVSSTRRREDRYRLEGGSWSHPQFEKDYKDDDDKGSDYKDDDDKGSDYKDDDDKGSDYKDDDDKAWSHPQFEKHHHHHHHHTSGSGEGRGSLLTCGDVEENPGPHMTEYKPTVRLATRDDVPRAVRTLAAAFADYPATRHTVDPDRHIERVTELQELFLTRVGLDIGKVWVADDGAAVAVWTTPESVEAGAVFAEIGPRMAELSGSRLAAQQQMEGLLAPHRPKEPAWFLATVGVSPDHQGKGLGSAVVLPGVEAAERAGVPAFLETSAPRNLPFYERLGFTVTADVEVPEGPRTWCMTRKPGA

SEQ ID NO: 2823 - protein, 565 aa, synthetic construct; identical to SEQ ID NO: 2749

SEQ ID NO: 2824 - protein, 565 aa, synthetic construct; identical to SEQ ID NO: 2779

SEQ ID NO: 2825 - protein, 565 aa, synthetic construct
MALPVTALLLPLALLLHAARPDIQMTQSPSSLSASVGDRVTITCKASDHINNWLAWYQQKPGQAPKLLIYGATTLETGVPSRFSGSGSGTDYTLTISSLQPEDFATYYCQQSWNTPWTFGQGTKLEIKRGGGGSGGGGSGGGGSQVQLQQPGAELVKPGASVKMSCKASGYAFNSYWINWMKQKPGQGLEWIGQIYPGDGDTNYNGKFKGRATLTADTSSSTAYMQLSSLTSEDSAVYFCARSITTVVGCAMDYWGQGTSVTVSSTRRLEDRYRLEGGSWSHPQFEKDYKDDDDKGSDYKDDDDKGSDYKDDDDKGSDYKDDDDKAWSHPQFEKHHHHHHHHTSGSGEGRGSLLTCGDVEENPGPHMTEYKPTVRLATRDDVPRAVRTLAAAFADYPATRHTVDPDRHIERVTELQELFLTRVGLDIGKVWVADDGAAVAVWTTPESVEAGAVFAEIGPRMAELSGSRLAAQQQMEGLLAPHRPKEPAWFLATVGVSPDHQGKGLGSAVVLPGVEAAERAGVPAFLETSAPRNLPFYERLGFTVTADVEVPEGPRTWCMTRKPGA

SEQ ID NO: 2826 - protein, 565 aa, synthetic construct
MALPVTALLLPLALLLHAARPDIQMTQSPSSLSASVGDRVTITCKASDHINNWLAWYQQKPGQAPKLLIYGATTLETGVPSRFSGSGSGTDYTLTISSLQPEDFATYYCQQSWNTPWTFGQGTKLEIKRGGGGSGGGGSGGGGSQVQLQQPGAELVKPGASVKMSCKASGYAFNSYWINWMKQKPGQGLEWIGQIYPGDGDTNYNGKFKGRATLTADTSSSTAYMQLSSLTSEDSAVYFCARSITTVVGCAMDYWGQGTSVTVSSTRRSRDRYRLEGGSWSHPQFEKDYKDDDDKGSDYKDDDDKGSDYKDDDDKGSDYKDDDDKAWSHPQFEKHHHHHHHHTSGSGEGRGSLLTCGDVEENPGPHMTEYKPTVRLATRDDVPRAVRTLAAAFADYPATRHTVDPDRHIERVTELQELFLTRVGLDIGKVWVADDGAAVAVWTTPESVEAGAVFAEIGPRMAELSGSRLAAQQQMEGLLAPHRPKEPAWFLATVGVSPDHQGKGLGSAVVLPGVEAAERAGVPAFLETSAPRNLPFYERLGFTVTADVEVPEGPRTWCMTRKPGA

SEQ ID NO: 2827 - protein, 565 aa, synthetic construct
MALPVTALLLPLALLLHAARPDIQMTQSPSSLSASVGDRVTITCKASDHINNWLAWYQQKPGQAPKLLIYGATTLETGVPSRFSGSGSGTDYTLTISSLQPEDFATYYCQQSWNTPWTFGQGTKLEIKRGGGGSGGGGSGGGGSQVQLQQPGAELVKPGASVKMSCKASGYAFNSYWINWMKQKPGQGLEWIGQIYPGDGDTNYNGKFKGRATLTADTSSSTAYMQLSSLTSEDSAVYFCARSITTVVGCAMDYWGQGTSVTVSSTRRSSDRYRLEGGSWSHPQFEKDYKDDDDKGSDYKDDDDKGSDYKDDDDKGSDYKDDDDKAWSHPQFEKHHHHHHHHTSGSGEGRGSLLTCGDVEENPGPHMTEYKPTVRLATRDDVPRAVRTLAAAFADYPATRHTVDPDRHIERVTELQELFLTRVGLDIGKVWVADDGAAVAVWTTPESVEAGAVFAEIGPRMAELSGSRLAAQQQMEGLLAPHRPKEPAWFLATVGVSPDHQGKGLGSAVVLPGVEAAERAGVPAFLETSAPRNLPFYERLGFTVTADVEVPEGPRTWCMTRKPGA

SEQ ID NO: 2828 - protein, 565 aa, synthetic construct
MALPVTALLLPLALLLHAARPDIQMTQSPSSLSASVGDRVTITCKASDHINNWLAWYQQKPGQAPKLLIYGATTLETGVPSRFSGSGSGTDYTLTISSLQPEDFATYYCQQSWNTPWTFGQGTKLEIKRGGGGSGGGGSGGGGSQVQLQQPGAELVKPGASVKMSCKASGYAFNSYWINWMKQKPGQGLEWIGQIYPGDGDTNYNGKFKGRATLTADTSSSTAYMQLSSLTSEDSAVYFCARSITTVVGCAMDYWGQGTSVTVSSTRRSVDRYRLEGGSWSHPQFEKDYKDDDDKGSDYKDDDDKGSDYKDDDDKGSDYKDDDDKAWSHPQFEKHHHHHHHHTSGSGEGRGSLLTCGDVEENPGPHMTEYKPTVRLATRDDVPRAVRTLAAAFADYPATRHTVDPDRHIERVTELQELFLTRVGLDIGKVWVADDGAAVAVWTTPESVEAGAVFAEIGPRMAELSGSRLAAQQQMEGLLAPHRPKEPAWFLATVGVSPDHQGKGLGSAVVLPGVEAAERAGVPAFLETSAPRNLPFYERLGFTVTADVEVPEGPRTWCMTRKPGA

SEQ ID NO: 2829 - protein, 565 aa, synthetic construct
MALPVTALLLPLALLLHAARPDIQMTQSPSSLSASVGDRVTITCKASDHINNWLAWYQQKPGQAPKLLIYGATTLETGVPSRFSGSGSGTDYTLTISSLQPEDFATYYCQQSWNTPWTFGQGTKLEIKRGGGGSGGGGSGGGGSQVQLQQPGAELVKPGASVKMSCKASGYAFNSYWINWMKQKPGQGLEWIGQIYPGDGDTNYNGKFKGRATLTADTSSSTAYMQLSSLTSEDSAVYFCARSITTVVGCAMDYWGQGTSVTVSSTRRSWDRYRLEGGSWSHPQFEKDYKDDDDKGSDYKDDDDKGSDYKDDDDKGSDYKDDDDKAWSHPQFEKHHHHHHHHTSGSGEGRGSLLTCGDVEENPGPHMTEYKPTVRLATRDDVPRAVRTLAAAFADYPATRHTVDPDRHIERVTELQELFLTRVGLDIGKVWVADDGAAVAVWTTPESVEAGAVFAEIGPRMAELSGSRLAAQQQMEGLLAPHRPKEPAWFLATVGVSPDHQGKGLGSAVVLPGVEAAERAGVPAFLETSAPRNLPFYERLGFTVTADVEVPEGPRTWCMTRKPGA

SEQ ID NO: 2830 - protein, 565 aa, synthetic construct; identical to SEQ ID NO: 2747

SEQ ID NO: 2831 - protein, 565 aa, synthetic construct; identical to SEQ ID NO: 2784

SEQ ID NO: 2832 - protein, 565 aa, synthetic construct; identical to SEQ ID NO: 2747

SEQ ID NO: 2833 - protein, 565 aa, synthetic construct
MALPVTALLLPLALLLHAARPDIQMTQSPSSLSASVGDRVTITCKASDHINNWLAWYQQKPGQAPKLLIYGATTLETGVPSRFSGSGSGTDYTLTISSLQPEDFATYYCQQSWNTPWTFGQGTKLEIKRGGGGSGGGGSGGGGSQVQLQQPGAELVKPGASVKMSCKASGYAFNSYWINWMKQKPGQGLEWIGQIYPGDGDTNYNGKFKGRATLTADTSSSTAYMQLSSLTSEDSAVYFCARSITTVVGCAMDYWGQGTSVTVSSTRRSEYRYRLEGGSWSHPQFEKDYKDDDDKGSDYKDDDDKGSDYKDDDDKGSDYKDDDDKAWSHPQFEKHHHHHHHHTSGSGEGRGSLLTCGDVEENPGPHMTEYKPTVRLATRDDVPRAVRTLAAAFADYPATRHTVDPDRHIERVTELQELFLTRVGLDIGKVWVADDGAAVAVWTTPESVEAGAVFAEIGPRMAELSGSRLAAQQQMEGLLAPHRPKEPAWFLATVGVSPDHQGKGLGSAVVLPGVEAAERAGVPAFLETSAPRNLPFYERLGFTVTADVEVPEGPRTWCMTRKPGA

SEQ ID NO: 2834 - protein, 565 aa, synthetic construct; identical to SEQ ID NO: 2789

SEQ ID NO: 2835 - protein, 565 aa, synthetic construct; identical to SEQ ID NO: 2794

SEQ ID NO: 2836 - protein, 565 aa, synthetic construct; identical to SEQ ID NO: 2794

SEQ ID NO: 2837 - protein, 565 aa, synthetic construct
MALPVTALLLPLALLLHAARPDIQMTQSPSSLSASVGDRVTITCKASDHINNWLAWYQQKPGQAPKLLIYGATTLETGVPSRFSGSGSGTDYTLTISSLQPEDFATYYCQQSWNTPWTFGQGTKLEIKRGGGGSGGGGSGGGGSQVQLQQPGAELVKPGASVKMSCKASGYAFNSYWINWMKQKPGQGLEWIGQIYPGDGDTNYNGKFKGRATLTADTSSSTAYMQLSSLTSEDSAVYFCARSITTVVGCAMDYWGQGTSVTVSSTRRSETRYRLEGGSWSHPQFEKDYKDDDDKGSDYKDDDDKGSDYKDDDDKGSDYKDDDDKAWSHPQFEKHHHHHHHHTSGSGEGRGSLLTCGDVEENPGPHMTEYKPTVRLATRDDVPRAVRTLAAAFADYPATRHTVDPDRHIERVTELQELFLTRVGLDIGKVWVADDGAAVAVWTTPESVEAGAVFAEIGPRMAELSGSRLAAQQQMEGLLAPHRPKEPAWFLATVGVSPDHQGKGLGSAVVLPGVEAAERAGVPAFLETSAPRNLPFYERLGFTVTADVEVPEGPRTWCMTRKPGA

SEQ ID NO: 2838 - protein, 565 aa, synthetic construct; identical to SEQ ID NO: 2837

SEQ ID NO: 2839 - protein, 566 aa, synthetic construct
MALPVTALLLPLALLLHAARPDIQMTQSPSSLSASVGDRVTITCKASDHINNWLAWYQQKPGQAPKLLIYGATTLETGVPSRFSGSGSGTDYTLTISSLQPEDFATYYCQQSWNTPWTFGQGTKLEIKRGGGGSGGGGSGGGGSQVQLQQPGAELVKPGASVKMSCKASGYAFNSYWINWMKQKPGQGLEWIGQIYPGDGDTNYNGKFKGRATLTADTSSSTAYMQLSSLTSEDSAVYFCARSITTVVGCAMDYWGQGTSVTVSSTRRMEDRYRNLEGGSWSHPQFEKDYKDDDDKGSDYKDDDDKGSDYKDDDDKGSDYKDDDDKAWSHPQFEKHHHHHHHHTSGSGEGRGSLLTCGDVEENPGPHMTEYKPTVRLATRDDVPRAVRTLAAAFADYPATRHTVDPDRHIERVTELQELFLTRVGLDIGKVWVADDGAAVAVWTTPESVEAGAVFAEIGPRMAELSGSRLAAQQQMEGLLAPHRPKEPAWFLATVGVSPDHQGKGLGSAVVLPGVEAAERAGVPAFLETSAPRNLPFYERLGFTVTADVEVPEGPRTWCMTRKPGA

SEQ ID NO: 2840 - protein, 566 aa, synthetic construct
MALPVTALLLPLALLLHAARPDIQMTQSPSSLSASVGDRVTITCKASDHINNWLAWYQQKPGQAPKLLIYGATTLETGVPSRFSGSGSGTDYTLTISSLQPEDFATYYCQQSWNTPWTFGQGTKLEIKRGGGGSGGGGSGGGGSQVQLQQPGAELVKPGASVKMSCKASGYAFNSYWINWMKQKPGQGLEWIGQIYPGDGDTNYNGKFKGRATLTADTSSSTAYMQLSSLTSEDSAVYFCARSITTVVGCAMDYWGQGTSVTVSSTRRKEDRYRNLEGGSWSHPQFEKDYKDDDDKGSDYKDDDDKGSDYKDDDDKGSDYKDDDDKAWSHPQFEKHHHHHHHHTSGSGEGRGSLLTCGDVEENPGPHMTEYKPTVRLATRDDVPRAVRTLAAAFADYPATRHTVDPDRHIERVTELQELFLTRVGLDIGKVWVADDGAAVAVWTTPESVEAGAVFAEIGPRMAELSGSRLAAQQQMEGLLAPHRPKEPAWFLATVGVSPDHQGKGLGSAVVLPGVEAAERAGVPAFLETSAPRNLPFYERLGFTVTADVEVPEGPRTWCMTRKPGA

SEQ ID NO: 2841 - protein, 566 aa, synthetic construct; identical to SEQ ID NO: 2798

SEQ ID NO: 2842 - protein, 566 aa, synthetic construct
MALPVTALLLPLALLLHAARPDIQMTQSPSSLSASVGDRVTITCKASDHINNWLAWYQQKPGQAPKLLIYGATTLETGVPSRFSGSGSGTDYTLTISSLQPEDFATYYCQQSWNTPWTFGQGTKLEIKRGGGGSGGGGSGGGGSQVQLQQPGAELVKPGASVKMSCKASGYAFNSYWINWMKQKPGQGLEWIGQIYPGDGDTNYNGKFKGRATLTADTSSSTAYMQLSSLTSEDSAVYFCARSITTVVGCAMDYWGQGTSVTVSSTRRVEDRYRNLEGGSWSHPQFEKDYKDDDDKGSDYKDDDDKGSDYKDDDDKGSDYKDDDDKAWSHPQFEKHHHHHHHHTSGSGEGRGSLLTCGDVEENPGPHMTEYKPTVRLATRDDVPRAVRTLAAAFADYPATRHTVDPDRHIERVTELQELFLTRVGLDIGKVWVADDGAAVAVWTTPESVEAGAVFAEIGPRMAELSGSRLAAQQQMEGLLAPHRPKEPAWFLATVGVSPDHQGKGLGSAVVLPGVEAAERAGVPAFLETSAPRNLPFYERLGFTVTADVEVPEGPRTWCMTRKPGA

SEQ ID NO: 2843 - protein, 567 aa, synthetic construct
MALPVTALLLPLALLLHAARPDIQMTQSPSSLSASVGDRVTITCKASDHINNWLAWYQQKPGQAPKLLIYGATTLETGVPSRFSGSGSGTDYTLTISSLQPEDFATYYCQQSWNTPWTFGQGTKLEIKRGGGGSGGGGSGGGGSQVQLQQPGAELVKPGASVKMSCKASGYAFNSYWINWMKQKPGQGLEWIGQIYPGDGDTNYNGKFKGRATLTADTSSSTAYMQLSSLTSEDSAVYFCARSITTVVGCAMDYWGQGTSVTVSSTRARYWCRYRNLEGGSWSHPQFEKDYKDDDDKGSDYKDDDDKGSDYKDDDDKGSDYKDDDDKAWSHPQFEKHHHHHHHHTSGSGEGRGSLLTCGDVEENPGPHMTEYKPTVRLATRDDVPRAVRTLAAAFADYPATRHTVDPDRHIERVTELQELFLTRVGLDIGKVWVADDGAAVAVWTTPESVEAGAVFAEIGPRMAELSGSRLAAQQQMEGLLAPHRPKEPAWFLATVGVSPDHQGKGLGSAVVLPGVEAAERAGVPAFLETSAPRNLPFYERLGFTVTADVEVPEGPRTWCMTRKPGA

SEQ ID NO: 2844 - protein, 567 aa, synthetic construct
MALPVTALLLPLALLLHAARPDIQMTQSPSSLSASVGDRVTITCKASDHINNWLAWYQQKPGQAPKLLIYGATTLETGVPSRFSGSGSGTDYTLTISSLQPEDFATYYCQQSWNTPWTFGQGTKLEIKRGGGGSGGGGSGGGGSQVQLQQPGAELVKPGASVKMSCKASGYAFNSYWINWMKQKPGQGLEWIGQIYPGDGDTNYNGKFKGRATLTADTSSSTAYMQLSSLTSEDSAVYFCARSITTVVGCAMDYWGQGTSVTVSSTRARGRCRYRNLEGGSWSHPQFEKDYKDDDDKGSDYKDDDDKGSDYKDDDDKGSDYKDDDDKAWSHPQFEKHHHHHHHHTSGSGEGRGSLLTCGDVEENPGPHMTEYKPTVRLATRDDVPRAVRTLAAAFADYPATRHTVDPDRHIERVTELQELFLTRVGLDIGKVWVADDGAAVAVWTTPESVEAGAVFAEIGPRMAELSGSRLAAQQQMEGLLAPHRPKEPAWFLATVGVSPDHQGKGLGSAVVLPGVEAAERAGVPAFLETSAPRNLPFYERLGFTVTADVEVPEGPRTWCMTRKPGA

SEQ ID NO: 2845 - protein, 567 aa, synthetic construct
MALPVTALLLPLALLLHAARPDIQMTQSPSSLSASVGDRVTITCKASDHINNWLAWYQQKPGQAPKLLIYGATTLETGVPSRFSGSGSGTDYTLTISSLQPEDFATYYCQQSWNTPWTFGQGTKLEIKRGGGGSGGGGSGGGGSQVQLQQPGAELVKPGASVKMSCKASGYAFNSYWINWMKQKPGQGLEWIGQIYPGDGDTNYNGKFKGRATLTADTSSSTAYMQLSSLTSEDSAVYFCARSITTVVGCAMDYWGQGTSVTVSSTRARAVCRYRNLEGGSWSHPQFEKDYKDDDDKGSDYKDDDDKGSDYKDDDDKGSDYKDDDDKAWSHPQFEKHHHHHHHHTSGSGEGRGSLLTCGDVEENPGPHMTEYKPTVRLATRDDVPRAVRTLAAAFADYPATRHTVDPDRHIERVTELQELFLTRVGLDIGKVWVADDGAAVAVWTTPESVEAGAVFAEIGPRMAELSGSRLAAQQQMEGLLAPHRPKEPAWFLATVGVSPDHQGKGLGSAVVLPGVEAAERAGVPAFLETSAPRNLPFYERLGFTVTADVEVPEGPRTWCMTRKPGA

SEQ ID NO: 2846 - protein, 270 aa, synthetic construct
MALPVTALLLPLALLLHAARPDIQMTQSPSSLSASVGDRVTITCKASDHINNWLAWYQQKPGQAPKLLIYGATTLETGVPSRFSGSGSGTDYTLTISSLQPEDFATYYCQQSWNTPWTFGQGTKLEIKRGGGGSGGGGSGGGGSQVQLQQPGAELVKPGASVKMSCKASGYAFNSYWINWMKQKPGQGLEWIGQIYPGDGDTNYNGKFKGRATLTADTSSSTAYMQLSSLTSEDSAVYFCARSITTVVGCAMDYWGQGTSVTVSSTRARL

SEQ ID NO: 2847 - protein, 567 aa, synthetic construct
MALPVTALLLPLALLLHAARPDIQMTQSPSSLSASVGDRVTITCKASDHINNWLAWYQQKPGQAPKLLIYGATTLETGVPSRFSGSGSGTDYTLTISSLQPEDFATYYCQQSWNTPWTFGQGTKLEIKRGGGGSGGGGSGGGGSQVQLQQPGAELVKPGASVKMSCKASGYAFNSYWINWMKQKPGQGLEWIGQIYPGDGDTNYNGKFKGRATLTADTSSSTAYMQLSSLTSEDSAVYFCARSITTVVGCAMDYWGQGTSVTVSSTRARESRRYRNLEGGSWSHPQFEKDYKDDDDKGSDYKDDDDKGSDYKDDDDKGSDYKDDDDKAWSHPQFEKHHHHHHHHTSGSGEGRGSLLTCGDVEENPGPHMTEYKPTVRLATRDDVPRAVRTLAAAFADYPATRHTVDPDRHIERVTELQELFLTRVGLDIGKVWVADDGAAVAVWTTPESVEAGAVFAEIGPRMAELSGSRLAAQQQMEGLLAPHRPKEPAWFLATVGVSPDHQGKGLGSAVVLPGVEAAERAGVPAFLETSAPRNLPFYERLGFTVTADVEVPEGPRTWCMTRKPGA

SEQ ID NO: 2848 - protein, 567 aa, synthetic construct
MALPVTALLLPLALLLHAARPDIQMTQSPSSLSASVGDRVTITCKASDHINNWLAWYQQKPGQAPKLLIYGATTLETGVPSRFSGSGSGTDYTLTISSLQPEDFATYYCQQSWNTPWTFGQGTKLEIKRGGGGSGGGGSGGGGSQVQLQQPGAELVKPGASVKMSCKASGYAFNSYWINWMKQKPGQGLEWIGQIYPGDGDTNYNGKFKGRATLTADTSSSTAYMQLSSLTSEDSAVYFCARSITTVVGCAMDYWGQGTSVTVSSTRARRRGRYRNLEGGSWSHPQFEKDYRDDDDKGSDYKDDDDKGSDYKDDDDKGSDYKDDDDKAWSHPQFEKHHHHHHHHTSGSGEGRGSLLTCGDVEENPGPHMTEYKPTVRLATRDDVPRAVRTLAAAFADYPATRHTVDPDRHIERVTELQELFLTRVGLDIGKVWVADDGAAVAVWTTPESVEAGAVFAEIGPRMAELSGSRLAAQQQMEGLLAPHRPKEPAWFLATVGVSPDHQGKGLGSAVVLPGVEAAERAGVPAFLETSAPRNLPFYERLGFTVTADVEVPEGPRTWCMTRKPGA

SEQ ID NO: 2849 - protein, 567 aa, synthetic construct
MALPVTALLLPLALLLHAARPDIQMTQSPSSLSASVGDRVTITCKASDHINNWLAWYQQKPGQAPKLLIYGATTLETGVPSRFSGSGSGTDYTLTISSLQPEDFATYYCQQSWNTPWTFGQGTKLEIKRGGGGSGGGGSGGGGSQVQLQQPGAELVKPGASVKMSCKASGYAFNSYWINWMKQKPGQGLEWIGQIYPGDGDTNYNGKFKGRATLTADTSSSTAYMQLSSLTSEDSAVYFCARSITTVVGCAMDYWGQGTSVTVSSTRARKLTRYRNLEGGSWSHPQFEKDYKDDDDKGSDYKDDDDKGSDYKDDDDKGSDYKDDDDKAWSHPQFEKHHHHHHHHTSGSGEGRGSLLTCGDVEENPGPHMTEYKPTVRLATRDDVPRAVRTLAAAFADYPATRHTVDPDRHIERVTELQELFLTRVGLDIGKVWVADDGAAVAVWTTPESVEAGAVFAEIGPRMAELSGSRLAAQQQMEGLLAPHRPKEPAWFLATVGVSPDHQGKGLGSAVVLPGVEAAERAGVPAFLETSAPRNLPFYERLGFTVTADVEVPEGPRTWCMTRKPGA

SEQ ID NO: 2850 - protein, 270 aa, synthetic construct
MALPVTALLLPLALLLHAARPDIQMTQSPSSLSASVGDRVTITCKASDHINNWLAWYQQKPGQAPKLLIYGATTLETGVPSRFSGSGSGTDYTLTISSLQPEDFATYYCQQSWNTPWTFGQGTKLEIKRGGGGSGGGGSGGGGSQVQLQQPGAELVKPGASVKMSCKASGYAFNSYWINWMKQKPGQGLEWIGQIYPGDGDTNYNGKFKGRATLTADTSSSTAYMQLSSLTSEDSAVYFCARSITTVVGCAMDYWGQGTSVTVSSTRARN

SEQ ID NO: 2851 - protein, 567 aa, synthetic construct
MALPVTALLLPLALLLHAARPDIQMTQSPSSLSASVGDRVTITCKASDHINNWLAWYQQKPGQAPKLLIYGATTLETGVPSRFSGSGSGTDYTLTISSLQPEDFATYYCQQSWNTPWTFGQGTKLEIKRGGGGSGGGGSGGGGSQVQLQQPGAELVKPGASVKMSCKASGYAFNSYWINWMKQKPGQGLEWIGQIYPGDGDTNYNGKFKGRATLTADTSSSTAYMQLSSLTSEDSAVYFCARSITTVVGCAMDYWGQGTSVTVSSTRARRRDRYRNLEGGSWSHPQFEKDYKDDDDKGSDYKDDDDKGSDYKDDDDKGSDYKDDDDKAWSHPQFEKHHHHHHHHTSGSGEGRGSLLTCGDVEENPGPHMTEYKPTVRLATRDDVPRAVRTLAAAFADYPATRHTVDPDRHIERVTELQELFLTRVGLDIGKVWVADDGAAVAVWTTPESVEAGAVFAEIGPRMAELSGSRLAAQQQMEGLLAPHRPKEPAWFLATVGVSPDHQGKGLGSAVVLPGVEAAERAGVPAFLETSAPRNLPFYERLGFTVTADVEVPEGPRTWCMTRKPGA

SEQ ID NO: 2852 - protein, 567 aa, synthetic construct
MALPVTALLLPLALLLHAARPDIQMTQSPSSLSASVGDRVTITCKASDHINNWLAWYQQKPGQAPKLLIYGATTLETGVPSRFSGSGSGTDYTLTISSLQPEDFATYYCQQSWNTPWTFGQGTKLEIKRGGGGSGGGGSGGGGSQVQLQQPGAELVKPGASVKMSCKASGYAFNSYWINWMKQKPGQGLEWIGQIYPGDGDTNYNGKFKGRATLTADTSSSTAYMQLSSLTSEDSAVYFCARSITTVVGCAMDYWGQGTSVTVSSTRARCGGRYRNLEGGSWSHPQFEKDYKDDDDKGSDYKDDDDKGSDYKDDDDKGSDYKDDDDKAWSHPQFEKHHHHHHHHTSGSGEGRGSLLTCGDVEENPGPHMTEYKPTVRLATRDDVPRAVRTLAAAFADYPATRHTVDPDRHIERVTELQELFLTRVGLDIGKVWVADDGAAVAVWTTPESVEAGAVFAEIGPRMAELSGSRLAAQQQMEGLLAPHRPKEPAWFLATVGVSPDHQGKGLGSAVVLPGVEAAERAGVPAFLETSAPRNLPFYERLGFTVTADVEVPEGPRTWCMTRKPGA

SEQ ID NO: 2853 - protein, 567 aa, synthetic construct
MALPVTALLLPLALLLHAARPDIQMTQSPSSLSASVGDRVTITCKASDHINNWLAWYQQKPGQAPKLLIYGATTLETGVPSRFSGSGSGTDYTLTISSLQPEDFATYYCQQSWNTPWTFGQGTKLEIKRGGGGSGGGGSGGGGSQVQLQQPGAELVKPGASVKMSCKASGYAFNSYWINWMKQKPGQGLEWIGQIYPGDGDTNYNGKFKGRATLTADTSSSTAYMQLSSLTSEDSAVYFCARSITTVVGCAMDYWGQGTSVTVSSTRARKCYRYRNLEGGSWSHPQFEKDYKDDDDKGSDYKDDDDKGSDYKDDDDKGSDYKDDDDKAWSHPQFEKHHHHHHHHTSGSGEGRGSLLTCGDVEENPGPHMTEYKPTVRLATRDDVPRAVRTLAAAFADYPATRHTVDPDRHIERVTELQELFLTRVGLDIGKVWVADDGAAVAVWTTPESVEAGAVFAEIGPRMAELSGSRLAAQQQMEGLLAPHRPKEPAWFLATVGVSPDHQGKGLGSAVVLPGVEAAERAGVPAFLETSAPRNLPFYERLGFTVTADVEVPEGPRTWCMTRKPGA

SEQ ID NO: 2854 - protein, 567 aa, synthetic construct
MALPVTALLLPLALLLHAARPDIQMTQSPSSLSASVGDRVTITCKASDHINNWLAWYQQKPGQAPKLLIYGATTLETGVPSRFSGSGSGTDYTLTISSLQPEDFATYYCQQSWNTPWTFGQGTKLEIKRGGGGSGGGGSGGGGSQVQLQQPGAELVKPGASVKMSCKASGYAFNSYWINWMKQKPGQGLEWIGQIYPGDGDTNYNGKFKGRATLTADTSSSTAYMQLSSLTSEDSAVYFCARSITTVVGCAMDYWGQGTSVTVSSTRARVCCRYRNLEGGSWSHPQFEKDYKDDDDKGSDYKDDDDKGSDYKDDDDKGSDYKDDDDKAWSHPQFEKHHHHHHHHTSGSGEGRGSLLTCGDVEENPGPHMTEYKPTVRLATRDDVPRAVRTLAAAFADYPATRHTVDPDRHIERVTELQELFLTRVGLDIGKVWVADDGAAVAVWTTPESVEAGAVFAEIGPRMAELSGSRLAAQQQMEGLLAPHRPKEPAWFLATVGVSPDHQGKGLGSAVVLPGVEAAERAGVPAFLETSAPRNLPFYERLGFTVTADVEVPEGPRTWCMTRKPGA

SEQ ID NO: 2855 - protein, 271 aa, synthetic construct
MALPVTALLLPLALLLHAARPDIQMTQSPSSLSASVGDRVTITCKASDHINNWLAWYQQKPGQAPKLLIYGATTLETGVPSRFSGSGSGTDYTLTISSLQPEDFATYYCQQSWNTPWTFGQGTKLEIKRGGGGSGGGGSGGGGSQVQLQQPGAELVKPGASVKMSCKASGYAFNSYWINWMKQKPGQGLEWIGQIYPGDGDTNYNGKFKGRATLTADTSSSTAYMQLSSLTSEDSAVYFCARSITTVVGCAMDYWGQGTSVTVSSTRARRS

SEQ ID NO: 2856 - protein, 567 aa, synthetic construct
MALPVTALLLPLALLLHAARPDIQMTQSPSSLSASVGDRVTITCKASDHINNWLAWYQQKPGQAPKLLIYGATTLETGVPSRFSGSGSGTDYTLTISSLQPEDFATYYCQQSWNTPWTFGQGTKLEIKRGGGGSGGGGSGGGGSQVQLQQPGAELVKPGASVKMSCKASGYAFNSYWINWMKQKPGQGLEWIGQIYPGDGDTNYNGKFKGRATLTADTSSSTAYMQLSSLTSEDSAVYFCARSITTVVGCAMDYWGQGTSVTVSSTRARQLLRYRNLEGGSWSHPQFEKDYKDDDDKGSDYKDDDDKGSDYKDDDDKGSDYKDDDDKAWSHPQFEKHHHHHHHHTSGSGEGRGSLLTCGDVEENPGPHMTEYKPTVRLATRDDVPRAVRTLAAAFADYPATRHTVDPDRHIERVTELQELFLTRVGLDIGKVWVADDGAAVAVWTTPESVEAGAVFAEIGPRMAELSGSRLAAQQQMEGLLAPHRPKEPAWFLATVGVSPDHQGKGLGSAVVLPGVEAAERAGVPAFLETSAPRNLPFYERLGFTVTADVEVPEGPRTWCMTRKPGA

SEQ ID NO: 2857 - protein, 567 aa, synthetic construct
MALPVTALLLPLALLLHAARPDIQMTQSPSSLSASVGDRVTITCKASDHINNWLAWYQQKPGQAPKLLIYGATTLETGVPSRFSGSGSGTDYTLTISSLQPEDFATYYCQQSWNTPWTFGQGTKLEIKRGGGGSGGGGSGGGGSQVQLQQPGAELVKPGASVKMSCKASGYAFNSYWINWMKQKPGQGLEWIGQIYPGDGDTNYNGKFKGRATLTADTSSSTAYMQLSSLTSEDSAVYFCARSITTVVGCAMDYWGQGTSVTVSSTRARKRSRYRNLEGGSWSHPQFEKDYKDDDDKGSDYKDDDDKGSDYKDDDDKGSDYKDDDDKAWSHPQFEKHHHHHHHHTSGSGEGRGSLLTCGDVEENPGPHMTEYKPTVRLATRDDVPRAVRTLAAAFADYPATRHTVDPDRHIERVTELQELFLTRVGLDIGKVWVADDGAAVAVWTTPESVEAGAVFAEIGPRMAELSGSRLAAQQQMEGLLAPHRPKEPAWFLATVGVSPDHQGKGLGSAVVLPGVEAAERAGVPAFLETSAPRNLPFYERLGFTVTADVEVPEGPRTWCMTRKPGA

SEQ ID NO: 2858 - protein, 567 aa, synthetic construct
MALPVTALLLPLALLLHAARPDIQMTQSPSSLSASVGDRVTITCKASDHINNWLAWYQQKPGQAPKLLIYGATTLETGVPSRFSGSGSGTDYTLTISSLQPEDFATYYCQQSWNTPWTFGQGTKLEIKRGGGGSGGGGSGGGGSQVQLQQPGAELVKPGASVKMSCKASGYAFNSYWINWMKQKPGQGLEWIGQIYPGDGDTNYNGKFKGRATLTADTSSSTAYMQLSSLTSEDSAVYFCARSITTVVGCAMDYWGQGTSVTVSSTRARAGSRYRNLEGGSWSHPQFEKDYKDDDDKGSDYKDDDDKGSDYKDDDDKGSDYKDDDDKAWSHPQFEKHHHHHHHHTSGSGEGRGSLLTCGDVEENPGPHMTEYKPTVRLATRDDVPRAVRTLAAAFADYPATRHTVDPDRHIERVTELQELFLTRVGLDIGKVWVADDGAAVAVWTTPESVEAGAVFAEIGPRMAELSGSRLAAQQQMEGLLAPHRPKEPAWFLATVGVSPDHQGKGLGSAVVLPGVEAAERAGVPAFLETSAPRNLPFYERLGFTVTADVEVPEGPRTWCMTRKPGA

SEQ ID NO: 2859 - protein, 567 aa, synthetic construct
MALPVTALLLPLALLLHAARPDIQMTQSPSSLSASVGDRVTITCKASDHINNWLAWYQQKPGQAPKLLIYGATTLETGVPSRFSGSGSGTDYTLTISSLQPEDFATYYCQQSWNTPWTFGQGTKLEIKRGGGGSGGGGSGGGGSQVQLQQPGAELVKPGASVKMSCKASGYAFNSYWINWMKQKPGQGLEWIGQIYPGDGDTNYNGKFKGRATLTADTSSSTAYMQLSSLTSEDSAVYFCARSITTVVGCAMDYWGQGTSVTVSSTRARTKCRYRNLEGGSWSHPQFEKDYKDDDDKGSDYKDDDDKGSDYKDDDDKGSDYKDDDDKAWSHPQFEKHHHHHHHHTSGSGEGRGSLLTCGDVEENPGPHMTEYKPTVRLATRDDVPRAVRTLAAAFADYPATRHTVDPDRHIERVTELQELFLTRVGLDIGKVWVADDGAAVAVWTTPESVEAGAVFAEIGPRMAELSGSRLAAQQQMEGLLAPHRPKEPAWFLATVGVSPDHQGKGLGSAVVLPGVEAAERAGVPAFLETSAPRNLPFYERLGFTVTADVEVPEGPRTWCMTRKPGA

SEQ ID NO: 2860 - protein, 565 aa, synthetic construct
MALPVTALLLPLALLLHAARPDIQMTQSPSSLSASVGDRVTITCKASDHINNWLAWYQQKPGQAPKLLIYGATTLETGVPSRFSGSGSGTDYTLTISSLQPEDFATYYCQQSWNTPWTFGQGTKLEIKRGGGGSGGGGSGGGGSQVQLQQPGAELVKPGASVKMSCKASGYAFNSYWINWMKQKPGQGLEWIGQIYPGDGDTNYNGKFKGRATLTADTSSSTAYMQLSSLTSEDSAVYFCARSITTVVGCAMDYWGQGTSVTVSSTRRSEVRYRLEGGSWSHPQFEKDYKDDDDKGSDYKDDDDKGSDYKDDDDKGSDYKDDDDKAWSHPQFEKHHHHHHHHTSGSGEGRGSLLTCGDVEENPGPHMTEYKPTVRLATRDDVPRAVRTLAAAFADYPATRHTVDPDRHIERVTELQELFLTRVGLDIGKVWVADDGAAVAVWTTPESVEAGAVFAEIGPRMAELSGSRLAAQQQMEGLLAPHRPKEPAWFLATVGVSPDHQGKGLGSAVVLPGVEAAERAGVPAFLETSAPRNLPFYERLGFTVTADVEVPEGPRTWCMTRKPGA

SEQ ID NO: 2861 - protein, 565 aa, synthetic construct; identical to SEQ ID NO: 2794

SEQ ID NO: 2862 - protein, 565 aa, synthetic construct; identical to SEQ ID NO: 2837

SEQ ID NO: 2863 - protein, 565 aa, synthetic construct; identical to SEQ ID NO: 2788

SEQ ID NO: 2864 - protein, 565 aa, synthetic construct
MALPVTALLLPLALLLHAARPDIQMTQSPSSLSASVGDRVTITCKASDHINNWLAWYQQKPGQAPKLLIYGATTLETGVPSRFSGSGSGTDYTLTISSLQPEDFATYYCQQSWNTPWTFGQGTKLEIKRGGGGSGGGGSGGGGSQVQLQQPGAELVKPGASVKMSCKASGYAFNSYWINWMKQKPGQGLEWIGQIYPGDGDTNYNGKFKGRATLTADTSSSTAYMQLSSLTSEDSAVYFCARSITTVVGCAMDYWGQGTSVTVSSTRRSEMRYRLEGGSWSHPQFEKDYKDDDDKGSDYKDDDDKGSDYKDDDDKGSDYKDDDDKAWSHPQFEKHHHHHHHHTSGSGEGRGSLLTCGDVEENPGPHMTEYKPTVRLATRDDVPRAVRTLAAAFADYPATRHTVDPDRHIERVTELQELFLTRVGLDIGKVWVADDGAAVAVWTTPESVEAGAVFAEIGPRMAELSGSRLAAQQQMEGLLAPHRPKEPAWFLATVGVSPDHQGKGLGSAVVLPGVEAAERAGVPAFLETSAPRNLPFYERLGFTVTADVEVPEGPRTWCMTRKPGA

SEQ ID NO: 2865 - protein, 619 aa, synthetic construct
MALPVTALLLPLALLLHAARPDIQMTQSPSSLSASVGDRVTITCKASDHINNWLAWYQQKPGQAPKLLIYGATTLETGVPSRFSGSGSGTDYTLTISSLQPEDFATYYCQQSWNTPWTFGQGTKLEIKRGGGGSGGGGSGGGGSQVQLQQPGAELVKPGASVKMSCKASGYAFNSYWINWMKQKPGQGLEWIGQIYPGDGDTNYNGKFKGRATLTADTSSSTAYMQLSSLTSEDSAVYFCARSITTVVGCAMDYWGQGTSVTVSSTRRSEGRYRNPKGSACKGGGGSELPTQGTFSNVSTNVSPAKPTTTACARSEDRYRNPKGSACKLEGGSWSHPQFEKDYKDDDDKGSDYKDDDDKGSDYKDDDDKGSDYKDDDDKAWSHPQFEKHHHHHHHHTSGSGEGRGSLLTCGDVEENPGPHMTEYKPTVRLATRDDVPRAVRTLAAAFADYPATRHTVDPDRHIERVTELQELFLTRVGLDIGKVWVADDGAAVAVWTTPESVEAGAVFAEIGPRMAELSGSRLAAQQQMEGLLAPHRPKEPAWFLATVGVSPDHQGKGLGSAVVLPGVEAAERAGVPAFLETSAPRNLPFYERLGFTVTADVEVPEGPRTWCMTRKPGA

SEQ ID NO: 2866 - protein, 565 aa, synthetic construct
MALPVTALLLPLALLLHAARPDIQMTQSPSSLSASVGDRVTITCKASDHINNWLAWYQQKPGQAPKLLIYGATTLETGVPSRFSGSGSGTDYTLTISSLQPEDFATYYCQQSWNTPWTFGQGTKLEIKRGGGGSGGGGSGGGGSQVQLQQPGAELVKPGASVKMSCKASGYAFNSYWINWMKQKPGQGLEWIGQIYPGDGDTNYNGKFKGRATLTADTSSSTAYMQLSSLTSEDSAVYFCARSITTVVGCAMDYWGQGTSVTVSSTRRSESRYRLEGGSWSHPQFEKDYKDDDDKGSDYKDDDDKGSDYKDDDDKGSDYKDDDDKAWSHPQFEKHHHHHHHHTSGSGEGRGSLLTCGDVEENPGPHMTEYKPTVRLATRDDVPRAVRTLAAAFADYPATRHTVDPDRHIERVTELQELFLTRVGLDIGKVWVADDGAAVAVWTTPESVEAGAVFAEIGPRMAELSGSRLAAQQQMEGLLAPHRPKEPAWFLATVGVSPDHQGKGLGSAVVLPGVEAAERAGVPAFLETSAPRNLPFYERLGFTVTADVEVPEGPRTWCMTRKPGA

SEQ ID NO: 2867 - protein, 566 aa, synthetic construct
MALPVTALLLPLALLLHAARPDIQMTQSPSSLSASVGDRVTITCKASDHINNWLAWYQQKPGQAPKLLIYGATTLETGVPSRFSGSGSGTDYTLTISSLQPEDFATYYCQQSWNTPWTFGQGTKLEIKRGGGGSGGGGSGGGGSQVQLQQPGAELVKPGASVKMSCKASGYAFNSYWINWMKQKPGQGLEWIGQIYPGDGDTNYNGKFKGRATLTADTSSSTAYMQLSSLTSEDSAVYFCARSITTVVGCAMDYWGQGTSVTVSSTRRPEDRYRNLEGGSWSHPQFEKDYKDDDDKGSDYKDDDDKGSDYKDDDDKGSDYKDDDDKAWSHPQFEKHHHHHHHHTSGSGEGRGSLLTCGDVEENPGPHMTEYKPTVRLATRDDVPRAVRTLAAAFADYPATRHTVDPDRHIERVTELQELFLTRVGLDIGKVWVADDGAAVAVWTTPESVEAGAVFAEIGPRMAELSGSRLAAQQQMEGLLAPHRPKEPAWFLATVGVSPDHQGKGLGSAVVLPGVEAAERAGVPAFLETSAPRNLPFYERLGFTVTADVEVPEGPRTWCMTRKPGA

SEQ ID NO: 2868 - protein, 566 aa, synthetic construct; identical to SEQ ID NO: 2797

SEQ ID NO: 2869 - protein, 566 aa, synthetic construct
MALPVTALLLPLALLLHAARPDIQMTQSPSSLSASVGDRVTITCKASDHINNWLAWYQQKPGQAPKLLIYGATTLETGVPSRFSGSGSGTDYTLTISSLQPEDFATYYCQQSWNTPWTFGQGTKLEIKRGGGGSGGGGSGGGGSQVQLQQPGAELVKPGASVKMSCKASGYAFNSYWINWMKQKPGQGLEWIGQIYPGDGDTNYNGKFKGRATLTADTSSSTAYMQLSSLTSEDSAVYFCARSITTVVGCAMDYWGQGTSVTVSSTRRIEDRYRNLEGGSWSHPQFEKDYKDDDDKGSDYKDDDDKGSDYKDDDDKGSDYKDDDDKAWSHPQFEKHHHHHHHHTSGSGEGRGSLLTCGDVEENPGPHMTEYKPTVRLATRDDVPRAVRTLAAAFADYPATRHTVDPDRHIERVTELQELFLTRVGLDIGKVWVADDGAAVAVWTTPESVEAGAVFAEIGPRMAELSGSRLAAQQQMEGLLAPHRPKEPAWFLATVGVSPDHQGKGLGSAVVLPGVEAAERAGVPAFLETSAPRNLPFYERLGFTVTADVEVPEGPRTWCMTRKPGA

SEQ ID NO: 2870 - protein, 566 aa, synthetic construct; identical to SEQ ID NO: 2798

SEQ ID NO: 2871 - protein, 566 aa, synthetic construct; identical to SEQ ID NO: 2842

SEQ ID NO: 2872 - protein, 566 aa, synthetic construct; identical to SEQ ID NO: 2796

SEQ ID NO: 2873 - protein, 268 aa, synthetic construct; identical to SEQ ID NO: 2781

SEQ ID NO: 2874 - protein, 566 aa, synthetic construct
MALPVTALLLPLALLLHAARPDIQMTQSPSSLSASVGDRVTITCKASDHINNWLAWYQQKPGQAPKLLIYGATTLETGVPSRFSGSGSGTDYTLTISSLQPEDFATYYCQQSWNTPWTFGQGTKLEIKRGGGGSGGGGSGGGGSQVQLQQPGAELVKPGASVKMSCKASGYAFNSYWINWMKQKPGQGLEWIGQIYPGDGDTNYNGKFKGRATLTADTSSSTAYMQLSSLTSEDSAVYFCARSITTVVGCAMDYWGQGTSVTVSSTRRTEDRYRNLEGGSWSHPQFEKDYKDDDDKGSDYKDDDDKGSDYKDDDDKGSDYKDDDDKAWSHPQFEKHHHHHHHHTSGSGEGRGSLLTCGDVEENPGPHMTEYKPTVRLATRDDVPRAVRTLAAAFADYPATRHTVDPDRHIERVTELQELFLTRVGLDIGKVWVADDGAAVAVWTTPESVEAGAVFAEIGPRMAELSGSRLAAQQQMEGLLAPHRPKEPAWFLATVGVSPDHQGKGLGSAVVLPGVEAAERAGVPAFLETSAPRNLPFYERLGFTVTADVEVPEGPRTWCMTRKPGA

SEQ ID NO: 2875 - protein, 567 aa, synthetic construct; identical to SEQ ID NO: 2807

SEQ ID NO: 2876 - protein, 567 aa, synthetic construct; identical to SEQ ID NO: 2807

SEQ ID NO: 2877 - protein, 567 aa, synthetic construct; identical to SEQ ID NO: 2805

SEQ ID NO: 2878 - protein, 567 aa, synthetic construct; identical to SEQ ID NO: 2755

SEQ ID NO: 2879 - protein, 567 aa, synthetic construct; identical to SEQ ID NO: 2802

SEQ ID NO: 2880 - protein, 567 aa, synthetic construct; identical to SEQ ID NO: 2760

SEQ ID NO: 2881 - protein, 567 aa, synthetic construct; identical to SEQ ID NO: 2645

SEQ ID NO: 2882 - protein, 567 aa, synthetic construct; identical to SEQ ID NO: 2807

SEQ ID NO: 2883 - protein, 566 aa, synthetic construct; identical to SEQ ID NO: 2764

SEQ ID NO: 2884 - protein, 566 aa, synthetic construct
MALPVTALLLPLALLLHAARPDIQMTQSPSSLSASVGDRVTITCKASDHINNWLAWYQQKPGQAPKLLIYGATTLETGVPSRFSGSGSGTDYTLTISSLQPEDFATYYCQQSWNTPWTFGQGTKLEIKRGGGGSGGGGSGGGGSQVQLQQPGAELVKPGASVKMSCKASGYAFNSYWINWMKQKPGQGLEWIGQIYPGDGDTNYNGKFKGRATLTADTSSSTAYMQLSSLTSEDSAVYFCARSITTVVGCAMDYWGQGTSVTVSSTRRSVDRYRNLEGGSWSHPQFEKDYKDDDDKGSDYKDDDDKGSDYKDDDDKGSDYKDDDDKAWSHPQFEKHHHHHHHHTSGSGEGRGSLLTCGDVEENPGPHMTEYKPTVRLATRDDVPRAVRTLAAAFADYPATRHTVDPDRHIERVTELQELFLTRVGLDIGKVWVADDGAAVAVWTTPESVEAGAVFAEIGPRMAELSGSRLAAQQQMEGLLAPHRPKEPAWFLATVGVSPDHQGKGLGSAVVLPGVEAAERAGVPAFLETSAPRNLPFYERLGFTVTADVEVPEGPRTWCMTRKPGA

SEQ ID NO: 2885 - protein, 566 aa, synthetic construct
MALPVTALLLPLALLLHAARPDIQMTQSPSSLSASVGDRVTITCKASDHINNWLAWYQQKPGQAPKLLIYGATTLETGVPSRFSGSGSGTDYTLTISSLQPEDFATYYCQQSWNTPWTFGQGTKLEIKRGGGGSGGGGSGGGGSQVQLQQPGAELVKPGASVKMSCKASGYAFNSYWINWMKQKPGQGLEWIGQIYPGDGDTNYNGKFKGRATLTADTSSSTAYMQLSSLTSEDSAVYFCARSITTVVGCAMDYWGQGTSVTVSSTRRSHDRYRNLEGGSWSHPQFEKDYKDDDDKGSDYKDDDDKGSDYKDDDDKGSDYKDDDDKAWSHPQFEKHHHHHHHHTSGSGEGRGSLLTCGDVEENPGPHMTEYKPTVRLATRDDVPRAVRTLAAAFADYPATRHTVDPDRHIERVTELQELFLTRVGLDIGKVWVADDGAAVAVWTTPESVEAGAVFAEIGPRMAELSGSRLAAQQQMEGLLAPHRPKEPAWFLATVGVSPDHQGKGLGSAVVLPGVEAAERAGVPAFLETSAPRNLPFYERLGFTVTADVEVPEGPRTWCMTRKPGA

SEQ ID NO: 2886 - protein, 566 aa, synthetic construct; identical to SEQ ID NO: 2740

SEQ ID NO: 2887 - protein, 566 aa, synthetic construct; identical to SEQ ID NO: 2795

SEQ ID NO: 2888 - protein, 566 aa, synthetic construct; identical to SEQ ID NO: 2774

SEQ ID NO: 2889 - protein, 566 aa, synthetic construct
MALPVTALLLPLALLLHAARPDIQMTQSPSSLSASVGDRVTITCKASDHINNWLAWYQQKPGQAPKLLIYGATTLETGVPSRFSGSGSGTDYTLTISSLQPEDFATYYCQQSWNTPWTFGQGTKLEIKRGGGGSGGGGSGGGGSQVQLQQPGAELVKPGASVKMSCKASGYAFNSYWINWMKQKPGQGLEWIGQIYPGDGDTNYNGKFKGRATLTADTSSSTAYMQLSSLTSEDSAVYFCARSITTVVGCAMDYWGQGTSVTVSSTRRSEARYRNLEGGSWSHPQFEKDYKDDDDKGSDYKDDDDKGSDYKDDDDKGSDYKDDDDKAWSHPQFEKHHHHHHHHTSGSGEGRGSLLTCGDVEENPGPHMTEYKPTVRLATRDDVPRAVRTLAAAFADYPATRHTVDPDRHIERVTELQELFLTRVGLDIGKVWVADDGAAVAVWTTPESVEAGAVFAEIGPRMAELSGSRLAAQQQMEGLLAPHRPKEPAWFLATVGVSPDHQGKGLGSAVVLPGVEAAERAGVPAFLETSAPRNLPFYERLGFTVTADVEVPEGPRTWCMTRKPGA

SEQ ID NO: 2890 - protein, 566 aa, synthetic construct; identical to SEQ ID NO: 2818

SEQ ID NO: 2891 - protein, 566 aa, synthetic construct
MALPVTALLLPLALLLHAARPDIQMTQSPSSLSASVGDRVTITCKASDHINNWLAWYQQKPGQAPKLLIYGATTLETGVPSRFSGSGSGTDYTLTISSLQPEDFATYYCQQSWNTPWTFGQGTKLEIKRGGGGSGGGGSGGGGSQVQLQQPGAELVKPGASVKMSCKASGYAFNSYWINWMKQKPGQGLEWIGQIYPGDGDTNYNGKFKGRATLTADTSSSTAYMQLSSLTSEDSAVYFCARSITTVVGCAMDYWGQGTSVTVSSTRRSEFRYRNLEGGSWSHPQFEKDYKDDDDKGSDYKDDDDKGSDYKDDDDKGSDYKDDDDKAWSHPQFEKHHHHHHHHTSGSGEGRGSLLTCGDVEENPGPHMTEYKPTVRLATRDDVPRAVRTLAAAFADYPATRHTVDPDRHIERVTELQELFLTRVGLDIGKVWVADDGAAVAVWTTPESVEAGAVFAEIGPRMAELSGSRLAAQQQMEGLLAPHRPKEPAWFLATVGVSPDHQGKGLGSAVVLPGVEAAERAGVPAFLETSAPRNLPFYERLGFTVTADVEVPEGPRTWCMTRKPGA

SEQ ID NO: 2892 - protein, 566 aa, synthetic construct; identical to SEQ ID NO: 2774

SEQ ID NO: 2893 - protein, 565 aa, synthetic construct; identical to SEQ ID NO: 2825

SEQ ID NO: 2894 - protein, 565 aa, synthetic construct; identical to SEQ ID NO: 2746

SEQ ID NO: 2895 - protein, 565 aa, synthetic construct; identical to SEQ ID NO: 2825

SEQ ID NO: 2896 - protein, 565 aa, synthetic construct
MALPVTALLLPLALLLHAARPDIQMTQSPSSLSASVGDRVTITCKASDHINNWLAWYQQKPGQAPKLLIYGATTLETGVPSRFSGSGSGTDYTLTISSLQPEDFATYYCQQSWNTPWTFGQGTKLEIKRGGGGSGGGGSGGGGSQVQLQQPGAELVKPGASVKMSCKASGYAFNSYWINWMKQKPGQGLEWIGQIYPGDGDTNYNGKFKGRATLTADTSSSTAYMQLSSLTSEDSAVYFCARSITTVVGCAMDYWGQGTSVTVSSTRRCEDRYRLEGGSWSHPQFEKDYKDDDDKGSDYKDDDDKGSDYKDDDDKGSDYKDDDDKAWSHPQFEKHHHHHHHHTSGSGEGRGSLLTCGDVEENPGPHMTEYKPTVRLATRDDVPRAVRTLAAAFADYPATRHTVDPDRHIERVTELQELFLTRVGLDIGKVWVADDGAAVAVWTTPESVEAGAVFAEIGPRMAELSGSRLAAQQQMEGLLAPHRPKEPAWFLATVGVSPDHQGKGLGSAVVLPGVEAAERAGVPAFLETSAPRNLPFYERLGFTVTADVEVPEGPRTWCMTRKPGA

SEQ ID NO: 2897 - protein, 565 aa, synthetic construct
MALPVTALLLPLALLLHAARPDIQMTQSPSSLSASVGDRVTITCKASDHINNWLAWYQQKPGQAPKLLIYGATTLETGVPSRFSGSGSGTDYTLTISSLQPEDFATYYCQQSWNTPWTFGQGTKLEIKRGGGGSGGGGSGGGGSQVQLQQPGAELVKPGASVKMSCKASGYAFNSYWINWMKQKPGQGLEWIGQIYPGDGDTNYNGKFKGRATLTADTSSSTAYMQLSSLTSEDSAVYFCARSITTVVGCAMDYWGQGTSVTVSSTRRFEDRYRLEGGSWSHPQFEKDYKDDDDKGSDYKDDDDKGSDYKDDDDKGSDYKDDDDKAWSHPQFEKHHHHHHHHTSGSGEGRGSLLTCGDVEENPGPHMTEYKPTVRLATRDDVPRAVRTLAAAFADYPATRHTVDPDRHIERVTELQELFLTRVGLDIGKVWVADDGAAVAVWTTPESVEAGAVFAEIGPRMAELSGSRLAAQQQMEGLLAPHRPKEPAWFLATVGVSPDHQGKGLGSAVVLPGVEAAERAGVPAFLETSAPRNLPFYERLGFTVTADVEVPEGPRTWCMTRKPGA

SEQ ID NO: 2898 - protein, 565 aa, synthetic construct; identical to SEQ ID NO: 2746

SEQ ID NO: 2899 - protein, 565 aa, synthetic construct; identical to SEQ ID NO: 2782

SEQ ID NO: 2900 - protein, 565 aa, synthetic construct; identical to SEQ ID NO: 2782

SEQ ID NO: 2901 - protein, 565 aa, synthetic construct; identical to SEQ ID NO: 2747

SEQ ID NO: 2902 - protein, 565 aa, synthetic construct; identical to SEQ ID NO: 2784

SEQ ID NO: 2903 - protein, 565 aa, synthetic construct; identical to SEQ ID NO: 2784

SEQ ID NO: 2904 - protein, 565 aa, synthetic construct; identical to SEQ ID NO: 2783

SEQ ID NO: 2905 - protein, 565 aa, synthetic construct; identical to SEQ ID NO: 2828

SEQ ID NO: 2906 - protein, 567 aa, synthetic construct; identical to SEQ ID NO: 2755

SEQ ID NO: 2907 - protein, 567 aa, synthetic construct; identical to SEQ ID NO: 2645

SEQ ID NO: 2908 - protein, 567 aa, synthetic construct; identical to SEQ ID NO: 2754

SEQ ID NO: 2909 - protein, 567 aa, synthetic construct; identical to SEQ ID NO: 2807

SEQ ID NO: 2910 - protein, 567 aa, synthetic construct; identical to SEQ ID NO: 2754

SEQ ID NO: 2911 - protein, 566 aa, synthetic construct; identical to SEQ ID NO: 2809

SEQ ID NO: 2912 - protein, 566 aa, synthetic construct; identical to SEQ ID NO: 2740

SEQ ID NO: 2913 - protein, 566 aa, synthetic construct
MALPVTALLLPLALLLHAARPDIQMTQSPSSLSASVGDRVTITCKASDHINNWLAWYQQKPGQAPKLLIYGATTLETGVPSRFSGSGSGTDYTLTISSLQPEDFATYYCQQSWNTPWTFGQGTKLEIKRGGGGSGGGGSGGGGSQVQLQQPGAELVKPGASVKMSCKASGYAFNSYWINWMKQKPGQGLEWIGQIYPGDGDTNYNGKFKGRATLTADTSSSTAYMQLSSLTSEDSAVYFCARSITTVVGCAMDYWGQGTSVTVSSTRRSCDRYRNLEGGSWSHPQFEKDYKDDDDKGSDYKDDDDKGSDYKDDDDKGSDYKDDDDKAWSHPQFEKHHHHHHHHTSGSGEGRGSLLTCGDVEENPGPHMTEYKPTVRLATRDDVPRAVRTLAAAFADYPATRHTVDPDRHIERVTELQELFLTRVGLDIGKVWVADDGAAVAVWTTPESVEAGAVFAEIGPRMAELSGSRLAAQQQMEGLLAPHRPKEPAWFLATVGVSPDHQGKGLGSAVVLPGVEAAERAGVPAFLETSAPRNLPFYERLGFTVTADVEVPEGPRTWCMTRKPGA

SEQ ID NO: 2914 - protein, 566 aa, synthetic construct; identical to SEQ ID NO: 2813

SEQ ID NO: 2915 - protein, 566 aa, synthetic construct; identical to SEQ ID NO: 2809

SEQ ID NO: 2916 - protein, 566 aa, synthetic construct; identical to SEQ ID NO: 2766

SEQ ID NO: 2917 - protein, 566 aa, synthetic construct; identical to SEQ ID NO: 2813

SEQ ID NO: 2918 - protein, 566 aa, synthetic construct; identical to SEQ ID NO: 2665

SEQ ID NO: 2919 - protein, 566 aa, synthetic construct; identical to SEQ ID NO: 2771

SEQ ID NO: 2920 - protein, 566 aa, synthetic construct
MALPVTALLLPLALLLHAARPDIQMTQSPSSLSASVGDRVTITCKASDHINNWLAWYQQKPGQAPKLLIYGATTLETGVPSRFSGSGSGTDYTLTISSLQPEDFATYYCQQSWNTPWTFGQGTKLEIKRGGGGSGGGGSGGGGSQVQLQQPGAELVKPGASVKMSCKASGYAFNSYWINWMKQKPGQGLEWIGQIYPGDGDTNYNGKFKGRATLTADTSSSTAYMQLSSLTSEDSAVYFCARSITTVVGCAMDYWGQGTSVTVSSTRRSEIRYRNLEGGSWSHPQFEKDYKDDDDKGSDYKDDDDKGSDYKDDDDKGSDYKDDDDKAWSHPQFEKHHHHHHHHTSGSGEGRGSLLTCGDVEENPGPHMTEYKPTVRLATRDDVPRAVRTLAAAFADYPATRHTVDPDRHIERVTELQELFLTRVGLDIGKVWVADDGAAVAVWTTPESVEAGAVFAEIGPRMAELSGSRLAAQQQMEGLLAPHRPKEPAWFLATVGVSPDHQGKGLGSAVVLPGVEAAERAGVPAFLETSAPRNLPFYERLGFTVTADVEVPEGPRTWCMTRKPGA

SEQ ID NO: 2921 - protein, 566 aa, synthetic construct; identical to SEQ ID NO: 2795

SEQ ID NO: 2922 - protein, 566 aa, synthetic construct
MALPVTALLLPLALLLHAARPDIQMTQSPSSLSASVGDRVTITCKASDHINNWLAWYQQKPGQAPKLLIYGATTLETGVPSRFSGSGSGTDYTLTISSLQPEDFATYYCQQSWNTPWTFGQGTKLEIKRGGGGSGGGGSGGGGSQVQLQQPGAELVKPGASVKMSCKASGYAFNSYWINWMKQKPGQGLEWIGQIYPGDGDTNYNGKFKGRATLTADTSSSTAYMQLSSLTSEDSAVYFCARSITTVVGCAMDYWGQGTSVTVSSTRRSEQRYRNLEGGSWSHPQFEKDYKDDDDKGSDYKDDDDKGSDYKDDDDKGSDYKDDDDKAWSHPQFEKHHHHHHHHTSGSGEGRGSLLTCGDVEENPGPHMTEYKPTVRLATRDDVPRAVRTLAAAFADYPATRHTVDPDRHIERVTELQELFLTRVGLDIGKVWVADDGAAVAVWTTPESVEAGAVFAEIGPRMAELSGSRLAAQQQMEGLLAPHRPKEPAWFLATVGVSPDHQGKGLGSAVVLPGVEAAERAGVPAFLETSAPRNLPFYERLGFTVTADVEVPEGPRTWCMTRKPGA

SEQ ID NO: 2923 - protein, 566 aa, synthetic construct; identical to SEQ ID NO: 2889

SEQ ID NO: 2924 - protein, 566 aa, synthetic construct; identical to SEQ ID NO: 2889

SEQ ID NO: 2925 - protein, 565 aa, synthetic construct; identical to SEQ ID NO: 2745

SEQ ID NO: 2926 - protein, 565 aa, synthetic construct
MALPVTALLLPLALLLHAARPDIQMTQSPSSLSASVGDRVTITCKASDHINNWLAWYQQKPGQAPKLLIYGATTLETGVPSRFSGSGSGTDYTLTISSLQPEDFATYYCQQSWNTPWTFGQGTKLEIKRGGGGSGGGGSGGGGSQVQLQQPGAELVKPGASVKMSCKASGYAFNSYWINWMKQKPGQGLEWIGQIYPGDGDTNYNGKFKGRATLTADTSSSTAYMQLSSLTSEDSAVYFCARSITTVVGCAMDYWGQGTSVTVSSTRRAEDRYRLEGGSWSHPQFEKDYKDDDDKGSDYKDDDDKGSDYKDDDDKGSDYKDDDDKAWSHPQFEKHHHHHHHHTSGSGEGRGSLLTCGDVEENPGPHMTEYKPTVRLATRDDVPRAVRTLAAAFADYPATRHTVDPDRHIERVTELQELFLTRVGLDIGKVWVADDGAAVAVWTTPESVEAGAVFAEIGPRMAELSGSRLAAQQQMEGLLAPHRPKEPAWFLATVGVSPDHQGKGLGSAVVLPGVEAAERAGVPAFLETSAPRNLPFYERLGFTVTADVEVPEGPRTWCMTRKPGA

SEQ ID NO: 2927 - protein, 565 aa, synthetic construct; identical to SEQ ID NO: 2749

SEQ ID NO: 2928 - protein, 565 aa, synthetic construct; identical to SEQ ID NO: 2897

SEQ ID NO: 2929 - protein, 565 aa, synthetic construct
MALPVTALLLPLALLLHAARPDIQMTQSPSSLSASVGDRVTITCKASDHINNWLAWYQQKPGQAPKLLIYGATTLETGVPSRFSGSGSGTDYTLTISSLQPEDFATYYCQQSWNTPWTFGQGTKLEIKRGGGGSGGGGSGGGGSQVQLQQPGAELVKPGASVKMSCKASGYAFNSYWINWMKQKPGQGLEWIGQIYPGDGDTNYNGKFKGRATLTADTSSSTAYMQLSSLTSEDSAVYFCARSITTVVGCAMDYWGQGTSVTVSSTRRHEDRYRLEGGSWSHPQFEKDYKDDDDKGSDYKDDDDKGSDYKDDDDKGSDYKDDDDKAWSHPQFEKHHHHHHHHTSGSGEGRGSLLTCGDVEENPGPHMTEYKPTVRLATRDDVPRAVRTLAAAFADYPATRHTVDPDRHIERVTELQELFLTRVGLDIGKVWVADDGAAVAVWTTPESVEAGAVFAEIGPRMAELSGSRLAAQQQMEGLLAPHRPKEPAWFLATVGVSPDHQGKGLGSAVVLPGVEAAERAGVPAFLETSAPRNLPFYERLGFTVTADVEVPEGPRTWCMTRKPGA

SEQ ID NO: 2930 - protein, 565 aa, synthetic construct; identical to SEQ ID NO: 2745

SEQ ID NO: 2931 - protein, 565 aa, synthetic construct; identical to SEQ ID NO: 2746

SEQ ID NO: 2932 - protein, 565 aa, synthetic construct; identical to SEQ ID NO: 2929

SEQ ID NO: 2933 - protein, 565 aa, synthetic construct; identical to SEQ ID NO: 2745

SEQ ID NO: 2934 - protein, 565 aa, synthetic construct; identical to SEQ ID NO: 2747

SEQ ID NO: 2935 - protein, 565 aa, synthetic construct; identical to SEQ ID NO: 2827

SEQ ID NO: 2936 - protein, 565 aa, synthetic construct; identical to SEQ ID NO: 2748

SEQ ID NO: 2937 - protein, 565 aa, synthetic construct
MALPVTALLLPLALLLHAARPDIQMTQSPSSLSASVGDRVTITCKASDHINNWLAWYQQKPGQAPKLLIYGATTLETGVPSRFSGSGSGTDYTLTISSLQPEDFATYYCQQSWNTPWTFGQGTKLEIKRGGGGSGGGGSGGGGSQVQLQQPGAELVKPGASVKMSCKASGYAFNSYWINWMKQKPGQGLEWIGQIYPGDGDTNYNGKFKGRATLTADTSSSTAYMQLSSLTSEDSAVYFCARSITTVVGCAMDYWGQGTSVTVSSTRRSTDRYRLEGGSWSHPQFEKDYKDDDDKGSDYKDDDDKGSDYKDDDDKGSDYKDDDDKAWSHPQFEKHHHHHHHHTSGSGEGRGSLLTCGDVEENPGPHMTEYKPTVRLATRDDVPRAVRTLAAAFADYPATRHTVDPDRHIERVTELQELFLTRVGLDIGKVWVADDGAAVAVWTTPESVEAGAVFAEIGPRMAELSGSRLAAQQQMEGLLAPHRPKEPAWFLATVGVSPDHQGKGLGSAVVLPGVEAAERAGVPAFLETSAPRNLPFYERLGFTVTADVEVPEGPRTWCMTRKPGA

SEQ ID NO: 2938 - protein, 565 aa, synthetic construct; identical to SEQ ID NO: 2827

SEQ ID NO: 2939 - protein, 565 aa, synthetic construct; identical to SEQ ID NO: 2937

SEQ ID NO: 2940 - protein, 565 aa, synthetic construct; identical to SEQ ID NO: 2748

SEQ ID NO: 2941 - protein, 565 aa, synthetic construct; identical to SEQ ID NO: 2788

SEQ ID NO: 2942 - protein, 565 aa, synthetic construct; identical to SEQ ID NO: 2860

SEQ ID NO: 2943 - protein, 565 aa, synthetic construct
MALPVTALLLPLALLLHAARPDIQMTQSPSSLSASVGDRVTITCKASDHINNWLAWYQQKPGQAPKLLIYGATTLETGVPSRFSGSGSGTDYTLTISSLQPEDFATYYCQQSWNTPWTFGQGTKLEIKRGGGGSGGGGSGGGGSQVQLQQPGAELVKPGASVKMSCKASGYAFNSYWINWMKQKPGQGLEWIGQIYPGDGDTNYNGKFKGRATLTADTSSSTAYMQLSSLTSEDSAVYFCARSITTVVGCAMDYWGQGTSVTVSSTRRSEPRYRLEGGSWSHPQFEKDYKDDDDKGSDYKDDDDKGSDYKDDDDKGSDYKDDDDKAWSHPQFEKHHHHHHHHTSGSGEGRGSLLTCGDVEENPGPHMTEYKPTVRLATRDDVPRAVRTLAAAFADYPATRHTVDPDRHIERVTELQELFLTRVGLDIGKVWVADDGAAVAVWTTPESVEAGAVFAEIGPRMAELSGSRLAAQQQMEGLLAPHRPKEPAWFLATVGVSPDHQGKGLGSAVVLPGVEAAERAGVPAFLETSAPRNLPFYERLGFTVTADVEVPEGPRTWCMTRKPGA

SEQ ID NO: 2944 - protein, 565 aa, synthetic construct; identical to SEQ ID NO: 2794

SEQ ID NO: 2945 - protein, 565 aa, synthetic construct
MALPVTALLLPLALLLHAARPDIQMTQSPSSLSASVGDRVTITCKASDHINNWLAWYQQKPGQAPKLLIYGATTLETGVPSRFSGSGSGTDYTLTISSLQPEDFATYYCQQSWNTPWTFGQGTKLEIKRGGGGSGGGGSGGGGSQVQLQQPGAELVKPGASVKMSCKASGYAFNSYWINWMKQKPGQGLEWIGQIYPGDGDTNYNGKFKGRATLTADTSSSTAYMQLSSLTSEDSAVYFCARSITTVVGCAMDYWGQGTSVTVSSTRRSEIRYRLEGGSWSHPQFEKDYKDDDDKGSDYKDDDDKGSDYKDDDDKGSDYKDDDDKAWSHPQFEKHHHHHHHHTSGSGEGRGSLLTCGDVEENPGPHMTEYKPTVRLATRDDVPRAVRTLAAAFADYPATRHTVDPDRHIERVTELQELFLTRVGLDIGKVWVADDGAAVAVWTTPESVEAGAVFAEIGPRMAELSGSRLAAQQQMEGLLAPHRPKEPAWFLATVGVSPDHQGKGLGSAVVLPGVEAAERAGVPAFLETSAPRNLPFYERLGFTVTADVEVPEGPRTWCMTRKPGA

SEQ ID NO: 2946 - protein, 565 aa, synthetic construct; identical to SEQ ID NO: 2794

SEQ ID NO: 2947 - protein, 566 aa, synthetic construct; identical to SEQ ID NO: 2796

SEQ ID NO: 2948 - protein, 566 aa, synthetic construct; identical to SEQ ID NO: 2839

SEQ ID NO: 2949 - protein, 566 aa, synthetic construct; identical to SEQ ID NO: 2874

SEQ ID NO: 2950 - protein, 566 aa, synthetic construct; identical to SEQ ID NO: 2796

SEQ ID NO: 2951 - protein, 565 aa, synthetic construct; identical to SEQ ID NO: 2860

SEQ ID NO: 2952 - protein, 565 aa, synthetic construct; identical to SEQ ID NO: 2793

SEQ ID NO: 2953 - protein, 565 aa, synthetic construct; identical to SEQ ID NO: 2860

SEQ ID NO: 2954 - protein, 566 aa, synthetic construct; identical to SEQ ID NO: 2867

SEQ ID NO: 2955 - protein, 566 aa, synthetic construct
MALPVTALLLPLALLLHAARPDIQMTQSPSSLSASVGDRVTITCKASDHINNWLAWYQQKPGQAPKLLIYGATTLETGVPSRFSGSGSGTDYTLTISSLQPEDFATYYCQQSWNTPWTFGQGTKLEIKRGGGGSGGGGSGGGGSQVQLQQPGAELVKPGASVKMSCKASGYAFNSYWINWMKQKPGQGLEWIGQIYPGDGDTNYNGKFKGRATLTADTSSSTAYMQLSSLTSEDSAVYFCARSITTVVGCAMDYWGQGTSVTVSSTRRYEDRYRNLEGGSWSHPQFEKDYKDDDDKGSDYKDDDDKGSDYKDDDDKGSDYKDDDDKAWSHPQFEKHHHHHHHHTSGSGEGRGSLLTCGDVEENPGPHMTEYKPTVRLATRDDVPRAVRTLAAAFADYPATRHTVDPDRHIERVTELQELFLTRVGLDIGKVWVADDGAAVAVWTTPESVEAGAVFAEIGPRMAELSGSRLAAQQQMEGLLAPHRPKEPAWFLATVGVSPDHQGKGLGSAVVLPGVEAAERAGVPAFLETSAPRNLPFYERLGFTVTADVEVPEGPRTWCMTRKPGA

SEQ ID NO: 2956 - protein, 566 aa, synthetic construct; identical to SEQ ID NO: 2874

SEQ ID NO: 2957 - protein, 566 aa, synthetic construct; identical to SEQ ID NO: 2796

SEQ ID NO: 2958 - protein, 566 aa, synthetic construct; identical to SEQ ID NO: 2796

SEQ ID NO: 2959 - protein, 566 aa, synthetic construct; identical to SEQ ID NO: 2797

SEQ ID NO: 2960 - protein, 565 aa, synthetic construct
MALPVTALLLPLALLLHAARPDIQMTQSPSSLSASVGDRVTITCKASDHINNWLAWYQQKPGQAPKLLIYGATTLETGVPSRFSGSGSGTDYTLTISSLQPEDFATYYCQQSWNTPWTFGQGTKLEIKRGGGGSGGGGSGGGGSQVQLQQPGAELVKPGASVKMSCKASGYAFNSYWINWMKQKPGQGLEWIGQIYPGDGDTNYNGKFKGRATLTADTSSSTAYMQLSSLTSEDSAVYFCARSITTVVGCAMDYWGQGTSVTVSSTRRQEDRYRLEGGSWSHPQFEKDYKDDDDKGSDYKDDDDKGSDYKDDDDKGSDYKDDDDKAWSHPQFEKHHHHHHHHTSGSGEGRGSLLTCGDVEENPGPHMTEYKPTVRLATRDDVPRAVRTLAAAFADYPATRHTVDPDRHIERVTELQELFLTRVGLDIGKVWVADDGAAVAVWTTPESVEAGAVFAEIGPRMAELSGSRLAAQQQMEGLLAPHRPKEPAWFLATVGVSPDHQGKGLGSAVVLPGVEAAERAGVPAFLETSAPRNLPFYERLGFTVTADVEVPEGPRTWCMTRKPGA

SEQ ID NO: 2961 - protein, 565 aa, synthetic construct
MALPVTALLLPLALLLHAARPDIQMTQSPSSLSASVGDRVTITCKASDHINNWLAWYQQKPGQAPKLLIYGATTLETGVPSRFSGSGSGTDYTLTISSLQPEDFATYYCQQSWNTPWTFGQGTKLEIKRGGGGSGGGGSGGGGSQVQLQQPGAELVKPGASVKMSCKASGYAFNSYWINWMKQKPGQGLEWIGQIYPGDGDTNYNGKFKGRATLTADTSSSTAYMQLSSLTSEDSAVYFCARSITTVVGCAMDYWGQGTSVTVSSTRRSDERYRLEGGSWSHPQFEKDYKDDDDKGSDYKDDDDKGSDYKDDDDKGSDYKDDDDKAWSHPQFEKHHHHHHHHTSGSGEGRGSLLTCGDVEENPGPHMTEYKPTVRLATRDDVPRAVRTLAAAFADYPATRHTVDPDRHIERVTELQELFLTRVGLDIGKVWVADDGAAVAVWTTPESVEAGAVFAEIGPRMAELSGSRLAAQQQMEGLLAPHRPKEPAWFLATVGVSPDHQGKGLGSAVVLPGVEAAERAGVPAFLETSAPRNLPFYERLGFTVTADVEVPEGPRTWCMTRKPGA

SEQ ID NO: 2962 - protein, 565 aa, synthetic construct
MALPVTALLLPLALLLHAARPDIQMTQSPSSLSASVGDRVTITCKASDHINNWLAWYQQKPGQAPKLLIYGATTLETGVPSRFSGSGSGTDYTLTISSLQPEDFATYYCQQSWNTPWTFGQGTKLEIKRGGGGSGGGGSGGGGSQVQLQQPGAELVKPGASVKMSCKASGYAFNSYWINWMKQKPGQGLEWIGQIYPGDGDTNYNGKFKGRATLTADTSSSTAYMQLSSLTSEDSAVYFCARSITTVVGCAMDYWGQGTSVTVSSTRRSEERYRLEGGSWSHPQFEKDYKDDDDKGSDYKDDDDKGSDYKDDDDKGSDYKDDDDKAWSHPQFEKHHHHHHHHTSGSGEGRGSLLTCGDVEENPGPHMTEYKPTVRLATRDDVPRAVRTLAAAFADYPATRHTVDPDRHIERVTELQELFLTRVGLDIGKVWVADDGAAVAVWTTPESVEAGAVFAEIGPRMAELSGSRLAAQQQMEGLLAPHRPKEPAWFLATVGVSPDHQGKGLGSAVVLPGVEAAERAGVPAFLETSAPRNLPFYERLGFTVTADVEVPEGPRTWCMTRKPGA

SEQ ID NO: 2963 - protein, 565 aa, synthetic construct
MALPVTALLLPLALLLHAARPDIQMTQSPSSLSASVGDRVTITCKASDHINNWLAWYQQKPGQAPKLLIYGATTLETGVPSRFSGSGSGTDYTLTISSLQPEDFATYYCQQSWNTPWTFGQGTKLEIKRGGGGSGGGGSGGGGSQVQLQQPGAELVKPGASVKMSCKASGYAFNSYWINWMKQKPGQGLEWIGQIYPGDGDTNYNGKFKGRATLTADTSSSTAYMQLSSLTSEDSAVYFCARSITTVVGCAMDYWGQGTSVTVSSTRRSDDRYRLEGGSWSHPQFEKDYKDDDDKGSDYKDDDDKGSDYKDDDDKGSDYKDDDDKAWSHPQFEKHHHHHHHHTSGSGEGRGSLLTCGDVEENPGPHMTEYKPTVRLATRDDVPRAVRTLAAAFADYPATRHTVDPDRHIERVTELQELFLTRVGLDIGKVWVADDGAAVAVWTTPESVEAGAVFAEIGPRMAELSGSRLAAQQQMEGLLAPHRPKEPAWFLATVGVSPDHQGKGLGSAVVLPGVEAAERAGVPAFLETSAPRNLPFYERLGFTVTADVEVPEGPRTWCMTRKPGA

SEQ ID NO: 2964 - protein, 565 aa, synthetic construct; identical to SEQ ID NO: 2962

SEQ ID NO: 2965 - protein, 565 aa, synthetic construct; identical to SEQ ID NO: 2961

SEQ ID NO: 2966 - protein, 565 aa, synthetic construct; identical to SEQ ID NO: 2963

SEQ ID NO: 2967 - protein, 565 aa, synthetic construct; identical to SEQ ID NO: 2749

SEQ ID NO: 2968 - protein, 565 aa, synthetic construct; identical to SEQ ID NO: 2963

SEQ ID NO: 2969 - protein, 565 aa, synthetic construct; identical to SEQ ID NO: 2963

SEQ ID NO: 2970 - protein, 566 aa, synthetic construct; identical to SEQ ID NO: 2799

SEQ ID NO: 2971 - protein, 566 aa, synthetic construct
MALPVTALLLPLALLLHAARPDIQMTQSPSSLSASVGDRVTITCKASDHINNWLAWYQQKPGQAPKLLIYGATTLETGVPSRFSGSGSGTDYTLTISSLQPEDFATYYCQQSWNTPWTFGQGTKLEIKRGGGGSGGGGSGGGGSQVQLQQPGAELVKPGASVKMSCKASGYAFNSYWINWMKQKPGQGLEWIGQIYPGDGDTNYNGKFKGRATLTADTSSSTAYMQLSSLTSEDSAVYFCARSITTVVGCAMDYWGQGTSVTVSSTRRAEDRYRNLEGGSWSHPQFEKDYKDDDDKGSDYKDDDDKGSDYKDDDDKGSDYKDDDDKAWSHPQFEKHHHHHHHHTSGSGEGRGSLLTCGDVEENPGPHMTEYKPTVRLATRDDVPRAVRTLAAAFADYPATRHTVDPDRHIERVTELQELFLTRVGLDIGKVWVADDGAAVAVWTTPESVEAGAVFAEIGPRMAELSGSRLAAQQQMEGLLAPHRPKEPAWFLATVGVSPDHQGKGLGSAVVLPGVEAAERAGVPAFLETSAPRNLPFYERLGFTVTADVEVPEGPRTWCMTRKPGA

SEQ ID NO: 2972 - protein, 566 aa, synthetic construct
MALPVTALLLPLALLLHAARPDIQMTQSPSSLSASVGDRVTITCKASDHINNWLAWYQQKPGQAPKLLIYGATTLETGVPSRFSGSGSGTDYTLTISSLQPEDFATYYCQQSWNTPWTFGQGTKLEIKRGGGGSGGGGSGGGGSQVQLQQPGAELVKPGASVKMSCKASGYAFNSYWINWMKQKPGQGLEWIGQIYPGDGDTNYNGKFKGRATLTADTSSSTAYMQLSSLTSEDSAVYFCARSITTVVGCAMDYWGQGTSVTVSSTRRHEDRYRNLEGGSWSHPQFEKDYKDDDDKGSDYKDDDDKGSDYKDDDDKGSDYKDDDDKAWSHPQFEKHHHHHHHHTSGSGEGRGSLLTCGDVEENPGPHMTEYKPTVRLATRDDVPRAVRTLAAAFADYPATRHTVDPDRHIERVTELQELFLTRVGLDIGKVWVADDGAAVAVWTTPESVEAGAVFAEIGPRMAELSGSRLAAQQQMEGLLAPHRPKEPAWFLATVGVSPDHQGKGLGSAVVLPGVEAAERAGVPAFLETSAPRNLPFYERLGFTVTADVEVPEGPRTWCMTRKPGA

SEQ ID NO: 2973 - protein, 268 aa, synthetic construct; identical to SEQ ID NO: 2781

SEQ ID NO: 2974 - protein, 566 aa, synthetic construct; identical to SEQ ID NO: 2665

SEQ ID NO: 2975 - protein, 566 aa, synthetic construct
MALPVTALLLPLALLLHAARPDIQMTQSPSSLSASVGDRVTITCKASDHINNWLAWYQQKPGQAPKLLIYGATTLETGVPSRFSGSGSGTDYTLTISSLQPEDFATYYCQQSWNTPWTFGQGTKLEIKRGGGGSGGGGSGGGGSQVQLQQPGAELVKPGASVKMSCKASGYAFNSYWINWMKQKPGQGLEWIGQIYPGDGDTNYNGKFKGRATLTADTSSSTAYMQLSSLTSEDSAVYFCARSITTVVGCAMDYWGQGTSVTVSSTRREEDRYRNLEGGSWSHPQFEKDYKDDDDKGSDYKDDDDKGSDYKDDDDKGSDYKDDDDKAWSHPQFEKHHHHHHHHTSGSGEGRGSLLTCGDVEENPGPHMTEYKPTVRLATRDDVPRAVRTLAAAFADYPATRHTVDPDRHIERVTELQELFLTRVGLDIGKVWVADDGAAVAVWTTPESVEAGAVFAEIGPRMAELSGSRLAAQQQMEGLLAPHRPKEPAWFLATVGVSPDHQGKGLGSAVVLPGVEAAERAGVPAFLETSAPRNLPFYERLGFTVTADVEVPEGPRTWCMTRKPGA

SEQ ID NO: 2976 - protein, 268 aa, synthetic construct; identical to SEQ ID NO: 2781

SEQ ID NO: 2977 - protein, 566 aa, synthetic construct; identical to SEQ ID NO: 2665

SEQ ID NO: 2978 - protein, 566 aa, synthetic construct; identical to SEQ ID NO: 2665

SEQ ID NO: 2979 - protein, 566 aa, synthetic construct; identical to SEQ ID NO: 2665

SEQ ID NO: 2980 - protein, 566 aa, synthetic construct; identical to SEQ ID NO: 2796

SEQ ID NO: 2981 - protein, 566 aa, synthetic construct; identical to SEQ ID NO: 2842

SEQ ID NO: 2982 - protein, 566 aa, synthetic construct; identical to SEQ ID NO: 2975

SEQ ID NO: 2983 - protein, 566 aa, synthetic construct
MALPVTALLLPLALLLHAARPDIQMTQSPSSLSASVGDRVTITCKASDHINNWLAWYQQKPGQAPKLLIYGATTLETGVPSRFSGSGSGTDYTLTISSLQPEDFATYYCQQSWNTPWTFGQGTKLEIKRGGGGSGGGGSGGGGSQVQLQQPGAELVKPGASVKMSCKASGYAFNSYWINWMKQKPGQGLEWIGQIYPGDGDTNYNGKFKGRATLTADTSSSTAYMQLSSLTSEDSAVYFCARSITTVVGCAMDYWGQGTSVTVSSTRRSDERYRNLEGGSWSHPQFEKDYKDDDDKGSDYKDDDDKGSDYKDDDDKGSDYKDDDDKAWSHPQFEKHHHHHHHHTSGSGEGRGSLLTCGDVEENPGPHMTEYKPTVRLATRDDVPRAVRTLAAAFADYPATRHTVDPDRHIERVTELQELFLTRVGLDIGKVWVADDGAAVAVWTTPESVEAGAVFAEIGPRMAELSGSRLAAQQQMEGLLAPHRPKEPAWFLATVGVSPDHQGKGLGSAVVLPGVEAAERAGVPAFLETSAPRNLPFYERLGFTVTADVEVPEGPRTWCMTRKPGA

SEQ ID NO: 2984 - protein, 566 aa, synthetic construct; identical to SEQ ID NO: 2811

SEQ ID NO: 2985 - protein, 566 aa, synthetic construct
MALPVTALLLPLALLLHAARPDIQMTQSPSSLSASVGDRVTITCKASDHINNWLAWYQQKPGQAPKLLIYGATTLETGVPSRFSGSGSGTDYTLTISSLQPEDFATYYCQQSWNTPWTFGQGTKLEIKRGGGGSGGGGSGGGGSQVQLQQPGAELVKPGASVKMSCKASGYAFNSYWINWMKQKPGQGLEWIGQIYPGDGDTNYNGKFKGRATLTADTSSSTAYMQLSSLTSEDSAVYFCARSITTVVGCAMDYWGQGTSVTVSSTRRSEERYRNLEGGSWSHPQFEKDYKDDDDKGSDYKDDDDKGSDYKDDDDKGSDYKDDDDKAWSHPQFEKHHHHHHHHTSGSGEGRGSLLTCGDVEENPGPHMTEYKPTVRLATRDDVPRAVRTLAAAFADYPATRHTVDPDRHIERVTELQELFLTRVGLDIGKVWVADDGAAVAVWTTPESVEAGAVFAEIGPRMAELSGSRLAAQQQMEGLLAPHRPKEPAWFLATVGVSPDHQGKGLGSAVVLPGVEAAERAGVPAFLETSAPRNLPFYERLGFTVTADVEVPEGPRTWCMTRKPGA

SEQ ID NO: 2986 - protein, 566 aa, synthetic construct; identical to SEQ ID NO: 2811

SEQ ID NO: 2987 - protein, 566 aa, synthetic construct; identical to SEQ ID NO: 2811

SEQ ID NO: 2988 - protein, 566 aa, synthetic construct; identical to SEQ ID NO: 2983

SEQ ID NO: 2989 - protein, 566 aa, synthetic construct; identical to SEQ ID NO: 2983

SEQ ID NO: 2990 - protein, 566 aa, synthetic construct; identical to SEQ ID NO: 2983

SEQ ID NO: 2991 - protein, 566 aa, synthetic construct; identical to SEQ ID NO: 2983

SEQ ID NO: 2992 - protein, 566 aa, synthetic construct; identical to SEQ ID NO: 2983

SEQ ID NO: 2993 - protein, 566 aa, synthetic construct; identical to SEQ ID NO: 2811

SEQ ID NO: 2994 - protein, 566 aa, synthetic construct; identical to SEQ ID NO: 2811

SEQ ID NO: 2995 - protein, 565 aa, synthetic construct; identical to SEQ ID NO: 2926

SEQ ID NO: 2996 - protein, 565 aa, synthetic construct; identical to SEQ ID NO: 2960

SEQ ID NO: 2997 - protein, 565 aa, synthetic construct; identical to SEQ ID NO: 2779

SEQ ID NO: 2998 - protein, 565 aa, synthetic construct; identical to SEQ ID NO: 2825

SEQ ID NO: 2999 - protein, 565 aa, synthetic construct; identical to SEQ ID NO: 2897

SEQ ID NO: 3000 - protein, 565 aa, synthetic construct; identical to SEQ ID NO: 2897

SEQ ID NO: 3001 - protein, 565 aa, synthetic construct; identical to SEQ ID NO: 2749

SEQ ID NO: 3002 - protein, 565 aa, synthetic construct; identical to SEQ ID NO: 2777

SEQ ID NO: 3003 - protein, 565 aa, synthetic construct; identical to SEQ ID NO: 2825

SEQ ID NO: 3004 - protein, 565 aa, synthetic construct; identical to SEQ ID NO: 2776

SEQ ID NO: 3005 - protein, 565 aa, synthetic construct; identical to SEQ ID NO: 2777

SEQ ID NO: 3006 - protein, 565 aa, synthetic construct; identical to SEQ ID NO: 2960

SEQ ID NO: 3007 - protein, 565 aa, synthetic construct
MALPVTALLLPLALLLHAARPDIQMTQSPSSLSASVGDRVTITCKASDHINNWLAWYQQKPGQAPKLLIYGATTLETGVPSRFSGSGSGTDYTLTISSLQPEDFATYYCQQSWNTPWTFGQGTKLEIKRGGGGSGGGGSGGGGSQVQLQQPGAELVKPGASVKMSCKASGYAFNSYWINWMKQKPGQGLEWIGQIYPGDGDTNYNGKFKGRATLTADTSSSTAYMQLSSLTSEDSAVYFCARSITTVVGCAMDYWGQGTSVTVSSTRRYEDRYRLEGGSWSHPQFEKDYKDDDDKGSDYKDDDDKGSDYKDDDDKGSDYKDDDDKAWSHPQFEKHHHHHHHHTSGSGEGRGSLLTCGDVEENPGPHMTEYKPTVRLATRDDVPRAVRTLAAAFADYPATRHTVDPDRHIERVTELQELFLTRVGLDIGKVWVADDGAAVAVWTTPESVEAGAVFAEIGPRMAELSGSRLAAQQQMEGLLAPHRPKEPAWFLATVGVSPDHQGKGLGSAVVLPGVEAAERAGVPAFLETSAPRNLPFYERLGFTVTADVEVPEGPRTWCMTRKPGA

SEQ ID NO: 3008 - protein, 7 aa, synthetic construct
GGGGGGG

SEQ ID NO: 3009 - protein, 7 aa, synthetic construct
GGGGGGG

SEQ ID NO: 3010 - protein, 7 aa, synthetic construct
GGGGGGG

SEQ ID NO: 3011 - protein, 7 aa, synthetic construct
GGGGGGG

SEQ ID NO: 3012 - protein, 7 aa, synthetic construct
GGGGGGG

SEQ ID NO: 3013 - protein, 7 aa, synthetic construct
GGGGGGG

SEQ ID NO: 3014 - protein, 7 aa, synthetic construct
GGGGGGG

SEQ ID NO: 3015 - protein, 7 aa, synthetic construct
GGGGGGG

SEQ ID NO: 3016 - protein, 7 aa, synthetic construct
GGGGGGG

SEQ ID NO: 3017 - protein, 7 aa, synthetic construct
GGGGGGG

SEQ ID NO: 3018 - protein, 7 aa, synthetic construct
GGGGGGG

SEQ ID NO: 3019 - protein, 7 aa, synthetic construct
GGGGGGG

SEQ ID NO: 3020 - protein, 7 aa, synthetic construct
GGGGGGG

SEQ ID NO: 3021 - protein, 7 aa, synthetic construct
GGGGGGG

SEQ ID NO: 3022 - protein, 7 aa, synthetic construct
GGGGGGG

SEQ ID NO: 3023 - protein, 7 aa, synthetic construct
GGGGGGG

SEQ ID NO: 3024 - protein, 7 aa, synthetic construct
GGGGGGG

SEQ ID NO: 3025 - protein, 7 aa, synthetic construct
GGGGGGG

SEQ ID NO: 3026 - protein, 7 aa, synthetic construct
GGGGGGG

SEQ ID NO: 3027 - protein, 7 aa, synthetic construct
GGGGGGG

SEQ ID NO: 3028 - protein, 7 aa, synthetic construct
GGGGGGG

SEQ ID NO: 3029 - protein, 7 aa, synthetic construct
GGGGGGG

SEQ ID NO: 3030 - protein, 7 aa, synthetic construct
GGGGGGG

SEQ ID NO: 3031 - protein, 7 aa, synthetic construct
GGGGGGG

SEQ ID NO: 3032 - protein, 7 aa, synthetic construct
GGGGGGG

SEQ ID NO: 3033 - protein, 7 aa, synthetic construct
GGGGGGG

SEQ ID NO: 3034 - protein, 7 aa, synthetic construct
GGGGGGG

SEQ ID NO: 3035 - protein, 7 aa, synthetic construct
GGGGGGG

SEQ ID NO: 3036 - protein, 7 aa, synthetic construct
GGGGGGG

SEQ ID NO: 3037 - protein, 484 aa, synthetic construct; identical to SEQ ID NO: 2477

SEQ ID NO: 3038 - protein, 796 aa, synthetic construct
MALPVTALLLPLALLLHAARPDIQMTQSPSSLSASVGDRVTITCKASQDVGTAVDWYQQKPGKAPKLLIYWASTRHTGVPSRFSGSGSGTDFTLTISSLQPEDFATYYCQQYNSYPLTFGQGTKVEIKRLEGQPKANPTVTLFPPSSEELQANKATLVCLISDFYPGAVTVAWKADGSPVKAGVETTKPSKQSNNKYAASSYLSLTPEQWKSHRSYSCQVTHEGSTVEKTVAPTECSGSQSFGLLDPKLCYLLDGILFIYGVILTALFLRVKFSRSADAPAYQQGQNQLYNELNLGRREEYDVLDKRRGRDPEMGGKPQRRKNPQEGLYNELQKDKMAEAYSEIGMKGERRRGKGHDGLYQGLSTATKDTYDALHMQALPPRRAKRSGSGATNFSLLKQAGDVEENPGPTSMDWIWRILFLVGAATGAHSFEVQLVESGGGLVQPGGSLRLSCAASGYTFTEYTIHWVRQAPGKGLEWVANINPNNGGTTYNQKFEDRFTISRDNSKNTLYLQMNSLRAEDTAVYYCARGWNFDYWGQGTLVTVSSTRASTKGPSVFPLAPSSKSTSGGTAALGCLVKDYFPEPVTVSWNSGALTSGVHTFPAVLQSSGLYSLSSVVTVPSSSLGTQTYICNVNHKPSNTKVDKRVEPKSCGTQSFGLLDPKLCYLLDGILFIYGVILTALFLRVKFSRSADAPAYQQGQNQLYNELNLGRREEYDVLDKRRGRDPEMGGKPQRRKNPQEGLYNELQKDKMAEAYSEIGMKGERRRGKGHDGLYQGLSTATKDTYDALHMQALPPR

SEQ ID NO: 3039 - protein, 983 aa, synthetic construct
MDWIWRILFLVGAATGAHSEFGSGTHHHHHHHHWSHPQFEKDYKDDDDKWSHPQFEKGSDYKDDDDKGSDYKDDDDKGSDYKDDDDKAWSHPQFEKGGGSSGFEVFTLEDFVGDWRQTAGYNLDQVLEQGGVSSLFQNLGVSVTPIQRIVLSGENGLKIDIHVIIPYEGLSGDQMGQIEKIFKVVYPVDDHHFKVILHYGTLVIDGVTPNMIDYFGRPYEGIAVFDGKKITVTGTLWNGNKIIDERLINPDGSLLFRVTINGVTGWRLCERILALEKSSNEATNITPKHNMKAFLDELKAENIKKFLYNFTQIPHLAGTEQNFQLAKQIQSQWKEFGLDSVELAHYDVLLSYPNKTHPNYISIINEDGNEIFNTSLFEPPPPGYENVSDIVPPFSAFSPQGMPEGDLVYVNYARTEDFFKLERDMKINCSGKIVIARYGKVFRGNKVKNAQLAGAKGVILYSDPADYFAPGVKSYPDGWNLPGGGVQRGNILNLNGAGDPLTPGYPANEYAYRRGIAEAVGLPSIPVHPIGYYDAQKLLEKMGGSAPPDSSWRGSLKVPYNVGPGFTGNFSTQKVKMHIHSTNEVTRIYNVIGTLRGAVEPDRYVILGGHRDSWVFGGIDPQSGAAVVHEIVRSFGTLKKEGWRPRRTILFASWDAEEFGLLGSTEWAEENSRLLQERGVAYINADSSIEGNYTLRVDCTPLMYSLVHNLTKELKSPDEGFEGKSLYESWTKKSPSPEFSGMPRISKLGSGNDFEVFFQRLGIASGRARYTKNWETNKFSGYPLYHSVYETYELVEKFYDPMFKYHLTVAQVRGGMVFELANSIVLPFDCRDYAVVLRKYADKIYSISMKHPQEMKTYSVSFDSLFSAVKNFTEIASKFSERLQDFDKSNPIVLRMMNDQLMFLERAFIDPLGLPDRPFYRHVIYAPSSHNKYAGESFPGIYDALFDIESKVDPSKAWGEVKRQIYVAAFTVQAAAETLSEVA

SEQ ID NO: 3040 - protein, 991 aa, synthetic construct
MDWIWRILFLVGAATGAHSEFGSGTHHHHHHHHWSHPQFEKDYKDDDDKWSHPQFEKGSDYKDDDDKGSDYKDDDDKGSDYKDDDDKAWSHPQFEKGGGSSGFEVFTLEDFVGDWRQTAGYNLDQVLEQGGVSSLFQNLGVSVTPIQRIVLSGENGLKIDIHVIIPYEGLSGDQMGQIEKIFKVVYPVDDHHFKVILHYGTLVIDGVTPNMIDYFGRPYEGIAVFDGKKITVTGTLWNGNKIIDERLINPDGSLLFRVTINGVTGWRLCERILALEGGSGGSGPKSSNEATNITPKHNMKAFLDELKAENIKKFLYNFTQIPHLAGTEQNFQLAKQIQSQWKEFGLDSVELAHYDVLLSYPNKTHPNYISIINEDGNEIFNTSLFEPPPPGYENVSDIVPPFSAFSPQGMPEGDLVYVNYARTEDFFKLERDMKINCSGKIVIARYGKVFRGNKVKNAQLAGAKGVILYSDPADYFAPGVKSYPDGWNLPGGGVQRGNILNLNGAGDPLTPGYPANEYAYRRGIAEAVGLPSIPVHPIGYYDAQKLLEKMGGSAPPDSSWRGSLKVPYNVGPGFTGNFSTQKVKMHIHSTNEVTRIYNVIGTLRGAVEPDRYVILGGHRDSWVFGGIDPQSGAAVVHEIVRSFGTLKKEGWRPRRTILFASWDAEEFGLLGSTEWAEENSRLLQERGVAYINADSSIEGNYTLRVDCTPLMYSLVHNLTKELKSPDEGFEGKSLYESWTKKSPSPEFSGMPRISKLGSGNDFEVFFQRLGIASGRARYTKNWETNKFSGYPLYHSVYETYELVEKFYDPMFKYHLTVAQVRGGMVFELANSIVLPFDCRDYAVVLRKYADKIYSISMKHPQEMKTYSVSFDSLFSAVKNFTEIASKFSERLQDFDKSNPIVLRMMNDQLMFLERAFIDPLGLPDRPFYRHVIYAPSSHNKYAGESFPGIYDALFDIESKVDPSKAWGEVKRQIYVAAFTVQAAAETLSEVA

SEQ ID NO: 3041 - protein, 507 aa, synthetic construct
MDWIWRILFLVGAATGAHSEFGSGTHHHHHHHHWSHPQFEKDYKDDDDKWSHPQFEKGSDYKDDDDKGSDYKDDDDKGSDYKDDDDKAWSHPQFEKGGGSSGFEVFTLEDFVGDWRQTAGYNLDQVLEQGGVSSLFQNLGVSVTPIQRIVLSGENGLKIDIHVIIPYEGLSGDQMGQIEKIFKVVYPVDDHHFKVILHYGTLVIDGVTPNMIDYFGRPYEGIAVFDGKKITVTGTLWNGNKIIDERLINPDGSLLFRVTINGVTGWRLCERILALEGGGSNKTHPNYISIINEDGNEIFNTSLFEPPPPGYENVSDIVPPFSAFSPQGMPEGDLVYVNYARTEDFFKLERDMKINCSGKIVIARYGKVFRGNKVKNAQLAGAKGVILYSDPADYFAPGVKSYPDGWNLPGGGVQRGNILNLNGAGDPLTPGYPANEYAYRRGIAEAVGLPSIPVHPIGYYDAQKLLEKMGGSAPPDSSWRGSLKVPYNVGPGFTGNFSTQKVKMHIH

SEQ ID NO: 3042 - protein, 1021 aa, synthetic construct
MDWIWRILFLVGAATGAHSEFEKTISKAKGQPREPQVYTLPPSQEEMTKNQVSLTCLVKGFYPSDIAVEWESNGQPENNYKTTPPVLDSDGSFFLYSRLTVDKSRWQEGNVFSCSVMHEALHNHYTQKSLSLSPGKGSSGFEVFTLEDFVGDWRQTAGYNLDQVLEQGGVSSLFQNLGVSVTPIQRIVLSGENGLKIDIHVIIPYEGLSGDQMGQIEKIFKVVYPVDDHHFKVILHYGTLVIDGVTPNMIDYFGRPYEGIAVFDGKKITVTGTLWNGNKIIDERLINPDGSLLFRVTINGVTGWRLCERILALEKSSNEATNITPKHNMKAFLDELKAENIKKFLYNFTQIPHLAGTEQNFQLAKQIQSQWKEFGLDSVELAHYDVLLSYPNKTHPNYISIINEDGNEIFNTSLFEPPPPGYENVSDIVPPFSAFSPQGMPEGDLVYVNYARTEDFFKLERDMKINCSGKIVIARYGKVFRGNKVKNAQLAGAKGVILYSDPADYFAPGVKSYPDGWNLPGGGVQRGNILNLNGAGDPLTPGYPANEYAYRRGIAEAVGLPSIPVHPIGYYDAQKLLEKMGGSAPPDSSWRGSLKVPYNVGPGFTGNFSTQKVKMHIHSTNEVTRIYNVIGTLRGAVEPDRYVILGGHRDSWVFGGIDPQSGAAVVHEIVRSFGTLKKEGWRPRRTILFASWDAEEFGLLGSTEWAEENSRLLQERGVAYINADSSIEGNYTLRVDCTPLMYSLVHNLTKELKSPDEGFEGKSLYESWTKKSPSPEFSGMPRISKLGSGNDFEVFFQRLGIASGRARYTKNWETNKFSGYPLYHSVYETYELVEKFYDPMFKYHLTVAQVRGGMVFELANSIVLPFDCRDYAVVLRKYADKIYSISMKHPQEMKTYSVSFDSLFSAVKNFTEIASKFSERLQDFDKSNPIVLRMMNDQLMFLERAFIDPLGLPDRPFYRHVIYAPSSHNKYAGESFPGIYDALFDIESKVDPSKAWGEVKRQIYVAAFTVQAAAETLSEVA

SEQ ID NO: 3043 - protein, 7 aa, synthetic construct
GGGGGGG

SEQ ID NO: 3044 - protein, 7 aa, synthetic construct
GGGGGGG

SEQ ID NO: 3045 - protein, 7 aa, synthetic construct
GGGGGGG

SEQ ID NO: 3046 - protein, 7 aa, synthetic construct
GGGGGGG

SEQ ID NO: 3047 - protein, 7 aa, synthetic construct
GGGGGGG

SEQ ID NO: 3048 - protein, 7 aa, synthetic construct
GGGGGGG

SEQ ID NO: 3049 - protein, 7 aa, synthetic construct
GGGGGGG

SEQ ID NO: 3050 - protein, 7 aa, synthetic construct
GGGGGGG

SEQ ID NO: 3051 - protein, 7 aa, synthetic construct
GGGGGGG

SEQ ID NO: 3052 - protein, 7 aa, synthetic construct
GGGGGGG

SEQ ID NO: 3053 - protein, 7 aa, synthetic construct
GGGGGGG

SEQ ID NO: 3054 - protein, 7 aa, synthetic construct
GGGGGGG

SEQ ID NO: 3055 - protein, 7 aa, synthetic construct
GGGGGGG

SEQ ID NO: 3056 - protein, 7 aa, synthetic construct
GGGGGGG

SEQ ID NO: 3057 - protein, 7 aa, synthetic construct
GGGGGGG

SEQ ID NO: 3058 - protein, 7 aa, synthetic construct
GGGGGGG

SEQ ID NO: 3059 - protein, 7 aa, synthetic construct
GGGGGGG

SEQ ID NO: 3060 - protein, 7 aa, synthetic construct
GGGGGGG

SEQ ID NO: 3061 - protein, 7 aa, synthetic construct
GGGGGGG

SEQ ID NO: 3062 - protein, 7 aa, synthetic construct
GGGGGGG

SEQ ID NO: 3063 - protein, 7 aa, synthetic construct
GGGGGGG

SEQ ID NO: 3064 - protein, 7 aa, synthetic construct
GGGGGGG

SEQ ID NO: 3065 - protein, 7 aa, synthetic construct
GGGGGGG

SEQ ID NO: 3066 - protein, 7 aa, synthetic construct
GGGGGGG

SEQ ID NO: 3067 - protein, 7 aa, synthetic construct
GGGGGGG

SEQ ID NO: 3068 - protein, 7 aa, synthetic construct
GGGGGGG

SEQ ID NO: 3069 - protein, 7 aa, synthetic construct
GGGGGGG

SEQ ID NO: 3070 - protein, 7 aa, synthetic construct
GGGGGGG

SEQ ID NO: 3071 - protein, 7 aa, synthetic construct
GGGGGGG

SEQ ID NO: 3072 - protein, 7 aa, synthetic construct
GGGGGGG

SEQ ID NO: 3073 - protein, 7 aa, synthetic construct
GGGGGGG

SEQ ID NO: 3074 - protein, 7 aa, synthetic construct
GGGGGGG

SEQ ID NO: 3075 - protein, 7 aa, synthetic construct
GGGGGGG

SEQ ID NO: 3076 - protein, 7 aa, synthetic construct
GGGGGGG

SEQ ID NO: 3077 - protein, 7 aa, synthetic construct
GGGGGGG

SEQ ID NO: 3078 - protein, 7 aa, synthetic construct
GGGGGGG

SEQ ID NO: 3079 - protein, 7 aa, synthetic construct
GGGGGGG

SEQ ID NO: 3080 - protein, 7 aa, synthetic construct
GGGGGGG

SEQ ID NO: 3081 - protein, 7 aa, synthetic construct
GGGGGGG

SEQ ID NO: 3082 - protein, 7 aa, synthetic construct
GGGGGGG

SEQ ID NO: 3083 - protein, 7 aa, synthetic construct
GGGGGGG

SEQ ID NO: 3084 - protein, 7 aa, synthetic construct
GGGGGGG

SEQ ID NO: 3085 - protein, 7 aa, synthetic construct
GGGGGGG

SEQ ID NO: 3086 - protein, 7 aa, synthetic construct
GGGGGGG

SEQ ID NO: 3087 - protein, 7 aa, synthetic construct
GGGGGGG

SEQ ID NO: 3088 - protein, 7 aa, synthetic construct
GGGGGGG

SEQ ID NO: 3089 - protein, 7 aa, synthetic construct
GGGGGGG

SEQ ID NO: 3090 - protein, 7 aa, synthetic construct
GGGGGGG

SEQ ID NO: 3091 - protein, 7 aa, synthetic construct
GGGGGGG

SEQ ID NO: 3092 - protein, 7 aa, synthetic construct
GGGGGGG

SEQ ID NO: 3093 - protein, 7 aa, synthetic construct
GGGGGGG

SEQ ID NO: 3094 - protein, 7 aa, synthetic construct
GGGGGGG

SEQ ID NO: 3095 - protein, 7 aa, synthetic construct
GGGGGGG

SEQ ID NO: 3096 - protein, 7 aa, synthetic construct
GGGGGGG

SEQ ID NO: 3097 - protein, 7 aa, synthetic construct
GGGGGGG

SEQ ID NO: 3098 - protein, 7 aa, synthetic construct
GGGGGGG

SEQ ID NO: 3099 - protein, 7 aa, synthetic construct
GGGGGGG

SEQ ID NO: 3100 - protein, 7 aa, synthetic construct
GGGGGGG

SEQ ID NO: 3101 - DNA, 48 bp, synthetic construct
  source 1..48: mol_type = other DNA
gcaagaagtgaagatcgctacaggaaccctaaggggtcagcctgcagc

SEQ ID NO: 3102 - DNA, 33 bp, synthetic construct
  source 1..33: mol_type = other DNA
gccagaagcgaggacagatacagaaaccccaaa

SEQ ID NO: 3103 - DNA, 111 bp, synthetic construct
  source 1..111: mol_type = other DNA
gcaagaagtgaagatcgctacaggaaccctaaggggtcagcctgcagcggtggaggagggagcgcacgcagcgaggacaggtataggaaccccaaaggaagtgcgtgctct

SEQ ID NO: 3104 - DNA, 81 bp, synthetic construct
  source 1..81: mol_type = other DNA
gccagaagcgaggacagatacagaaaccccaaaggcggaggcggatctgctagaagcgaagatcggtatcggaaccccaag

SEQ ID NO: 3105 - DNA, 81 bp, synthetic construct
  source 1..81: mol_type = other DNA
gccagaagcgaggacagatacagaaaccccaagggcttcagcacactggcccagctgaaacagcggaacaccctgaaggac

SEQ ID NO: 3106 - DNA, 375 bp, synthetic construct
  source 1..375: mol_type = other DNA
atggctagactggccctgtctcctgtgcctagccattggatggttgccctgctgctgctcctgtctgctgaacctgttcctgccgccagaagcgaggacagatacagaaaccccaagggcttcagcacactggcccagctgaaacagcggaacaccctgaaggacggcatcattatgatccagacactgctcatcatcctgtttattatcgtgcccatcttcctgctgctcgacaaggacgatagcaaggccggcatggaagaggaccacacctacgaaggactggacatcgaccagaccgccacatacgaggacatcgtgaccctgagaaccggcgaagtgaagtggagcgtgggagagcaccctggacaagaa

SEQ ID NO: 3107 - DNA, 354 bp, synthetic construct
  source 1..354: mol_type = other DNA
atggccctgcctgtgacagctctgctgctgcctctggcactgctgctgcacgccgccagacctgccagaagcgaggacagatacagaaaccccaagggcttcagcacactggcccagctgaaacagcggaacaccctgaaggacggcatcattatgatccagacactgctcatcatcctgtttattatcgtgcccatcttcctgctgctcgacaaggacgatagcaaggccggcatggaagaggaccacacctacgaaggactggacatcgaccagaccgccacatacgaggacatcgtgaccctgagaaccggcgaagtgaagtggagcgtgggagagcaccctggacaagaa

SEQ ID NO: 3108 - DNA, 666 bp, synthetic construct
  source 1..666: mol_type = other DNA
atggccctgcctgtgacagctctgctgctgcctctggcactgctgctgcacgccgccagacctgccagaagcgaggacagatacagaaaccccaagggcagcgcctgctccagaatctggcaaagccccagattcattgcccggaagaggggcttcaccgtgaagatgcactgctacatgaacagcgccagcggcaacgtttcctggctgtggaagcaagagatggacgagaaccctcagcagctgaagctggaaaagggccgcatggaagagagccagaacgagtctctggccacactgaccatccagggcatcagattcgaggacaacggcatctacttttgccagcagaagtgcaacaacaccagcgaggtgtaccaaggctgtggcaccgagctgagagtgatgggctttagcacactggcccagctgaaacagcggaacaccctgaaggacggcatcattatgatccagacactgctcatcatcctgtttattatcgtgcccatcttcctgctgctcgacaaggacgatagcaaggccggcatggaagaggaccacacctacgaaggactggacatcgaccagaccgccacatacgaggacatcgtgaccctgagaaccggcgaagtgaagtggagcgtgggagagcaccctggacaagaa

SEQ ID NO: 3109 - DNA, 393 bp, synthetic construct
  source 1..393: mol_type = other DNA
gccagaagcgaggacagatacagaaaccccaagggcagcgcctgctccagaatctggcaaagccccagattcattgcccggaagaggggcttcaccgtgaagatgcactgctacatgaacagcgccagcggcaacgtttcctggctgtggaagcaagagatggacgagaaccctcagcagctgaagctggaaaagggccgcatggaagagagccagaacgagtctctggccacactgaccatccagggcatcagattcgaggacaacggcatctacttttgccagcagaagtgcaacaacaccagcgaggtgtaccaaggctgtggcaccgagctgagagtgatgggctttagcacactggcccagctgaaacagcggaacaccctgaaggac

SEQ ID NO: 3110 - DNA, 687 bp, synthetic construct
  source 1..687: mol_type = other DNA
atggctagactggccctgtctcctgtgcctagccattggatggttgccctgctgctgctcctgtctgctgaacctgttcctgccgccagaagcgaggacagatacagaaaccccaagggcagcgcctgctccagaatctggcaaagccccagattcattgcccggaagaggggcttcaccgtgaagatgcactgctacatgaacagcgccagcggcaacgtttcctggctgtggaagcaagagatggacgagaaccctcagcagctgaagctggaaaagggccgcatggaagagagccagaacgagtctctggccacactgaccatccagggcatcagattcgaggacaacggcatctacttttgccagcagaagtgcaacaacaccagcgaggtgtaccaaggctgtggcaccgagctgagagtgatgggctttagcacactggcccagctgaaacagcggaacaccctgaaggacggcatcattatgatccagacactgctcatcatcctgtttattatcgtgcccatcttcctgctgctcgacaaggacgatagcaaggccggcatggaagaggaccacacctacgaaggactggacatcgaccagaccgccacatacgaggacatcgtgaccctgagaaccggcgaagtgaagtggagcgtgggagagcaccctggacaagaa

SEQ ID NO: 3111 - DNA, 123 bp, synthetic construct
  source 1..123: mol_type = other DNA
gcaagaagtgaagatcgctacaggaaccctaaggggtcagcctgcaaaggcggcggaggaagcgaacttcctacacagggcaccttcagcaacgtgtccaccaatgtgtccccagccaagcct

SEQ ID NO: 3112 - DNA, 510 bp, synthetic construct
  source 1..510: mol_type = other DNA
atggccctgcctgtgacagctctgctgctgcctctggcactgctgctgcacgccgccagacctgcaagaagtgaagatcgctacaggaaccctaaggggtcagcctgcaaaggcggcggaggaagcgaacttcctacacagggcaccttcagcaacgtgtccaccaatgtgtccccagccaagcctaccaccaccgcctgcgcacgcagcgaggacaggtataggaaccccaaaggaagtgcgtgcaagggaggcggcggatctcctgctcctagacctcctacaccagctcctacaatcgccagccagcctctgtctctcagacccgaagcctgtagacctgctgctggcggagctgtgcataccagaggactggatttcgcctgcgacatctacatctgggctcctctggctggcacatgtggcgttctgctgctgagcctggtcatcaccctgtactgcaaccaccggaacaggcggagagtgtgcaagtgccctagacctgtggtt

SEQ ID NO: 3113 - DNA, 157 bp, synthetic construct
  source 1..157: mol_type = other DNA
gcaagaagtgaagatcgctacaggaaccctaagggcggcggaggaagcgaacttcctacacagggcaccttcagcaacgtgtccaccaatgtgtccccagccaagcctaccaccaccgcctgcgcacgcagcgaggacaggtataggaaccccaaag

SEQ ID NO: 3114 - DNA, 480 bp, synthetic construct
  source 1..480: mol_type = other DNA
atggccctgcctgtgacagctctgctgctgcctctggcactgctgctgcacgccgccagacctgcaagaagtgaagatcgctacaggaaccctaaggggtcaggaggaagcgaacttcctacacagggcaccttcagcaacgtgtccaccaatgtgtccccagccaagcctaccaccaccgcctgcgcacgcagcgaggacaggtataggaaccccaaaggaagtggcggatctcctgctcctagacctcctacaccagctcctacaatcgccagccagcctctgtctctcagacccgaagcctgtagacctgctgctggcggagctgtgcataccagaggactggatttcgcctgcgacatctacatctgggctcctctggctggcacatgtggcgttctgctgctgagcctggtcatcaccctgtactgcaaccaccggaacaggcggagagtgtgcaagtgccctagacctgtggtt

SEQ ID NO: 3115 - DNA, 852 bp, synthetic construct
  source 1..852: mol_type = other DNA
atggccctgcctgtgacagctctgctgctgcctctggcactgctgctgcacgccgccagacctgcaagaagtgaagatcgctacaggaaccctaaggggtcaggaggaagcgaacttcctacacagggcaccttcagcaacgtgtccaccaatgtgtccccagccaagcctaccaccaccgcctgcgcacgcagcgaggacaggtataggaaccccaaaggaagtggcggatctgcccctaccagcagcagcaccaagaaaacccagctgcaactggaacacctcctgctggacctccagatgatcctgaacggcatcaacaactacaagaaccccaagctgacccggatgctgaccttcaagttctacatgcccaagaaggccaccgagctgaagcacctccagtgcctggaagaggaactgaagcccctggaagaagtgctgaatctggcccagagcaagaacttccacctgaggccaagggacctgatctccaacatcaacgtgatcgtgctggaactgaaaggcagcgagacaaccttcatgtgcgagtacgccgacgagacagctaccatcgtggaatttctgaatcggtggatcaccttctgccagagcatcatcagcaccctgacagccaagcctacaacaacccctgctcctagacctcctacaccagctcctacaatcgccagccagcctctgtctctcagacccgaagcctgtagaccagctgctggcggagctgtgcataccagaggactggatttcgcctgcgacatctacatctgggctcctctggctggcacatgtggcgttctgctgctgtccctggtcatcaccctgtactgttaa

SEQ ID NO: 3116 - DNA, 642 bp, synthetic construct
  source 1..642: mol_type = other DNA
atgagaatcagcaagccccacctgagatccatcagcatccagtgctacctgtgcctgctgctgaacagccactttctgacagaggccggcatccacgtgttcatcctgggctgtttttctgccggcctgcctaagaccgaggccaactgggttaacgtgatctccgacctgaagaagatcgaggacctgatccagtccatgcacatcgacgccacactgtacaccgagagcgacgtgcaccctagctgtaaagtgaccgccatgaagtgctttctgctggaactgcaagtgatctccctggaaagcggcgacgccagcatccacgacaccgtggaaaacctgattatcctggctaacaacagcctgagcagcaacggcaacgtgaccgagtccggctgtaaagagtgcgaggaactggaagagaagaatatcaaagagttcctccagagcttcgtgcacatcgtgcagatgttcatcaacaccagcgccagaagcgaggacagatacagaaaccccaagggcttcagcacactggcccagctgaaacagcggaacaccctgaaggacggcatcattatgatccagacactgctcatcatcctgtttattatcgtgcccatcttcctgctgctcgacaaggac

SEQ ID NO: 3117 - DNA, 504 bp, synthetic construct
  source 1..504: mol_type = other DNA
atgtaccggatgcagctgctgagctgtatcgccctgtctctggccctggtcacaaatagcgcccctaccagcagcagcaccaagaaaacccagctgcaactggaacacctcctgctggacctccagatgatcctgaacggcatcaacaactacaagaaccccaagctgacccggatgctgaccttcaagttctacatgcccaagaaggccaccgagctgaagcacctccagtgcctggaagaggaactgaagcccctggaagaagtgctgaatctggcccagagcaagaacttccacctgaggccaagggacctgatctccaacatcaacgtgatcgtgctggaactgaaaggcagcgagacaaccttcatgtgcgagtacgccgacgagacagctaccatcgtggaatttctgaatcggtggatcaccttctgccagagcatcatcagcaccctgacaggaggcggatctgcaagaagtgaagatcgctacaggaaccctaag

SEQ ID NO: 3118 - DNA, 552 bp, synthetic construct
  source 1..552: mol_type = other DNA
atgtaccggatgcagctgctgagctgtatcgccctgtctctggccctggtcacaaatagcgcccctaccagcagcagcaccaagaaaacccagctgcaactggaacacctcctgctggacctccagatgatcctgaacggcatcaacaactacaagaaccccaagctgacccggatgctgaccttcaagttctacatgcccaagaaggccaccgagctgaagcacctccagtgcctggaagaggaactgaagcccctggaagaagtgctgaatctggcccagagcaagaacttccacctgaggccaagggacctgatctccaacatcaacgtgatcgtgctggaactgaaaggcagcgagacaaccttcatgtgcgagtacgccgacgagacagctaccatcgtggaatttctgaatcggtggatcaccttctgccagagcatcatcagcaccctgacaggaggcggatctgccagaagcgaggacagatacagaaaccccaaaggcggaggcggatctgctagaagcgaagatcggtatcggaaccccaag

SEQ ID NO: 3119 - DNA, 507 bp, synthetic construct
  source 1..507: mol_type = other DNA
atgtaccggatgcagctgctgagctgtatcgccctgtctctggccctggtcacaaatagcgccagaagcgaggacagatacagaaaccccaaaggcggaggcggatctgcccctaccagcagcagcaccaagaaaacccagctgcaactggaacacctcctgctggacctccagatgatcctgaacggcatcaacaactacaagaaccccaagctgacccggatgctgaccttcaagttctacatgcccaagaaggccaccgagctgaagcacctccagtgcctggaagaggaactgaagcccctggaagaagtgctgaatctggcccagagcaagaacttccacctgaggccaagggacctgatctccaacatcaacgtgatcgtgctggaactgaaaggcagcgagacaaccttcatgtgcgagtacgccgacgagacagctaccatcgtggaatttctgaatcggtggatcaccttctgccagagcatcatcagcaccctgaca

SEQ ID NO: 3120 - DNA, 1203 bp, synthetic construct
  source 1..1203: mol_type = other DNA
atgtaccggatgcagctgctgagctgtatcgccctgtctctggccctggtcacaaatagcgcccctaccagcagcagcaccaagaaaacccagctgcaactggaacacctcctgctggacctccagatgatcctgaacggcatcaacaactacaagaaccccaagctgacccggatgctgaccttcaagttctacatgcccaagaaggccaccgagctgaagcacctccagtgcctggaagaggaactgaagcccctggaagaagtgctgaatctggcccagagcaagaacttccacctgaggccaagggacctgatctccaacatcaacgtgatcgtgctggaactgaaaggcagcgagacaaccttcatgtgcgagtacgccgacgagacagctaccatcgtggaatttctgaatcggtggatcaccttctgccagagcatcatcagcaccctgacaggaggcggatctgacatccagttgacccagtcccccagctcactcagcgccagtgtgggggaccgggtgaccattacctgtaaagccagtcagagtgtggactatgacggggatagcttcctgaattggtatcagcagaagcctggcaaagccccaaagctgctgatctacgctgcatctaatctggagtcaggcgtgccttccaggttctccggtagtgggtctgggaccgatttcacattgaccatttcatccctccaacccgaggatttcgctacatattactgtcagcagtccaatgaggaccctctcacctttggccagggcaccaaagttgaaattaagagaggcggaggcggaagtggaggcggaggatctggcggcggaggctctgaagtccaacttgtggagtctggagggggcctggtgcagcccggcggctctctcagactgtcttgtgcggcaagcggctacaccttcagctcttactggatagaatgggtgaggcaggcacctggaaagggactggagtggattggagagattctgccaggagggggagatacaaattacaatgaaatcttcaaggggcgggccaccttttcagcggataccagcaagaatacagcttacctgcagatgaatagcctccgggcagaagataccgctgtttattattgcacgagacgggtgccaataagactggactattgggggcaagggactcttgtcaccgtcagttca

SEQ ID NO: 3121 - DNA, 534 bp, synthetic construct
  source 1..534: mol_type = other DNA
atgagaatcagcaagccccacctgagatccatcagcatccagtgctacctgtgcctgctgctgaacagccactttctgacagaggccggcatccacgtgttcatcctgggctgtttttctgccggcctgcctaagaccgaggccaactgggttaacgtgatctccgacctgaagaagatcgaggacctgatccagtccatgcacatcgacgccacactgtacaccgagagcgacgtgcaccctagctgtaaagtgaccgccatgaagtgctttctgctggaactgcaagtgatctccctggaaagcggcgacgccagcatccacgacaccgtgaagaacctgattatcctggctaacaacagcctgagcagcaacggcaacgtgaccgagtccggctgtaaagagtgcgaggaactggaagagaagaatatcaaagagttcctccagagcttcgtgcacatcgtgcagatgttcatcaacaccagcggcggaggcggatctgctagaagcgaagatcggtatcggaaccccaag

SEQ ID NO: 3122 - DNA, 579 bp, synthetic construct
  source 1..579: mol_type = other DNA
atgagaatcagcaagccccacctgagatccatcagcatccagtgctacctgtgcctgctgctgaacagccactttctgacagaggccggcatccacgtgttcatcctgggctgtttttctgccggcctgcctaagaccgaggccaactgggttaacgtgatctccgacctgaagaagatcgaggacctgatccagtccatgcacatcgacgccacactgtacaccgagagcgacgtgcaccctagctgtaaagtgaccgccatgaagtgctttctgctggaactgcaagtgatctccctggaaagcggcgacgccagcatccacgacaccgtgaagaacctgattatcctggctaacaacagcctgagcagcaacggcaacgtgaccgagtccggctgtaaagagtgcgaggaactggaagagaagaatatcaaagagttcctccagagcttcgtgcacatcgtgcagatgttcatcaacaccagcggtggaggctctgccagaagcgaggacagatacagaaaccccaaaggcggaggcggatctgctagaagcgaagatcggtatcggaaccccaag

SEQ ID NO: 3123 - DNA, 567 bp, synthetic construct
  source 1..567: mol_type = other DNA
atgagaatcagcaagccccacctgagatccatcagcatccagtgctacctgtgcctgctgctgaacagccactttctgacagaggccggcatccacgtgttcatcctgggctgtttttctgccggcctgcctaagaccgaggccgccagaagcgaggacagatacagaaaccccaaaggcggaggcggatctgctagaagcgaagatcggtatcggaaccccaagaactgggttaacgtgatctccgacctgaagaagatcgaggacctgatccagtccatgcacatcgacgccacactgtacaccgagagcgacgtgcaccctagctgtaaagtgaccgccatgaagtgctttctgctggaactgcaagtgatctccctggaaagcggcgacgccagcatccacgacaccgtgaagaacctgattatcctggctaacaacagcctgagcagcaacggcaacgtgaccgagtccggctgtaaagagtgcgaggaactggaagagaagaatatcaaagagttcctccagagcttcgtgcacatcgtgcagatgttcatcaacaccagc

SEQ ID NO: 3124 - DNA, 33 bp, synthetic construct
  source 1..33: mol_type = other DNA
gctagaagcgaagatcggtatcggaaccccaag

SEQ ID NO: 3125 - DNA, 39 bp, synthetic construct
  source 1..39: mol_type = other DNA
gcaagaagtgaagatcgctacaggaaccctaaggggtca

SEQ ID NO: 3126 - DNA, 48 bp, synthetic construct; identical to SEQ ID NO: 3101
  source 1..48: mol_type = other DNA

SEQ ID NO: 3127 - DNA, 162 bp, synthetic construct
  source 1..162: mol_type = other DNA
gcaagaagtgaagatcgctacaggaaccctaaggggtcaggaggaagcgaacttcctacacagggcaccttcagcaacgtgtccaccaatgtgtccccagccaagcctaccaccaccgcctgcgcacgcagcgaggacaggtataggaaccccaaaggaagt

SEQ ID NO: 3128 - DNA, 417 bp, synthetic construct
  source 1..417: mol_type = other DNA
gcaagaagtgaagatcgctacaggaaccctaaggggtcaggaggaagcgaacttcctacacagggcaccttcagcaacgtgtccaccaatgtgtccccagccaagcctaccaccaccgcctgcgcacgcagcgaggacaggtataggaaccccaaaggaagtggcggatctcctgctcctagacctcctacaccagctcctacaatcgccagccagcctctgtctctcagacccgaagcctgtagacctgctgctggcggagctgtgcataccagaggactggatttcgcctgcgacatctacatctgggctcctctggctggcacatgtggcgttctgctgctgagcctggtcatcaccctgtactgcaaccaccggaacaggcggagagtgtgcaagtgccctagacctgtggtt

SEQ ID NO: 3129 - DNA, 726 bp, synthetic construct
  source 1..726: mol_type = other DNA
atggccctgcctgtgacagctctgctgctgcctctggcactgctgctgcacgccgccagacctgcaagaagtgaagatcgctacaggaaccctaaggggtcaggaggaagcgcccctaccagcagcagcaccaagaaaacccagctgcaactggaacacctcctgctggacctccagatgatcctgaacggcatcaacaactacaagaaccccaagctgacccggatgctgaccttcaagttctacatgcccaagaaggccaccgagctgaagcacctccagtgcctggaagaggaactgaagcccctggaagaagtgctgaatctggcccagagcaagaacttccacctgaggccaagggacctgatctccaacatcaacgtgatcgtgctggaactgaaaggcagcgagacaaccttcatgtgcgagtacgccgacgagacagctaccatcgtggaatttctgaatcggtggatcaccttctgccagagcatcatcagcaccctgacagccaagcctacaacaacccctgctcctagacctcctacaccagctcctacaatcgccagccagcctctgtctctcagacccgaagcctgtagaccagctgctggcggagctgtgcataccagaggactggatttcgcctgcgacatctacatctgggctcctctggctggcacatgtggcgttctgctgctgtccctggtcatcaccctgtactgt

SEQ ID NO: 3130 - DNA, 666 bp, synthetic construct
  source 1..666: mol_type = other DNA
atgtaccggatgcagctgctgagctgtatcgccctgtctctggccctggtcacaaatagcgcaagaagtgaagatcgctacaggaaccctaaggggtcaggaggaagcaactgggttaacgtgatctccgacctgaagaagatcgaggacctgatccagtccatgcacatcgacgccacactgtacaccgagagcgacgtgcaccctagctgtaaagtgaccgccatgaagtgctttctgctggaactgcaagtgatctccctggaaagcggcgacgccagcatccacgacaccgtgaagaacctgattatcctggctaacaacagcctgagcagcaacggcaacgtgaccgagtccggctgtaaagagtgcgaggaactggaagagaagaatatcaaagagttcctccagagcttcgtgcacatcgtgcagatgttcatcaacaccagcaagatcgaagtgatgtaccctcctccttacctggacaacgagaagtccaacggcaccatcatccacgtgaagggcaagcacctgtgtccttctccactgttccccggacctagcaagcctttctgggtgctcgttgttgttggcggcgtgctggcctgttacagcctgctggttaccgtggccttcatcatcttttgggtccgaagcaagcggagc

SEQ ID NO: 3131 - DNA, 666 bp, synthetic construct; identical to SEQ ID NO: 3130
  source 1..666: mol_type = other DNA

SEQ ID NO: 3132 - DNA, 789 bp, synthetic construct
  source 1..789: mol_type = other DNA
atgtaccggatgcagctgctgagctgtatcgccctgtctctggccctggtcacaaatagcaactgggttaacgtgatctccgacctgaagaagatcgaggacctgatccagtccatgcacatcgacgccacactgtacaccgagagcgacgtgcaccctagctgtaaagtgaccgccatgaagtgctttctgctggaactgcaagtgatctccctggaaagcggcgacgccagcatccacgacaccgtggaaaacctgattatcctggctaacaacagcctgagcagcaacggcaacgtgaccgagtccggctgtaaagagtgcgaggaactggaagagaagaatatcaaagagttcctccagagcttcgtgcacatcgtgcagatgttcatcaacaccagcgcaagaagtgaagaccgttacaggaaccccaaaggcagcggcggcagcgaacttcctacacagggcaccttcagcaacgtgtccaccaatgtgtccccagccaagcctaccaccacagcctgtgccagatctgaggaccggtatcggaaccctaaaggctctggcggctctaagatcgaagtgatgtaccctcctccttacctggacaacgagaagtccaacggcaccatcatccacgtgaagggcaagcacctgtgtccttctccactgttccccggacctagcaagcctttctgggtgctcgttgttgttggcggcgtgctggcctgttacagcctgctggttaccgtggccttcatcatcttttgggtccgaagcaagcggagc

SEQ ID NO: 3133 - DNA, 666 bp, synthetic construct
  source 1..666: mol_type = other DNA
atgtaccggatgcagctgctgagctgtatcgccctgtctctggccctggtcacaaatagcaactgggttaacgtgatctccgacctgaagaagatcgaggacctgatccagtccatgcacatcgacgccacactgtacaccgagagcgacgtgcaccctagctgtaaagtgaccgccatgaagtgctttctgctggaactgcaagtgatctccctggaaagcggcgacgccagcatccacgacaccgtggaaaacctgattatcctggctaacaacagcctgagcagcaacggcaacgtgaccgagtccggctgtaaagagtgcgaggaactggaagagaagaatatcaaagagttcctccagagcttcgtgcacatcgtgcagatgttcatcaacaccagcgcaagaagtgaagaccgttacaggaaccccaaaggcagcggcggcagcaagatcgaagtgatgtaccctcctccttacctggacaacgagaagtccaacggcaccatcatccacgtgaagggcaagcacctgtgtccttctccactgttccccggacctagcaagcctttctgggtgctcgttgttgttggcggcgtgctggcctgttacagcctgctggttaccgtggccttcatcatcttttgggtccgaagcaagcggagc

SEQ ID NO: 3134 - DNA, 723 bp, synthetic construct
  source 1..723: mol_type = other DNA
atgtaccggatgcagctgctgagctgtatcgccctgtctctggccctggtcacaaatagcgcccctaccagcagcagcaccaagaaaacccagctgcaactggaacacctcctgctggacctccagatgatcctgaacggcatcaacaactacaagaaccccaagctgacccggatgctgaccttcaagttctacatgcccaagaaggccaccgagctgaagcacctccagtgcctggaagaggaactgaagcccctggaagaagtgctgaatctggcccagagcaagaacttccacctgaggccaagggacctgatctccaacatcaacgtgatcgtgctggaactgaaaggcagcgagacaaccttcatgtgcgagtacgccgacgagacagctaccatcgtggaatttctgaatcggtggatcaccttctgccagagcatcatcagcaccctgacagcaagaagtgaagaccgttacaggaaccccaaaggcagcggcggcagcgccaagcctacaacaacccctgctcctagacctcctacaccagctcctacaatcgccagccagcctctgtctctcagacccgaagcctgtagaccagctgctggcggagctgtgcataccagaggactggatttcgcctgcgacatctacatctgggctcctctggctggcacatgtggcgttctgctgctgtccctggtcatcaccctgtactgt

SEQ ID NO: 3135 - DNA, 693 bp, synthetic construct
  source 1..693: mol_type = other DNA
atggctagactggccctgtctcctgtgtctagccactggctggttgctctgctgctgcttctgtctgccgctgaacctgtgcctgccgccaaaagcgaggatctgtaccccaatcctaagggcagcgcctgctccagaatctggcagagccctcggtttatcgcccggaagaggggcttcaccgtgaagatgcactgctacgtgaccaacagcaccttcagcatcgtgtcctggctgcggaagcgggaaaccgacaaagaaccccagcaagtgaacctggaacagggccacatgcaccagacacagaacagctccgtgaccacactgattatccaggacatccgcttcgaggacaacgggatctacttctgccagcaagagtgcagcaagaccagcgaggtgtacagaggctgtggcaccgagctgagagtgatgggctttagcacactggcccagctgaagcagcggaacacactgaaggacggcatcattatgatccagacgctgctcatcatcctgtttattatcgtgcccatcttcctgctgctggacaaggacgatagcaaggccggcatggaagaggaccacacctacgaaggactggacatcgaccagaccgccacatacgaggacatcgtgaccctgagaaccggcgaagtgaagtggagcgtgggagagcaccctggacaagaa

SEQ ID NO: 3136 - DNA, 48 bp, synthetic construct
  source 1..48: mol_type = other DNA
gccagacctgccaagagcgaggatctgtaccccaatcctaaaggcagc

SEQ ID NO: 3137 - DNA, 426 bp, synthetic construct
  source 1..426: mol_type = other DNA
gccagacctgccaagagcgaggatctgtaccccaatcctaaaggcagcggaggaagcgaacttcctacacagggcaccttcagcaacgtgtccaccaatgtgtccccagccaagcctaccaccaccgcctgcgccaagtctgaggacctgtatcctaatccaaaaggatctggcggatctcctgctcctagacctcctacaccagctcctacaatcgccagccagcctctgtctctcagacccgaagcctgtagacctgctgctggcggagctgtgcataccagaggactggatttcgcctgcgacatctacatctgggctcctctggctggcacatgtggcgttctgctgctgagcctggtcatcaccctgtactgcaaccaccggaacaggcggagagtgtgcaagtgccctagacctgtggtt

SEQ ID NO: 3138 - DNA, 489 bp, synthetic construct
  source 1..489: mol_type = other DNA
atggccctgcctgtgacagctctgctgctgcctctggcactgctgctgcacgccgccagacctgccagacctgccaagagcgaggatctgtaccccaatcctaaaggcagcggaggaagcgaacttcctacacagggcaccttcagcaacgtgtccaccaatgtgtccccagccaagcctaccaccaccgcctgcgccaagtctgaggacctgtatcctaatccaaaaggatctggcggatctcctgctcctagacctcctacaccagctcctacaatcgccagccagcctctgtctctcagacccgaagcctgtagacctgctgctggcggagctgtgcataccagaggactggatttcgcctgcgacatctacatctgggctcctctggctggcacatgtggcgttctgctgctgagcctggtcatcaccctgtactgcaaccaccggaacaggcggagagtgtgcaagtgccctagacctgtggtt

SEQ ID NO: 3139 - DNA, 42 bp, synthetic construct
  source 1..42: mol_type = other DNA
gccagacctgccaagagcgaggatctgtaccccaatcctaaa

SEQ ID NO: 3140 - DNA, 405 bp, synthetic construct
  source 1..405: mol_type = other DNA
gccagacctgccaagagcgaggatctgtaccccaatcctaaagaacttcctacacagggcaccttcagcaacgtgtccaccaatgtgtccccagccaagcctaccaccaccgcctgcgccaagtctgaggacctgtatcctaatccaaaaggcggatctcctgctcctagacctcctacaccagctcctacaatcgccagccagcctctgtctctcagacccgaagcctgtagacctgctgctggcggagctgtgcataccagaggactggatttcgcctgcgacatctacatctgggctcctctggctggcacatgtggcgttctgctgctgagcctggtcatcaccctgtactgcaaccaccggaacaggcggagagtgtgcaagtgccctagacctgtggtt

SEQ ID NO: 3141 - DNA, 468 bp, synthetic construct
  source 1..468: mol_type = other DNA
atggccctgcctgtgacagctctgctgctgcctctggcactgctgctgcacgccgccagacctgccagacctgccaagagcgaggatctgtaccccaatcctaaagaacttcctacacagggcaccttcagcaacgtgtccaccaatgtgtccccagccaagcctaccaccaccgcctgcgccaagtctgaggacctgtatcctaatccaaaaggcggatctcctgctcctagacctcctacaccagctcctacaatcgccagccagcctctgtctctcagacccgaagcctgtagacctgctgctggcggagctgtgcataccagaggactggatttcgcctgcgacatctacatctgggctcctctggctggcacatgtggcgttctgctgctgagcctggtcatcaccctgtactgcaaccaccggaacaggcggagagtgtgcaagtgccctagacctgtggtt

SEQ ID NO: 3142 - DNA, 30 bp, synthetic construct
  source 1..30: mol_type = other DNA
gaggagcccctggtggtgaaggtggaggag

SEQ ID NO: 3143 - DNA, 21 bp, synthetic construct
  source 1..21: mol_type = other DNA
atgctgcagatggccggccag

SEQ ID NO: 3144 - DNA, 23 bp, synthetic construct
  source 1..23: mol_type = other DNA
ggctgtggatgcacaaggtgccc

SEQ ID NO: 3145 - DNA, 21 bp, synthetic construct
  source 1..21: mol_type = other DNA
agcaagtgggtgttcgagcac

SEQ ID NO: 3146 - DNA, 21 bp, synthetic construct
  source 1..21: mol_type = other DNA
agcaagtgggtgttcgagcac

SEQ ID NO: 3147 - DNA, 24 bp, synthetic construct
  source 1..24: mol_type = other DNA
gagcccctggtggtgaaggtggag

SEQ ID NO: 3148 - DNA, 21 bp, synthetic construct
  source 1..21: mol_type = other DNA
gagcccctggtggtgaaggtg

SEQ ID NO: 3149 - DNA, 27 bp, synthetic construct
  source 1..27: mol_type = other DNA
accaaggaggaccccaacccccccatc

SEQ ID NO: 3150 - DNA, 24 bp, synthetic construct
  source 1..24: mol_type = other DNA
accaaggaggaccccaaccccccc

SEQ ID NO: 3151 - DNA, 21 bp, synthetic construct
  source 1..21: mol_type = other DNA
accaaggaggaccccaacccc

SEQ ID NO: 3152 - DNA, 21 bp, synthetic construct
  source 1..21: mol_type = other DNA
gaccccaacttctggctgcag

SEQ ID NO: 3153 - DNA, 30 bp, synthetic construct
  source 1..30: mol_type = other DNA
cagcccgccctgccccagatcgtggccacc

SEQ ID NO: 3154 - DNA, 24 bp, synthetic construct
  source 1..24: mol_type = other DNA
cccgccctgccccagatcgtggcc

SEQ ID NO: 3155 - DNA, 18 bp, synthetic construct
  source 1..18: mol_type = other DNA
agcggccccgtgaaggag

SEQ ID NO: 3156 - DNA, 27 bp, synthetic construct
  source 1..27: mol_type = other DNA
gagaccgagctgagcgtgagcgccgag

SEQ ID NO: 3157 - DNA, 24 bp, synthetic construct
  source 1..24: mol_type = other DNA
accgagctgagcgtgagcgccgag

SEQ ID NO: 3158 - DNA, 21 bp, synthetic construct
  source 1..21: mol_type = other DNA
gacttcgccgagagcggccag

SEQ ID NO: 3159 - DNA, 24 bp, synthetic construct
  source 1..24: mol_type = other DNA
atcgacatggaccacgaggccagc

SEQ ID NO: 3160 - DNA, 21 bp, synthetic construct
  source 1..21: mol_type = other DNA
aacttcgaggagagccagacc

SEQ ID NO: 3161 - DNA, 21 bp, synthetic construct
  source 1..21: mol_type = other DNA
ggcgtgcagtgggtgcgcccc

SEQ ID NO: 3162 - DNA, 18 bp, synthetic construct
  source 1..18: mol_type = other DNA
aaccaggacctgcccgtg

SEQ ID NO: 3163 - DNA, 24 bp, synthetic construct
  source 1..24: mol_type = other DNA
ccctacaacaagatcaaccagcgc

SEQ ID NO: 3164 - DNA, 21 bp, synthetic construct
  source 1..21: mol_type = other DNA
cccggctggttcctggacagc

SEQ ID NO: 3165 - DNA, 30 bp, synthetic construct
  source 1..30: mol_type = other DNA
ttcccccaggaccgccccttcgaggacacc

SEQ ID NO: 3166 - DNA, 27 bp, synthetic construct
  source 1..27: mol_type = other DNA
ccccaggaccgccccttcgaggacacc

SEQ ID NO: 3167 - DNA, 24 bp, synthetic construct
  source 1..24: mol_type = other DNA
ccccaggaccgccccttcgaggac

SEQ ID NO: 3168 - DNA, 30 bp, synthetic construct
  source 1..30: mol_type = other DNA
caggtggacatcgtgcccagccagggcgag

SEQ ID NO: 3169 - DNA, 18 bp, synthetic construct
  source 1..18: mol_type = other DNA
gccagcgacagcgagccc

SEQ ID NO: 3170 - DNA, 63 bp, synthetic construct
  source 1..63: mol_type = other DNA
atggccttaccagtgaccgccttgctcctgccgctggccttgctgctccacgccgccaggccg

SEQ ID NO: 3171 - DNA, 57 bp, synthetic construct
  source 1..57: mol_type = other DNA
atggattggatatggaggatactttttctcgtgggggcagcaaccggggctcattcc

SEQ ID NO: 3172 - DNA, 327 bp, synthetic construct
  source 1..327: mol_type = other DNA
caatctgtgctgacccagcctccaagcgtgtccgtttctcctggacagaccgccagcatcacctgtagcggagataagctgggcgacaagttcgcctgctggtatcagcagaagcccggccagtctcctgtgctggtcatctaccaggatagcaagaggcccagcggcatccccgagagattttccggcagcaacagcggcaataccgccacactgacaatcagcggcacccaggctatggacgaggccgactactattgccaggcttgggattccgatggcaaggccacagtggtgtttggcaccggcaccaaggtggaaatcaag

SEQ ID NO: 3173 - DNA, 327 bp, synthetic construct
  source 1..327: mol_type = other DNA
caatctgtgctgacccagcctccaagcgtgtccgtttctcctggacagaccgccagcatcacctgtagcggagataagctgggcgacaagtacgcctgctggtatcagcagaagcccggccagtctcctgtgctggtcatctaccaggatagcaagaggcccagcggcatccccgagagattttccggcagcaacagcggcaataccgccacactgacaatcagcggcacccaggctatggacgaggccgactactattgccaggcttgggattccgatggcaaggccacagtggtgtttggcaccggcaccaaggtggaaatcaag

SEQ ID NO: 3174 - DNA, 327 bp, synthetic construct
  source 1..327: mol_type = other DNA
caatctgtgctgacccagcctccaagcgtgtccgtttctcctggacagaccgccagcatcacctgtagcggagataagctgggcgacaagtacgcctgctggtatcagcagaagcccggccagtctcctgtgctggtcatctaccaggataccaagaggcccagcggcatccccgagagattttccggcagcaacagcggcaataccgccacactgacaatcagcggcacccaggctatggacgaggccgactactattgccaggcttgggattccgatggcaaggccacagtggtgtttggcaccggcaccaaggtggaaatcaag

SEQ ID NO: 3175 - DNA, 327 bp, synthetic construct
  source 1..327: mol_type = other DNA
caatctgtgctgacccagcctccaagcgtgtccgtttctcctggacagaccgccagcatcacctgtagcggagataagctgggcaataagtacgcctgctggtatcagcagaagcccggccagtctcctgtgctggtcatctaccaggatagcaagaggcccagcggcatccccgagagattttccggcagcaacagcggcaataccgccacactgacaatcagcggcacccaggctatggacgaggccgactactattgccaggcttgggattccgatggcaaggccacagtggtgtttggcaccggcaccaaggtggaaatcaag

SEQ ID NO: 3176 - DNA, 342 bp, synthetic construct
  source 1..342: mol_type = other DNA
aacttcatgctgacccagcctcacagcgtgtccgagtctccaggcaagaccgtgaccatcagctgcacaagaagcagcggctctatcgccagcaactacgtgcagtggtatcagcagaggccaggcagcgcacctaccaccgtgatctacgaggataaccagaggccaagcggcgtgcccgatagattttctggcagcatcgacagcagcagcaacagcgccagcctgacaatcagcggcctgaaaacagaggacgaggccgactactactgccagagctatgatctggctgccgacgtgcgcgtggtgtttggcactggaacaaaagtgaccgtgagctcc

SEQ ID NO: 3177 - DNA, 342 bp, synthetic construct
  source 1..342: mol_type = other DNA
aacttcatgctgacccagcctcacagcgtgtccgagtctccaggcaagaccgtgaccatcagctgcacaagaagaagcggctctatcgccagcaactacgtgcagtggtatcagcagaggccaggcagcgcacctaccaccgtgatctacgaggataaccagaggccaagcggcgtgcccgatagattttctggcagcatcgacagcagcagcaacagcgccagcctgacaatcagcggcctgaaaacagaggacgaggccgactactactgccagagctatgatctggctgccgacgtgcgcgtggtgtttggcactggaacaaaagtgaccgtgagctcc

SEQ ID NO: 3178 - DNA, 342 bp, synthetic construct
  source 1..342: mol_type = other DNA
aacttcatgctgacccagcctcacagcgtgtccgagtctccaggcaagaccgtgaccatcagctgcacaagaaacagcggctctatcgccagcaactacgtgcagtggtatcagcagaggccaggcagcgcacctaccaccgtgatctacgaggataaccagaggccaagcggcgtgcccgatagattttctggcagcatcgacagcagcagcaacagcgccagcctgacaatcagcggcctgaaaacagaggacgaggccgactactactgccagagctatgatctggctgccgacgtgcgcgtggtgtttggcactggaacaaaagtgaccgtgagctcc

SEQ ID NO: 3179 - DNA, 342 bp, synthetic construct
  source 1..342: mol_type = other DNA
aacttcatgctgacccagcctcacagcgtgtccgagtctccaggcaagaccgtgaccatcagctgcacaagaagcagcggctctatcgccaacaactacgtgcagtggtatcagcagaggccaggcagcgcacctaccaccgtgatctacgaggataaccagaggccaagcggcgtgcccgatagattttctggcagcatcgacagcagcagcaacagcgccagcctgacaatcagcggcctgaaaacagaggacgaggccgactactactgccagagctatgatctggctgccgacgtgcgcgtggtgtttggcactggaacaaaagtgaccgtgagctcc

SEQ ID NO: 3180 - DNA, 315 bp, synthetic construct
  source 1..315: mol_type = other DNA
gacatcgtgatgacacagacccctgccacactgtctgtgtctgccggcgagagagtgaccattacctgcaaagccagccagagcgtgtccaacgacgtgacctggtatcagcagaagcctggacaggcccctcggctgctgatctacagcgccagcaatagatacagcggcgtgcccgccagattttccggctctggatacggcaccgagttcaccttcaccatcagcagcgtgcagagcgaggacttcgccgtgtacttctgccagcaagactacagctctttcggccagggcaccaagctggaaatcaagaga

SEQ ID NO: 3181 - DNA, 315 bp, synthetic construct
  source 1..315: mol_type = other DNA
gacatccagatgacacagagccctagcagcctgtctgccagcgtgggagacagagtgaccatcacatgcaaggccagccagagcgtgtccaacgacgtgacctggtatcagcagaagcctggacaggcccctaagctgctgatctacagcgccagcaacagatacagcggagtgcccgccagattttccggctctggctacggcaccgagttcacctttaccatcagcagcgtgcagagcgaggacttcgccgtgtacttctgccagcaagactacagcagcttcggccagggcaccaagctggaaatcaagaga

SEQ ID NO: 3182 - DNA, 327 bp, synthetic construct
  source 1..327: mol_type = other DNA
gacatccagatgacacagagccctagcagcctgtctgccagcgtgggagacagagtgaccatcacctgtagagccagcagcagcgtgtccagcagctacctgcattggtatcagcagaagcccggcaaggcccctaaagtgtggatctacagcaccagcaatctggcctctggcgtgcccagcagattttctggctctggcagcggcaccgacttcaccctgacaatatctagcctccagcctgaggacttcgccacctactactgccagcagtacagcggctaccccatcacctttggacagggcaccaaggtggaaatcaagaga

SEQ ID NO: 3183 - DNA, 327 bp, synthetic construct
  source 1..327: mol_type = other DNA
gagaacgtgctgacacagagccctgccatcatgagtgcctctccaggcgagaaagtgaccatgacctgtagagccagcagcagcgtgtccagcagctacctgcactggtatcagcagaagtccggcgcaagccccaaagtgtggatctacagcaccagcaatctggcctctggcgtgccaggcagattttctggctctggcagcggcacaagctacagcctgacaatcagctccgtggaagccgaagatgccgccacctactactgccagcagtacagcggctaccccatcacatttggagccggcaccaaggtggaagtgaagaga

SEQ ID NO: 3184 - DNA, 339 bp, synthetic construct
  source 1..339: mol_type = other DNA
gacatcgtgatgacacagagccctgatagcctggccgtgtctctgggagagagagccaccatcaactgcaagagcagccagagcctgctgaacagcggcaaccagaagaactacctggcctggtatcagcagaagcccggccagcctcctaagctgctgatctactggggcagcaccagatccacaggcgtgcccgatagattttctggctctggcagcggcaccgacttcaccctgacaatttctagcctgcaagccgaggacgtggccgtgtactactgccagaacgactacacataccccttcaccttcggccagggcaccaagctggaaatcaaa

SEQ ID NO: 3185 - DNA, 339 bp, synthetic construct
  source 1..339: mol_type = other DNA
gacatcgtgatgacacagagccctgatagcctggccgtgtctctgggagagagagccaccatcaactgcaagagcagccagagcctgctgaacagcggcaacaacaagaactacgtgacatggtatcagcagaagcccggccagcctcctaagctgctgatctactggggcagcaccagatccacaggcgtgcccgatagattttctggctctggcagcggcaccgacttcaccctgacaatttctagcctgcaagccgaggacgtggccgtgtactactgccagaacgactacacataccccttcaccttcggccagggcaccaagctggaaatcaaa

SEQ ID NO: 3186 - DNA, 324 bp, synthetic construct
  source 1..324: mol_type = other DNA
gacatccagatgacacagagccctagcagcctgtctgccagcgtgggagacagagtgaccatcacatgcaaggccagcgaccacatcaacaactggctggcctggtatcagcagaagcctggacaggcccctaagctgctgatctacggcgctaccacactggaaacaggcgtgcccagcagattttctggcagcggctctggcaccgactacaccctgacaatatccagcctccagcctgaggacttcgccacctactactgtcagcagagctggaacaccccttggacattcggccagggcaccaagctggaaatcaagaga

SEQ ID NO: 3187 - DNA, 324 bp, synthetic construct; identical to SEQ ID NO: 3186
  source 1..324: mol_type = other DNA

SEQ ID NO: 3188 - DNA, 324 bp, synthetic construct
  source 1..324: mol_type = other DNA
gacatccagatgacacagagccctagcagcctgtctgccagcgtgggagacagagtgaccatcacatgcaaggccagcgaccacatcaacaactggctggcctggtatcagcagaagcctggcaaggcccctaagctgctgatctacggcgctaccacactggaaacaggcgtgcccagcagattttctggcagcggctctggcaccgacttcaccctgacaatatccagcctccagcctgaggacttcgccacctactactgtcagcagagctggaacaccccttggacattcggccagggcaccaaggtggaaatcaagaga

SEQ ID NO: 3189 - DNA, 324 bp, synthetic construct; identical to SEQ ID NO: 3188
  source 1..324: mol_type = other DNA

SEQ ID NO: 3190 - DNA, 321 bp, synthetic construct
  source 1..321: mol_type = other DNA
cagatcgtgctgacacagagccctgccatcatgtccgcttctcccggcgagaaagtgaccatgacatgtagcgccagcagcagcgtgtccttcatgcactggtatcagcagaagtccggcacaagccccaagcggtggatctacgataccagcacactggcctctggcgtgccagccagatttggcggatctggcagcggcacatcttacagcctgaccatcagcagcatggaagccgaagatgccgccacctactactgccagcagtggtccagcaatcccctgacatttggagccggcaccaagctggaactgaagaga

SEQ ID NO: 3191 - DNA, 336 bp, synthetic construct
  source 1..336: mol_type = other DNA
gacatcgtgatgacacagagccctctgagcctgcctgtgacacctggcgaacctgccagcatcagctgtagaagcagcaagagcctgctgcacagcaacggcatcacctacctgtactggtatctccagaagcctggacagagcccacagctgctgatctaccggatgagcaatagagccagcggcgtgcccgatagattttctggctctggcagcggcaccgacttcaccctgaagattagcagagtggaagccgaggacgtgggcgtgtaccattgtggacagctgctcgaaaacccctacaccttcggccagggcaccaagctggaaatcaaa

SEQ ID NO: 3192 - DNA, 333 bp, synthetic construct
  source 1..333: mol_type = other DNA
gagatcgtgctgacacagagccctggcacactgtcactgtctccaggcgaaagagccacactgagctgcaaagccagccagagcgtgtccatcagcggcatcaacctgatgaactggtatcagcagaagcccggccagcagccaagactgctgatctaccacgccagcatcctggcctctggcatccccgatagattttctggcagcggctccggcaccgacttcaccctgacaatcagcagactggaacccgaggacttcgccgtgtactactgccagcagaccagagagagccctctgacattcggccagggcacaagactggaaatcaaa

SEQ ID NO: 3193 - DNA, 336 bp, synthetic construct; identical to SEQ ID NO: 3191
  source 1..336: mol_type = other DNA

SEQ ID NO: 3194 - DNA, 333 bp, synthetic construct; identical to SEQ ID NO: 3192
  source 1..333: mol_type = other DNA

SEQ ID NO: 3195 - DNA, 321 bp, synthetic construct
  source 1..321: mol_type = other DNA
gagatcgtgctgacacagtctcccgccacactgtcactgtctccaggcgaaagagccacactgagctgtagagccagccagagcgtgtcctcttacctggcctggtatcagcagaagcctggacaggctccccggctgctgatctacgatgccagcaatagagccacaggcatccccgccagattttctggctctggcagcggcaccgatttcaccctgaccataagcagcctggaacctgaggacttcgccgtgtactactgccagcagagaagcaactggcctcctacattcggccagggcaccaaggtggaaatcaaa

SEQ ID NO: 3196 - DNA, 324 bp, synthetic construct
  source 1..324: mol_type = other DNA
gacatccagatgacacagagccctagcagcctgtctgccagcgtgggagacagagtgaccatcacctgtagagccagccaggacgtgcggaacatcgtcgtgtggttccagcagaagcctggcaaggcccctaagctgctgatctacagcggcagctacagatacagcggcgtgcccagcagattttccggctctggctctggcaccgacttcaccctgacaatatccagcctccagcctgaggacttcgccacctactactgccagcagcactacagccctccatacacattcggccagggcaccaaggtggaaatcaagaga

SEQ ID NO: 3197 - DNA, 336 bp, synthetic construct
  source 1..336: mol_type = other DNA
gacatcgtgctgacccagagccctctgagcctggccgtgtctctgggacagcctgccatcatcagctgtagggccagccagagcgtgtcctttgccggcacctctctgatgcactggtatcaccagaagcccggccagcagcccagactgctgatctacagagccagcaacctggaagccggcgtgcccgatagattttccggcagcggcagcaagaccgacttcaccctgaccatcagccccgtggaagccgaagatgccgccacctactactgccagcagagcagagagtacccctacaccttcggcggaggcaccaagctggaaatcaagagg

SEQ ID NO: 3198 - DNA, 327 bp, synthetic construct
  source 1..327: mol_type = other DNA
gacatccagatgacacagagccctagcagcctgtctgccagcgtgggagacagagtgaccatcacctgtagagccagccaggacgtgaacacagccgtggcttggtatcagcagaagcctggcaaggcccctaagctgctgatctacagcgcctacttcctgtacagcggcgtgcccagcagattcagcggaagcagaagcggcaccgacttcaccctgacaatatccagcctccagcctgaggacttcgccacctactactgccagcagtacagcagatacagccccgtgacctttggacagggcaccaaggtggaaatcaagaga

SEQ ID NO: 3199 - DNA, 327 bp, synthetic construct
  source 1..327: mol_type = other DNA
gacatccagatgacacagagccctagcagcctgtctgccagcgtgggagacagagtgaccatcacctgtagagccagccaggacatcaacacagccgtggcttggtatcagcagaagcctggcaaggcccctaagctgctgatctacagcgcctacttcctgtacagcggcgtgcccagcagattcagcggaagcagaagcggcaccgacttcaccctgacaatatccagcctccagcctgaggacttcgccacctactactgccagcagtacagcagatacagccccgtgacctttggacagggcaccaaggtggaaatcaagaga

SEQ ID NO: 3200 - DNA, 324 bp, synthetic construct
  source 1..324: mol_type = other DNA
gacatccagatgacacagagccctagcagcctgtctgccagcgtgggagacagagtgaccatcacctgtagagccagccaggatgtgtctacagccgtggcctggtatcagcagaagcctggaaaggcccctaagctgctgatctacagcgccagctttctgtactccggcgtgcccagcagattcagcggaagcagaagcggcaccgacttcaccctgacaatatccagcctccagcctgaggacttcgccacctactactgccagcagtacctgtaccagccttggacattcggccagggcaccaaggtggaaatcaagaga

SEQ ID NO: 3201 - DNA, 324 bp, synthetic construct
  source 1..324: mol_type = other DNA
gacatccagatgacacagagccctagcagcctgtctgccagcgtgggagacagagtgaccatcacatgcaaggccagcgacctgatccacaactggctggcctggtatcagcagaagcctggcaaggcccctaagctgctgatctacggcgctacctctctggaaacaggcgtgcccagcagattttctggcagcggctctggcaccgacttcaccctgacaatatccagcctccagcctgaggacttcgccacctactactgccagcagtactggaccacacctttcaccttcggccagggcaccaaggtggaaatcaaaaga

SEQ ID NO: 3202 - DNA, 321 bp, synthetic construct
  source 1..321: mol_type = other DNA
gagatcgtgctgacacagtctcccgccacactgtcactgtctccaggcgaaagagccacactgagctgtagagccagccagagcgtgtcctcttacctggcctggtatcagcagaagcctggacaggctccccggctgctgatctacgatgccagcaatagagccacaggcatccccgccagattttctggctctggcagcggcaccgatttcaccctgaccataagcagcctggaacctgaggacttcgccgtgtactactgccagcagagaagcaactggcccctgacctttggacagggcaccaaggtggaaatcaaa

SEQ ID NO: 3203 - DNA, 321 bp, synthetic construct
  source 1..321: mol_type = other DNA
gagatcgtgctgacacagtctcccgccacactgtcactgtctccaggcgaaagagccacactgagctgtagagccagccagagcgtgtcctcttacctggcctggtatcagcagaagcctggacaggctccccggctgctgatctacgatgccagcaatagagccacaggcatccccgccagattttctggctctggcagcggcaccgatttcaccctgaccataagcagcctggaacctgaggacttcgccgtgtactactgccagcagagaagcgactggcccctgacatttggcggcggaacaaaggtggaaatcaaa

SEQ ID NO: 3204 - DNA, 324 bp, synthetic construct
  source 1..324: mol_type = other DNA
gacatcgtgatgacccagagccctgccaccctgtccgtgtctccaggcgaaagagccaccctgagctgcagagcttcccagagcgtgtccaacgacgtcgtgtggtatcagcagaagcccggccaggcccccagactgctgatctactacgccagcaacagatacaccggcatccccgccagattcagcggctctggcagcggcaccgagttcaccctgacaatcagcagcctccagagcgaggacttcgccgtgtactactgtcagcaggactacaccagcccctggaccttcggccagggcaccaagctggaaatcaagaga

SEQ ID NO: 3205 - DNA, 321 bp, synthetic construct
  source 1..321: mol_type = other DNA
gacatccagatgacacagagccctagcagcctgtctgccagcgtgggagacagagtgaccatcacctgtagagccagccagagcatcagcagctacctgaactggtatcagcagaagcccggcaaggcccctaaactgctgatctatgccgccagctctctccagagcggagtgcctagcagattttctggcagcggctccggcaccgatttcaccctgacaatatccagcctccagcctgaggacttcgccacctactactgccagcagagctacagcacccctctgacctttggacagggcaccaaggtggaaatcaag

SEQ ID NO: 3206 - DNA, 336 bp, synthetic construct
  source 1..336: mol_type = other DNA
gacatccagatgacacagagccctagcagcctgtctgccagcgtgggagacagagtgaccattacctgtcaggccagcgagaatatctacagcttcctggcctggtatcagcagaagcctggcaaggcccctaagctgctgatctacagcgcctctaaactggccgctggcgtgccaagcagattttctggctctggcagcggcaccgacttcaccctgacaatatctagcctccagcctgaggacttcgccacctactactgccagcagaccaacagatacagcaaccccgacatctacaacgtgttcggccagggcaccaagctgacagttctt

SEQ ID NO: 3207 - DNA, 339 bp, synthetic construct
  source 1..339: mol_type = other DNA
gacatcgtgatgacacagagccccgccacactgagtgtgtctccaggcgagagagccaccatcagctgtagaagcagccagagcatcgtgcacagcaacggcaacacctacctggaatggtatcagcagaagcccggacaggcccctagactgctgatctacaaggtgtccaacagattcagcggcatccccgacagattttccggctctggcagcggcaccgatttcaccctgaccatcagcagactggaacccgaggacttcgccgtgtactactgcttccaaggcagccacgtgccaagaacctttggcggaggcaccaagctggaaatcaagaga

SEQ ID NO: 3208 - DNA, 333 bp, synthetic construct
  source 1..333: mol_type = other DNA
cagtctgctctgacacagcctgcctctgtgtctggctctcctggacagagcatcaccatcagctgtaccggcaccagctctgatgtcggcggctacaattacgtgtcctggtatcagcagcaccccggcaaggcccctaagctgatgatctacgacgtgtccaacagacccagcggcgtgtccaatagattctccggcagcaagagcggcaacaccgccagcctgacaatttctggactgcaagccgaggacgaggccgactacttctgtagcagctacaccagctccagcacacccgtggtttttggcggcggaacaaagctgacagtgctc

SEQ ID NO: 3209 - DNA, 324 bp, synthetic construct
  source 1..324: mol_type = other DNA
gagatcgtgatgacacagagccccggcacactgtcactgtctccaggcgaaagagccacactgagctgtagagccagccagagcgtgtccagctcttacctggcttggtatcagcagaagcccggacaggctcccagactgctgatctacggtgcctctagcagagccacaggcatccccgatagattttctggcagcggctccggcaccgacttcaccctgacaatcagcagactggaacccgaggacttcgccgtgtactactgtcagcagtacggcagcagccctctgacatttggcggcggaacaaaggtggaaatcaaa

SEQ ID NO: 3210 - DNA, 324 bp, synthetic construct
  source 1..324: mol_type = other DNA
gagatcgtgctgacacagtctcccgccacactgtcactgtctccaggcgaaagagccacactgagctgtagagccagccagagcgtgtcctcttacctggcctggtatcagcagaagcctggacaggctccccggctgttgatctacggtgcttctagcagagccacaggcatccccgccagattttctggctctggcagcggcaccgatttcaccctgaccataagcagcctggaacctgaggacttcgccgtgtactactgccagcagagaagcaactggcctccttacacattcggccagggcaccaagctggaaatcaaa

SEQ ID NO: 3211 - DNA, 324 bp, synthetic construct; identical to SEQ ID NO: 3210
  source 1..324: mol_type = other DNA

SEQ ID NO: 3212 - DNA, 324 bp, synthetic construct; identical to SEQ ID NO: 3209
  source 1..324: mol_type = other DNA

SEQ ID NO: 3213 - DNA, 321 bp, synthetic construct
  source 1..321: mol_type = other DNA
gacatccagatgactcagagccccagcagcctgtctgcctctgtgggagacagagtgaccatcacctgtagagccagccagagcatcagctcctacctgaactggtatcagcagaagcccggcaaggcccctaagctgctgatctacgatgccagcacactccagagcggcgtgccaagcagattttctggcagcggctctggcaccgacttcaccctgacaatatccagcctccagcctgaggacttcgccacctactactgtcagcagagcgacggcaaccctaccacctttggacagggcaccaaggtggaaatcaag

SEQ ID NO: 3214 - DNA, 294 bp, synthetic construct
  source 1..294: mol_type = other DNA
gacatccagatgacacagagccctagcagcctgtctgccagcgtgggagacagagtgaccatcacctgtctggcctccgaggacatctacgacaacctggcctggtatcagcagaagcctggcaaggcccctaagctgctgatctactacgccagctctctccaggatggcgtgcccagcagattttctggcagcggctctggcaccgactacaccctgacaatatccagcctccagcctgaggacttcgccacctactactgcctgcaagacagcgagtacccctggacattt

SEQ ID NO: 3215 - DNA, 294 bp, synthetic construct
  source 1..294: mol_type = other DNA
gacatccagatgacacagagccctagcagcctgtctgccagcgtgggagacagagtgaccatcacctgtctggcctccgaggacatctacaacaacctggcctggtatcagcagaagcctggcaaggcccctaagctgctgatctactacgccagctctctccaggatggcgtgcccagcagattttctggcagcggctctggcaccgactacaccctgacaatatccagcctccagcctgaggacttcgccacctactactgcctgcaagacagcgagtacccctggacattt

SEQ ID NO: 3216 - DNA, 339 bp, synthetic construct
  source 1..339: mol_type = other DNA
gatattgtgatgacacagagccccgacagcctggccgtgtctcttggagaaagagccaccatcaactgcaagagcagccagagcctgctgtactccagcaacagcaagaactacctggcctggtatcagcagaagcccggccagcctcctaagctgctgatctactgggccagcaccagagaaagcggcgtgcccgatagattttctggctctggcagcggcaccgacttcaccctgacaatttctagcctgcaagccgaggacgtggccgtgtattactgccagcagccttacagctaccctctgagctttggagccggcaccaagctggaactgaaa

SEQ ID NO: 3217 - DNA, 342 bp, synthetic construct
  source 1..342: mol_type = other DNA
gacatcgtgatgtctcagagccctgatagcctggccgtgtctctgggagagagagtgaccctgaactgcaagagcagccagagcctgctgtactccggcaaccagaagaactacctggcctggtatcagcagaagcccggacagtctcccaagctgctgatctactgggccagcgccagagaaagcggcgtgccagatagattttctggctctggcagcggcaccgacttcaccctgacaatcagttctgtgcaggccgaggacgtggccgtgtactactgtcagcagtactacagctaccctctgaccttcggagccggcaccaagctggaactgaaaaga

SEQ ID NO: 3218 - DNA, 321 bp, synthetic construct
  source 1..321: mol_type = other DNA
cagatcgtgctgacacagagccccgccatcatgtctgttagccctggcgagaaagtgaccatgacctgtagcgccagcagcagcgtgaactacatgcactggttccagcagaagcccggcacaagccctaagctgtgggtgtacagcaccagcaatctggcctctggcgtgccagccagattttctggctctggcagcggcaccagctacagcctgacaatcagcagcatggaagccgaggatgccgccacctactattgtcagcagcggagcatctacccaccttggacatttggcggaggcaccaagctggaaatcaaa

SEQ ID NO: 3219 - DNA, 321 bp, synthetic construct
  source 1..321: mol_type = other DNA
cagatcgtgctgacacagagccccgccatcatgtctgttagccctggcgagaaagtgaccatgacctgtagcgccagcagcagcgtgaactacctgcactggttccagcagaagcccggcacaagccctaagctgtggctgtacagcaccagcaatctggcctctggcgtgccagccagattttctggctctggcagcggcaccagctacagcctgacaatcagcagcatggaagccgaggatgccgccacctactattgtcagcagcggagcatctacccaccttggacatttggcggaggcaccaagctggaaatcaaa

SEQ ID NO: 3220 - DNA, 321 bp, synthetic construct
  source 1..321: mol_type = other DNA
cagatcgtgctgacacagagccccagcatcatgtctgttagccctggcgagaaagtgaccatgacctgtagcgccagcagcagcgtgaactacctgcactggttccagcagaagcccggcacaagccctaagctgtggctgtacagcaccagcaatctggcctctggcgtgccagccagattttctggctctggcagcggcaccagctacagcctgacaatcagccgggtggccgccgaggatgccgccacctactattgtcagcagcggagcaactacccaccttggacatttggcggaggcaccaagctggaaatcaaa

SEQ ID NO: 3221 - DNA, 321 bp, synthetic construct
  source 1..321: mol_type = other DNA
cagatcgtgctgacacagagccccagcatcatgtctgttagccctggcgagaaagtgaccatgacctgtagcgccaccagcagcgtgagctacctgcactggttccagcagaagcccggcacaagccctaagctgtggctgtacagcaccagcaatctggcctctggcgtgccagccagattttctggctctggcagcggcaccagctacagcctgacaatcagccgggtggccgccgaggatgccgccacctactattgtcagcagcggagcaactacccaccttggacatttggcggaggcaccaagctggaaatcaaa

SEQ ID NO: 3222 - DNA, 327 bp, synthetic construct
  source 1..327: mol_type = other DNA
gagatcgtgctgacacagtctcccgccacactgtcactgtctccaggcgaaagagccacactgagctgtagcgtgtccagcagcatcagcagcagcaacctgcactggtatcagcagaagcctggacaggcccctcggctgctgatctacagcacatctaatctggcctctggcatccccgccagattttctggctctggaagcggcaccgacttcaccctgaccataagcagcctggaacctgaggacttcgccgtgtactactgccagcagtggtccagctatccccacacatttggcggaggcaccaaggtggaaatcaagaga

SEQ ID NO: 3223 - DNA, 327 bp, synthetic construct
  source 1..327: mol_type = other DNA
gagatcgtgctgacacagtctcccgccacactgtcactgtctccaggcgaaagagccacactgagctgtagcgtgtccagcagcgtcagcagcagctacctgcactggtatcagcagaagcctggacaggcccctcggctgctgatctacagcacatctaatctggcctctggcatccccgccagattttctggctctggaagcggcaccgacttcaccctgaccataagcagcctggaacctgaggacttcgccgtgtactactgccagcagtggtccagctatccccacacatttggcggaggcaccaaggtggaaatcaagaga

SEQ ID NO: 3224 - DNA, 336 bp, synthetic construct
  source 1..336: mol_type = other DNA
gacatccagttgacccagtcccccagctcactcagcgccagtgtgggggaccgggtgaccattacctgtaaagccagtcagagtgtggactatgacggggatagcttcctgaattggtatcagcagaagcctggcaaagccccaaagctgctgatctacgctgcatctaatctggagtcaggcgtgccttccaggttctccggtagtgggtctgggaccgatttcacattgaccatttcatccctccaacccgaggatttcgctacatattactgtcagcagtccaatgaggaccctctcacctttggccagggcaccaaagttgaaattaagaga

SEQ ID NO: 3225 - DNA, 336 bp, synthetic construct; identical to SEQ ID NO: 3224
  source 1..336: mol_type = other DNA

SEQ ID NO: 3226 - DNA, 336 bp, synthetic construct
  source 1..336: mol_type = other DNA
gacatccagttgacccagtcccccagctcactcagcgccagtgtgggggaccgggtgaccattacctgtaaagccagtcagagtgtggactatgagggggatagcttcctgaattggtatcagcagaagcctggcaaagccccaaagctgctgatctacgctgcatctaatctggagtcaggcgtgccttctaggttctccggtagtgggtctgggaccgatttcacattgaccatttcatccctccaacccgaggatttcgctacatattactgtcagcagtccaatgaggaccctctcacctttggccagggcaccaaagttgaaattaagaga

SEQ ID NO: 3227 - DNA, 336 bp, synthetic construct; identical to SEQ ID NO: 3226
  source 1..336: mol_type = other DNA

SEQ ID NO: 3228 - DNA, 333 bp, synthetic construct
  source 1..333: mol_type = other DNA
gacatcgtgatgacacagagccctgatagcctggccgtgtctctgggagagagagccaccattaactgcaaggccagccagagcgtggactacgagggcgacagcttcctgaactggtatcagcagaagcccggccagcctcctaagctgctgatctacgccgccagcaatctggaaagcggcgtgccaagcagattttccggctctggcagcggcaccgatttcaccctgacaatatccagcctccagcctgaggacgtggccgtgtactactgccagcagagcaatgaggaccctctgacctttggccagggcaccaaggtggaaatcaag

SEQ ID NO: 3229 - DNA, 333 bp, synthetic construct
  source 1..333: mol_type = other DNA
gacatcgtgatgacacagagccctgatagcctggccgtgtctctgggagagagagccaccattaactgcaaggccagccagagcgtggactacgagggcgacagcttcctgaactggtatcagcagaagcccggccagcctcctaagctgctgatctatgccgccagaaagctcggcagaggcgtgccaagcagattttctggcagcggctctggcaccgacttcaccctgacaatatccagcctccagcctgaggacgtggccgtgtactactgccagcagagcaatgaggaccctctgacattcggccagggcaccaaggtggaaatcaag

SEQ ID NO: 3230 - DNA, 333 bp, synthetic construct
  source 1..333: mol_type = other DNA
gacatcgtgatgacacagagccctgatagcctggccgtgtctctgggagagagagccaccattaactgcaaggccagccagagcgtggactacgacggcgacagcttcctgaactggtatcagcagaagcccggccagcctcctaagctgctgatctacgccgccagcaatctggaaagcggcgtgccaagcagattttccggctctggcagcggcaccgatttcaccctgacaatatccagcctccagcctgaggacgtggccgtgtactactgccagcagagcaacgacgaccctctgacctttggacagggcaccaaggtggaaatcaaa

SEQ ID NO: 3231 - DNA, 333 bp, synthetic construct; identical to SEQ ID NO: 3230
  source 1..333: mol_type = other DNA

SEQ ID NO: 3232 - DNA, 333 bp, synthetic construct; identical to SEQ ID NO: 3230
  source 1..333: mol_type = other DNA

SEQ ID NO: 3233 - DNA, 339 bp, synthetic construct
  source 1..339: mol_type = other DNA
gacatccagatgacacagagccctagcagcctgtctgccagcgtgggagacagagtgaccatcacatgcaagagcagccagagcctgctggactccgatggcaagacctacctgaactggtatcagcagaagcccggcaaggcccctaagctgctgatctacctggtgtccaagctggatagcggcgtgcccagcagattttctggcagcggcagcggaaccgacttcaccctgacaatatccagcctccagcctgaggacttcgccacctactactgcttccaaggcacccactttccattcaccttcggccagggcaccaaggtggaaatcaaaaga

SEQ ID NO: 3234 - DNA, 339 bp, synthetic construct; identical to SEQ ID NO: 3233
  source 1..339: mol_type = other DNA

SEQ ID NO: 3235 - DNA, 339 bp, synthetic construct
  source 1..339: mol_type = other DNA
gacatccagatgacacagagccctagcagcctgtctgccagcgtgggagacagagtgaccatcacatgcaagagcagccagagcctgctggactccgatggcaagacctacctgaactggtatcagcagaagcccggcaaggcccctaagctgctgatctacctggtgtccaagctggatagcggcgtgcccagcagattttctggcagcggcagcggaaccgacttcaccctgacaatatccagcctccagcctgaggacttcgccacctactactgctggcaaggcacccactttccattcaccttcggccagggcaccaaggtggaaatcaaaaga

SEQ ID NO: 3236 - DNA, 339 bp, synthetic construct; identical to SEQ ID NO: 3235
  source 1..339: mol_type = other DNA

SEQ ID NO: 3237 - DNA, 339 bp, synthetic construct
  source 1..339: mol_type = other DNA
gacatccagatgacacagagccctagcagcctgtctgccagcgtgggagacagagtgaccatcacatgcaagagcagccagagcctgctggactccgatggcaagacctacctgaactggtatcagcagaagcccggcaaggcccctaagctgctgatctacctggtgtccaagctggatagcggcgtgcccagcagattttctggcagcggcagcggaaccgacttcaccctgacaatatccagcctccagcctgaggacttcgccacctactactgcttccaaggcacccactttccatacaccttcggccagggcaccaaggtggaaatcaaaaga

SEQ ID NO: 3238 - DNA, 339 bp, synthetic construct; identical to SEQ ID NO: 3237
  source 1..339: mol_type = other DNA

SEQ ID NO: 3239 - DNA, 339 bp, synthetic construct; identical to SEQ ID NO: 3233
  source 1..339: mol_type = other DNA

SEQ ID NO: 3240 - DNA, 333 bp, synthetic construct
  source 1..333: mol_type = other DNA
gacatcgtgctgacacagagccctgcttctctggccgtgtctctgggacagagagccaccatcagctgcaaggcttctcagagcgtggactacgacggcgacagcttcctgaactggtatcagaagccaggccagcctcctaagctgttcatctacgccgccagcaacctggaaagcggcatccctgccagattttctggcagcggctctggcaccgacttcaccctgaatatccatcctgtggaagaagaggacgccgccacctactactgccagcagtctaatgaggaccctctgacctttggagccggcaccgagctggaactgaaaaga

SEQ ID NO: 3241 - DNA, 336 bp, synthetic construct
  source 1..336: mol_type = other DNA
gacatcgtgatgacccagacccccctgaccctgagcgtgacaatcggacagcctgccagcatctcctgcaagagcagccagagcctgctggacagcgacggcaagacctacctgaactggctgctgcagaggccaggccagagccccgagagactgatctacctggtgtccaagctggactccggcgtgcccgatagattcacaggcagcggctccggcaccgacttcaccctgaagatcagccgggtggaagccgaggacctgggcgtgtactactgttggcagggcacccacttcccttacaccttcggcggagggaccaaggtggaaatcaag

SEQ ID NO: 3242 - DNA, 336 bp, synthetic construct; identical to SEQ ID NO: 3226
  source 1..336: mol_type = other DNA

SEQ ID NO: 3243 - DNA, 333 bp, synthetic construct; identical to SEQ ID NO: 3230
  source 1..333: mol_type = other DNA

SEQ ID NO: 3244 - DNA, 333 bp, synthetic construct; identical to SEQ ID NO: 3228
  source 1..333: mol_type = other DNA

SEQ ID NO: 3245 - DNA, 339 bp, synthetic construct
  source 1..339: mol_type = other DNA
gacttcgtgatgacccagacacctctgagcctgcctgtgacacctggcgaacctgccagcatcagctgtagaagcagccagagcatcgtgcaccacgacggcaacacctacctggaatggtatctccagaagcctggacagagccccaagctgctgatctacaaggtgtccaacagattcagcggcgtgcccgacagattttctggcagcggctctggcaccgacttcaccctgaagattagcagagtggaagccgaggacgtgggcgtgtactactgcttccaaggcagccatgttccttggacctttggcggaggcaccaaggtggaaatcaagaga

SEQ ID NO: 3246 - DNA, 339 bp, synthetic construct
  source 1..339: mol_type = other DNA
gacgtcgtgatgacacagacacctctgagcctgcctgtgacacctggcgaacctgccagcatcagctgtagaagcagccagagcatcgtgcacagcgacggcaacacctacttcgagtggtatctccagaagcctggacagagccctcagctgctgatctacaaggtgtccaacagattcagcggcgtgcccgacagattttctggcagcggctctggcaccgacttcaccctgaagattagcagagtggaagccgaggacgtgggcgtgtactactgcttccaaggcagccatgttccttggacctttggcggaggcaccaaggtggaaatcaagaga

SEQ ID NO: 3247 - DNA, 336 bp, synthetic construct
  source 1..336: mol_type = other DNA
gaagttcagctgcaagagtctggccctggcctggtcaagcctagccaaagcctgagcctgacctgtaccgtgaccggctacagcatcaccagcgactacgcctggaactggatcagacagttccccggcaacaaactggaatggatgggcaacatctggtacagcggctccaccacctacaatcccagcctgaagtcccggatctccatcaccagagataccagcaagaaccagttcttcctgcaactgaacagcgtgaccagcgaggacaccgccacctactattgcagccggatggatttttggggccagggcaccacactgaccgtgtcatct

SEQ ID NO: 3248 - DNA, 336 bp, synthetic construct
  source 1..336: mol_type = other DNA
gatattgtgatgacccagagccagaaattcatgagcaccagcgtgggcgacagagtgtccgtgacatgtaaagccagccagaacgtgggctctcacgtcggctggtatcagcagaagtctggacagagccccaaggcactgatctacagcgccagcaatcggtacatcggcgtgcccgatagattcaccggctctggcagcggcaccgatttcaccctgaccatcagcaacgtgcagtccgaggacctggccgagtatttctgccagcagtaccacatctacccctacacctttggaggcggcacccggctggaaatcaagagaacagtggctgcc

SEQ ID NO: 3249 - DNA, 336 bp, synthetic construct; identical to SEQ ID NO: 3248
  source 1..336: mol_type = other DNA

SEQ ID NO: 3250 - DNA, 336 bp, synthetic construct
  source 1..336: mol_type = other DNA
gatattgtgatgacccagagccagaaattcatgagcaccagcgtgggcgacagagtgtccgtgacatgtaaagccagccagaacgtgggcacccacgtcgcatggtatcagcagaagtctggacagagccccaaggcactgatctacagcgccagcaatcggtacaccggcgtgcccgatagattcaccggctctggcagcggcaccgatttcaccctgaccatcagcaacgtgcagtccgaggacctggccgagtatttctgccagcagtaccacatctacccctacacctttggaggcggcacccggctggaaatcaagagaacagtggctgcc

SEQ ID NO: 3251 - DNA, 336 bp, synthetic construct
  source 1..336: mol_type = other DNA
gatattgtgatgacccagagccagaaattcatgagcaccagcgtgggcgacagagtgtccgtgacatgtaaagccagccagaacgtgggctctaacgtcgcatggtatcagcagaagtctggacagagccccaaggcactgatctacagcgccagcaatcggtacaacggcgtgcccgatagattcaccggctctggcagcggcaccgatttcaccctgaccatcagcaacgtgcagtccgaggacctggccgagtatttctgccagcagtaccacatctacccctacacctttggaggcggcacccggctggaaatcaagagaacagtggctgcc

SEQ ID NO: 3252 - DNA, 324 bp, synthetic construct
  source 1..324: mol_type = other DNA
agctacgtgctgacacagcctccatccgtgtctgtggctccaggacagaccgccagaatcacatgcggcggcaacaacatcggcagccagagcgtgcactggtatcagcagaagcctggacaggctccagtgctggtggtgtacgacgacagcgatagacctagcggcatccccgagagattcagcggcagcaattccggcaataccgccacactgaccatcagcagagtggaagctggcgacgaggccgactactactgccaagtgtgggacagcagcagcgatcacgtggtgtttggcggcggaacaaagctgacagtgctt

SEQ ID NO: 3253 - DNA, 324 bp, synthetic construct
  source 1..324: mol_type = other DNA
agctacgtgctgacacagcctccatccgtgtctgtggctccaggacagaccgccagaatcacatgcggcggcaacaacatcggcagcaagggcgtgcactggtatcagcagaagcctggacaggctccagtgctggtggtgtacgacgacagcgatagacctagcggcatccccgagagattcagcggcagcaattccggcaataccgccacactgaccatcagcagagtggaagctggcgacgaggccgactactactgccaagtgtgggacagcagcagcgatcacgtggtgtttggcggcggaacaaagctgacagtgctt

SEQ ID NO: 3254 - DNA, 324 bp, synthetic construct
  source 1..324: mol_type = other DNA
gacatccagatgacacagagcccctctagcctgtctgccagcgtgggagacagagtgaccatcacctgtagagccagccagagcatcagaaactacctgaactggtatcagcaaaagcccggcaaggcccctgagctgctgattcatgctgcaagcagcctccagagcggcgtgccaagcagattttctggcagcggcagcggaaccgacttcaccctgacaatatctagcctccagcctgaggacttcgccagctactactgccagcagagctacagcgcccctcctatcacctttggacagggcaccagactggaaatcaag

SEQ ID NO: 3255 - DNA, 324 bp, synthetic construct
  source 1..324: mol_type = other DNA
gacatccagatgacacagagcccctctagcctgtctgccagcgtgggagacagagtgaccatcacctgtagagccagccagagcatcagaaactacctgaactggtatcagcaaaagcccggcaaggcccctgagctgctgattcatgctgcaagcagcctccagagcggcgtgccaagcagattttctggcagcggcagcggaaccgacttcaccctgacaatatctagcctccagcctgaggacttcgccagctactactgccagcagagctacagcacccctcctatcacctttggacagggcaccagactggaaatcaag

SEQ ID NO: 3256 - DNA, 324 bp, synthetic construct
  source 1..324: mol_type = other DNA
gacatccagatgacacagagcccctctagcctgtctgccagcgtgggagacagagtgaccatcacctgtagagccagccagaacatcagaaactacctgaactggtatcagcaaaagcccggcaaggcccctgagctgctgattcatgctgcaagcagcctccagagcggcgtgccaagcagattttctggcagcggcagcggaaccgacttcaccctgacaatatctagcctccagcctgaggacttcgccagctactactgccagcagagctacagcacccctcctatcacctttggacagggcaccagactggaaatcaag

SEQ ID NO: 3257 - DNA, 324 bp, synthetic construct
  source 1..324: mol_type = other DNA
gacatccagatgacacagagcccctctagcctgtctgccagcgtgggagacagagtgaccatcacctgtagagccagccagagcatcagcagctacctgaactggtatcagcaaaagcccggcaaggcccctgagctgctgattcatgctgcaagcagcctccagagcggcgtgccaagcagattttctggcagcggcagcggaaccgacttcaccctgacaatatctagcctccagcctgaggacttcgccacctactactgccagcagagctacagcacccctcctatcacctttggacagggcaccagactggaaatcaag

SEQ ID NO: 3258 - DNA, 16 bp, synthetic construct
  source 1..16: mol_type = other DNA
gggggggggggggggg

SEQ ID NO: 3259 - DNA, 16 bp, synthetic construct
  source 1..16: mol_type = other DNA
gggggggggggggggg

SEQ ID NO: 3260 - DNA, 16 bp, synthetic construct
  source 1..16: mol_type = other DNA
gggggggggggggggg

SEQ ID NO: 3261 - DNA, 16 bp, synthetic construct
  source 1..16: mol_type = other DNA
gggggggggggggggg

SEQ ID NO: 3262 - DNA, 16 bp, synthetic construct
  source 1..16: mol_type = other DNA
gggggggggggggggg

SEQ ID NO: 3263 - DNA, 16 bp, synthetic construct
  source 1..16: mol_type = other DNA
gggggggggggggggg

SEQ ID NO: 3264 - DNA, 16 bp, synthetic construct
  source 1..16: mol_type = other DNA
gggggggggggggggg

SEQ ID NO: 3265 - DNA, 16 bp, synthetic construct
  source 1..16: mol_type = other DNA
gggggggggggggggg

SEQ ID NO: 3266 - DNA, 16 bp, synthetic construct
  source 1..16: mol_type = other DNA
gggggggggggggggg

SEQ ID NO: 3267 - DNA, 16 bp, synthetic construct
  source 1..16: mol_type = other DNA
gggggggggggggggg

SEQ ID NO: 3268 - DNA, 16 bp, synthetic construct
  source 1..16: mol_type = other DNA
gggggggggggggggg

SEQ ID NO: 3269 - DNA, 16 bp, synthetic construct
  source 1..16: mol_type = other DNA
gggggggggggggggg

SEQ ID NO: 3270 - DNA, 16 bp, synthetic construct
  source 1..16: mol_type = other DNA
gggggggggggggggg

SEQ ID NO: 3271 - DNA, 16 bp, synthetic construct
  source 1..16: mol_type = other DNA
gggggggggggggggg

SEQ ID NO: 3272 - DNA, 16 bp, synthetic construct
  source 1..16: mol_type = other DNA
gggggggggggggggg

SEQ ID NO: 3273 - DNA, 16 bp, synthetic construct
  source 1..16: mol_type = other DNA
gggggggggggggggg

SEQ ID NO: 3274 - DNA, 16 bp, synthetic construct
  source 1..16: mol_type = other DNA
gggggggggggggggg

SEQ ID NO: 3275 - DNA, 16 bp, synthetic construct
  source 1..16: mol_type = other DNA
gggggggggggggggg

SEQ ID NO: 3276 - DNA, 16 bp, synthetic construct
  source 1..16: mol_type = other DNA
gggggggggggggggg

SEQ ID NO: 3277 - DNA, 16 bp, synthetic construct
  source 1..16: mol_type = other DNA
gggggggggggggggg

SEQ ID NO: 3278 - DNA, 16 bp, synthetic construct
  source 1..16: mol_type = other DNA
gggggggggggggggg

SEQ ID NO: 3279 - DNA, 16 bp, synthetic construct
  source 1..16: mol_type = other DNA
gggggggggggggggg

SEQ ID NO: 3280 - DNA, 16 bp, synthetic construct
  source 1..16: mol_type = other DNA
gggggggggggggggg

SEQ ID NO: 3281 - DNA, 16 bp, synthetic construct
  source 1..16: mol_type = other DNA
gggggggggggggggg

SEQ ID NO: 3282 - DNA, 16 bp, synthetic construct
  source 1..16: mol_type = other DNA
gggggggggggggggg

SEQ ID NO: 3283 - DNA, 16 bp, synthetic construct
  source 1..16: mol_type = other DNA
gggggggggggggggg

SEQ ID NO: 3284 - DNA, 16 bp, synthetic construct
  source 1..16: mol_type = other DNA
gggggggggggggggg

SEQ ID NO: 3285 - DNA, 16 bp, synthetic construct
  source 1..16: mol_type = other DNA
gggggggggggggggg

SEQ ID NO: 3286 - DNA, 16 bp, synthetic construct
  source 1..16: mol_type = other DNA
gggggggggggggggg

SEQ ID NO: 3287 - DNA, 16 bp, synthetic construct
  source 1..16: mol_type = other DNA
gggggggggggggggg

SEQ ID NO: 3288 - DNA, 16 bp, synthetic construct
  source 1..16: mol_type = other DNA
gggggggggggggggg

SEQ ID NO: 3289 - DNA, 16 bp, synthetic construct
  source 1..16: mol_type = other DNA
gggggggggggggggg

SEQ ID NO: 3290 - DNA, 16 bp, synthetic construct
  source 1..16: mol_type = other DNA
gggggggggggggggg

SEQ ID NO: 3291 - DNA, 16 bp, synthetic construct
  source 1..16: mol_type = other DNA
gggggggggggggggg

SEQ ID NO: 3292 - DNA, 16 bp, synthetic construct
  source 1..16: mol_type = other DNA
gggggggggggggggg

SEQ ID NO: 3293 - DNA, 16 bp, synthetic construct
  source 1..16: mol_type = other DNA
gggggggggggggggg

SEQ ID NO: 3294 - DNA, 16 bp, synthetic construct
  source 1..16: mol_type = other DNA
gggggggggggggggg

SEQ ID NO: 3295 - DNA, 16 bp, synthetic construct
  source 1..16: mol_type = other DNA
gggggggggggggggg

SEQ ID NO: 3296 - DNA, 16 bp, synthetic construct
  source 1..16: mol_type = other DNA
gggggggggggggggg

SEQ ID NO: 3297 - DNA, 16 bp, synthetic construct
  source 1..16: mol_type = other DNA
gggggggggggggggg

SEQ ID NO: 3298 - DNA, 366 bp, synthetic construct
  source 1..366: mol_type = other DNA
gaggttcagctgcttgagtctggcggaggactggttcaacctggcggaagcctgagactgtcttgtgccgccagcggcttcacctttagcagctacgccatgagctgggtccgacaggctcctggcaaaggactggaatgggtgtccgccatctctggctctggcggcagcacatattacgccgactctgtgaagggcagattcaccatcagccgggacaacagcaagaacaccctgtacctccagatgaacagcctgagagccgaggacaccgccgtgtactactgtgccaaagagcagtgggagggcgactacttcagcgccttcgatatttggggccagggcacaatggtcaccgtgtctagc

SEQ ID NO: 3299 - DNA, 366 bp, synthetic construct; identical to SEQ ID NO: 3298
  source 1..366: mol_type = other DNA

SEQ ID NO: 3300 - DNA, 366 bp, synthetic construct; identical to SEQ ID NO: 3298
  source 1..366: mol_type = other DNA

SEQ ID NO: 3301 - DNA, 366 bp, synthetic construct; identical to SEQ ID NO: 3298
  source 1..366: mol_type = other DNA

SEQ ID NO: 3302 - DNA, 372 bp, synthetic construct
  source 1..372: mol_type = other DNA
gaagttcagctgcttgaatcaggcggcggactggttcaacctggcggatctctgagactgagctgtgccgccagcggcttcacctttagcagctacgccatgtcctgggtccgacaggctcctggcaaaggactggaatgggtgtccgccatctctggctcaggcggcagcacatattacgccgactctgtgaagggcagattcaccatcagccgggacaacagcaagaacaccctgtacctccagatgaacagcctgagagccgaggacaccgccgtgtactattgtgccaaaggcggcgagaacaccttcgagtctcaccctgtggccttcgacatctggggccagggaacaatggtcaccgtgtctagt

SEQ ID NO: 3303 - DNA, 372 bp, synthetic construct; identical to SEQ ID NO: 3302
  source 1..372: mol_type = other DNA

SEQ ID NO: 3304 - DNA, 372 bp, synthetic construct; identical to SEQ ID NO: 3302
  source 1..372: mol_type = other DNA

SEQ ID NO: 3305 - DNA, 372 bp, synthetic construct; identical to SEQ ID NO: 3302
  source 1..372: mol_type = other DNA

SEQ ID NO: 3306 - DNA, 357 bp, synthetic construct
  source 1..357: mol_type = other DNA
caggtgcagctggtggaatctggacctggcgtggtgcagcctggcagaagcctgagaatcagctgtgccgtgtccggcttcagcgtgaccaactacggcgtgcactgggtgcgccagccacctggaaaaggactggaatggctgggcgtgatctgggctggcggcatcaccaactacaacagcgccttcatgtcccggctgaccatctccaaggacaacagcaagaacaccgtgtacctccagatgaacagcctgcgggccgaggacaccgccatgtactactgtgcttccagaggcggccactacggctacgccctggattattggggccagggaaccctcgtgaccgtgtcctct

SEQ ID NO: 3307 - DNA, 357 bp, synthetic construct; identical to SEQ ID NO: 3306
  source 1..357: mol_type = other DNA

SEQ ID NO: 3308 - DNA, 354 bp, synthetic construct
  source 1..354: mol_type = other DNA
caagttcagctgcaagagtctggccctggcctggtcaagcctagccagacactgagcatcacatgcaccgtgtccggctttagcctggcctcctacaacatccactgggtccgacagcctccaggcaaaggactggaatggctgggagtgatttgggctggcggcagcaccaactacaacagcgcactgatgagccggctgaccatcagcaaggacaacagcaagaaccaggtgttcctgaagatgagcagcctgacagccgccgataccgccgtgtactactgtgccaagagaagcgacgactacagttggttcgcctactggggccagggcacactggttacagtcagctct

SEQ ID NO: 3309 - DNA, 357 bp, synthetic construct
  source 1..357: mol_type = other DNA
caggttcagctcaaagaatctggccccgtgctggtggccccaagccagacactgtctatcacctgtaccgtgtccggcttcagcctggcctcctacaacatccactgggtccgacagcctccaggcaaaggactggaatggctgggagtgatttgggctggcggcagcaccaactacaacagcgcactgatgagccggctgagcatcagcaaggacaacagcaagagccaggtgttcctccagatgaactccctccagaccgacgacaccgccatgtactactgcgccaagagaagcgacgactacagttggttcgcctactggggccagggcacactggttactgtgtctgcttct

SEQ ID NO: 3310 - DNA, 354 bp, synthetic construct
  source 1..354: mol_type = other DNA
caagttcagctggttcagagcggagccgaagtgaagaaacctggggcctctgtgaaggtgtcctgcaaggcttccggctataccttcaccagcttttggctgaactgggtccgacaggcccctggacaaggactggaatggatgggcaacatctaccccagcaccagctacaccgtgtacaaccagaaattcaaggaccgcgtgaccatgaccagggacaccagcacaagcacagtgtacatggaactgagcagcctgcggagcgaggataccgccgtgtattattgcgccagaacctggcggggcaacagcttcgattattggggccagggaaccaccgtgaccgtgtcatct

SEQ ID NO: 3311 - DNA, 354 bp, synthetic construct
  source 1..354: mol_type = other DNA
caagttcagctggttcagagcggagccgaagtgaagaaacctggggcctctgtgaaggtgtcctgcaaggcttccggctataccttcaccagcttttggctgaactgggtccgacaggcccctggacaaggactggaatggatgggcaacatctaccccagcgacagctacaccgtgtacaaccagaaattcaaggaccgcgtgaccatgaccagggacaccagcacaagcacagtgtacatggaactgagcagcctgcggagcgaggataccgccgtgtattattgcgccagaacctggcggggcaacagcttcgattattggggccagggaaccaccgtgaccgtgtcatct

SEQ ID NO: 3312 - DNA, 363 bp, synthetic construct
  source 1..363: mol_type = other DNA
caagttcagcttcaacagcctggcgctgagctggtcaaacctggcgcttctgtgaagatgagctgcaaagccagcggctacaccttcagcagctactggatcaactggatgaagcagaaacccggccagggactcgaatggatcggccaaatctatcccggcgacggcgacaccaactacaacggcaagttcaagggcagagccacactgaccgccgatacctctagcagcacagcctacatgcagctgagcagcctgaccagcgaagatagcgccgtgtacttctgtgcccggtccatcacaacagtcgtgggctgcgctatggactattggggccagggaacaagcgtgaccgtgtctagt

SEQ ID NO: 3313 - DNA, 363 bp, synthetic construct
  source 1..363: mol_type = other DNA
caagttcagcttcaacagcctggcgctgagctggtcaaacctggcgcttctgtgaagatgagctgcaaagccagcggctacgccttcagcagctcttggatcaactggatgaagcagaaacccggccagggactcgaatggatcggccaaatctatcccggcgacggcgacaccaactacaacggcaagttcaagggcagagccacactgaccgccgatacctctagcagcacagcctacatgcagctgagcagcctgaccagcgaagatagcgccgtgtacttctgtgcccggtccatcacaacagtcgtgggctgcgctatggactattggggccagggaacaagcgtgaccgtgtctagt

SEQ ID NO: 3314 - DNA, 363 bp, synthetic construct
  source 1..363: mol_type = other DNA
gaagttcagctggttgaatctggcggcggactggttcaacctggcggatctctgagactgagctgtgccgcctctggctacacctttagcagctactgggtcaactgggttcgacaggcccctggcaaaggactggaatgggtcgcccaaatctatcccggcgacggcgacaccaactacaacggcaagttcaagggcagattcaccatcagccgggacaacagcaagaacaccctgtacctccagatgaactccctgagagccgaggacaccgccgtgtactattgtgccagatccatcaccaccgtcgtgggctgcgctatggattattggggccagggaaccctggtcaccgtgtcctct

SEQ ID NO: 3315 - DNA, 363 bp, synthetic construct
  source 1..363: mol_type = other DNA
gaagttcagctggttgaatctggcggcggactggttcaacctggcggatctctgagactgagctgtgccgcctctggctacgcctttagcaactactgggtcaactgggttcgacaggcccctggcaaaggactggaatgggtcgcccaaatctatcccggcgacggcgacaccaactacaacggcaagttcaagggcagattcaccatcagccgggacaacagcaagaacaccctgtacctccagatgaactccctgagagccgaggacaccgccgtgtactattgtgccagatccatcaccaccgtcgtgggctgcgctatggattattggggccagggaaccctggtcaccgtgtcctct

SEQ ID NO: 3316 - DNA, 348 bp, synthetic construct
  source 1..348: mol_type = other DNA
caagttcagctgcaacagagcggccctgagctggttaagcctggcgcttctgtgcggatctcttgcaaggccagcggctacaccttcaccagctactacatccactgggtcaagcagcggcctggacagggactcgaatggatcggctggatctaccccggcaacctgaacaccaagtacaacgagaagttcaagggcaaagccacactgaccgccgacaagagcagcagcacagcctacatgcagctgagcagcctgacaagcgaggacagcgccgtgtacttctgcgccagatacgactggtacttcgacgtgtggggagccggaaccaccgtgacagtttcttct

SEQ ID NO: 3317 - DNA, 348 bp, synthetic construct
  source 1..348: mol_type = other DNA
caagttcagctggttgaatccggtggcggagtggtgcaacctggcagaagtctgagactgagctgtgccgccagcggcttcagcttcagcaattatggcatggcctgggtccgacaggcccctggaaaaggacttgagtgggtcgccagcatctctaccggcggaggcaatacctactacgccgacagcgtgaaggacagattcaccatcagccgggacaacagcaagaacaccctgtacctccagatgaacagcctgagagccgaggataccgccgtgtactactgcaccagacacgatagaggcggcctgtattggggccagggaacaatggtcaccgtgtcctct

SEQ ID NO: 3318 - DNA, 351 bp, synthetic construct
  source 1..351: mol_type = other DNA
gaactgcaactgcttgaatcaggtggcggcctggttcagcctggcggatctctgagactgagctgtgccgccagcggcttcaccttctctaagtacgctatggcctgggtccgacaggcccctggaaaaggacttgagtgggtcgcctctatcagcacaggcggcgtgaacacctactacgccgacagcgtgaaggacagattcaccatcagccgggacaacgccaagaacaccctgtacctccagatgaacagcctgagagccgaggacacagccgtgtattattgcgccacacacaccggcgactacttcgactattggggccagggaacaatggtcaccgtgtcctct

SEQ ID NO: 3319 - DNA, 351 bp, synthetic construct; identical to SEQ ID NO: 3318
  source 1..351: mol_type = other DNA

SEQ ID NO: 3320 - DNA, 348 bp, synthetic construct; identical to SEQ ID NO: 3317
  source 1..348: mol_type = other DNA

SEQ ID NO: 3321 - DNA, 375 bp, synthetic construct
  source 1..375: mol_type = other DNA
caactccagctgcaagagtctggccccggactggtcaagcctagcgaaacactgagcctgacctgtaccgtgtctggcggcagcatcagcagcagctcttattggtggggctggaccagacagcctcctggcagaggactggaatggatcggcaccatgtactacagcggcaacatctactacaaccccagcctccagagccgggccaccatctctgtggacaccagcaagaaccagttcagcctgaagctgagcagcgtgacagccgccgataccgccgtgtattattgcgccagacatgtgggctacagctacggcagacggttctggtacttcgacctgtggggcagaggcaccctggtcacagtttcttct

SEQ ID NO: 3322 - DNA, 360 bp, synthetic construct
  source 1..360: mol_type = other DNA
gaagttcagctggtggaatctggccctggcctggtcaagcctagcgagacactgagcctgacctgtaccgtgtccggcttcagcctgaccagatttggcgtgcactgggtccgacagccacctggcaaaggactggaatggctgggagtgatttggagaggcggcagcaccgattacaacgccgccttcatgagccggctgaccatcagcaaggacaacagcaagaaccaggtgtccctgaagctgagcagcgtgacagccgctgataccgccgtgtactactgctccaaccactactacggcagctccgactacgccctggataattggggccagggaaccctggtcaccgtgtcatct

SEQ ID NO: 3323 - DNA, 354 bp, synthetic construct
  source 1..354: mol_type = other DNA
caggtccaactggtgcagagcggagccgaggtcgtgaagcctggcgcttccgtgaagattagctgcaaagccagcggctacacctttaccggctactttatgcactgggtcaagcagagccctggccagagcctggaatggatcggcagaatccacccctacgacggcgacaccttctacaaccagaagttccagggcaaggccaccctgacagtggacaagagcagcaacaccgcccacatggaactgctgagcctgaccagcgaggacttcgccgtgtactactgcaccagatacgacggcagccgggctatggactattggggccagggcaccaccgtgaccgtgtctagt

SEQ ID NO: 3324 - DNA, 363 bp, synthetic construct
  source 1..363: mol_type = other DNA
gaagttcagctggttgaaagtggtggcggcctggttcaacctggcggatctctgagactgagctgtgccgccagcggcttcaatgtgtacgcctctggaatgcactgggtccgacaggcccctggcaaaggacttgagtgggtcgccaaaatctaccccgacagcgactacacctattacgccgacagcgtgaagggcagattcaccatcagcgccgacaccagcaagaacaccgcctacctccagatgaactccctgagagccgaggacaccgccgtgtactactgtagcagagacagcagcttctactacgtgtacgctatggactactggggccagggcacactggtcacagtctcttct

SEQ ID NO: 3325 - DNA, 363 bp, synthetic construct; identical to SEQ ID NO: 3324
  source 1..363: mol_type = other DNA

SEQ ID NO: 3326 - DNA, 351 bp, synthetic construct
  source 1..351: mol_type = other DNA
gaagttcagctggttgagtctggcggaggactggttcaacctggcggaagcctgagactgtcttgtgccgccagcggcttcaacatcgactactacggaatgcactgggtccgacaggcccctggcaaaggacttgaatgggtcgcctctctgtacggcggcagcgatagcacagattacgccgactctgtgaagggcagattcaccatcagcgccgacaccagcaagaacaccgcctacctccagatgaactccctgagagccgaagataccgccgtgtactactgctccagacagtacagcgcctacttcgactattggggccagggaaccctggtcaccgttagctct

SEQ ID NO: 3327 - DNA, 348 bp, synthetic construct
  source 1..348: mol_type = other DNA
gaagtgcagctggttgaatcaggtggcggcctggttcaacctggcggatctctgagactgagctgtgccgccagcggctacagcatcaccaatgactacgcctggaactgggtccgacaggcccctggaaaaggactggaatgggtcggatatatcagctactccggctacaccacctacaatcccagcatcaagagccggttcaccatcagcagagacaccagcaagaacaccctgtacctccagatgaactccctgagagccgaggacaccgccgtgtactattgtgccagatggaccagcggcctggactattggggacagggaacactggtcaccgtgtcctct

SEQ ID NO: 3328 - DNA, 360 bp, synthetic construct
  source 1..360: mol_type = other DNA
caagttcagctggttcagagcggagccgaagtgaagaaacctggcagcagcgtgaaggtgtcctgcaaagcaagcggcggcacctttagcacctacgccatccactgggttcgacaggcaccaggacaaggactggaatggatgggcagaatcatccccatcgagggcagagcctactacgcccagaaattccagggcagagtgaccatcaccgccgacgagtctacaagcaccgcctacatggaactgagcagcctgagaagcgaggataccgctgtgtactattgcgccagaggccggtacagctacagatattggttcgactactggggccagggcaccctggttacagtctcttct

SEQ ID NO: 3329 - DNA, 360 bp, synthetic construct
  source 1..360: mol_type = other DNA
caagttcagctggttcagagcggagccgaagtgaagaaacctggcagcagcgtgaaggtgtcctgcaaagcaagcggcggcacctttagctcctacgccatccactgggttcgacaggcaccaggacaaggactggaatggatgggcagaatcatccccatcgagggcagagcctactacgcccagaaattccagggcagagtgaccatcaccgccgacgagtctacaagcaccgcctacatggaactgagcagcctgagaagcgaggataccgctgtgtactattgcgccagaggccggtacagctacagatattggttcgactactggggccagggcaccctggttacagtctcttct

SEQ ID NO: 3330 - DNA, 354 bp, synthetic construct
  source 1..354: mol_type = other DNA
gaggtgcaactggtgcagagcggagccgaagtgaagaaacctggggccagcgtgcgggtgtcctgcaaggccagcggctacacctttaccaactacggcatgaactgggtgcgccaggctcctggacagggcctggaatggatgggctggatcaacacctacaccggcgagcccacctacgccgacgacttcaagggcagagtgaccatgaccaccgacaccagcacctccaccgcctacatggaactgcggagcctgagaagcgacgacaccgccgtgtattattgcgcccggatcggcgacagcagccccagcgattattggggccagggaaccctcgtgaccgtgtcctct

SEQ ID NO: 3331 - DNA, 366 bp, synthetic construct
  source 1..366: mol_type = other DNA
gaggtgcagctggttgaatctggcggaggactggttcagcctggcggatctctgagactgtcttgtgctgccagcggcttcaccttcagctcctacgccatgagctgggtccgacaggctcctggcaaaggactggaatgggtgtccgccatctctggctcaggcggcagcacatattacgccgactctgtgaagggcagattcaccatcagccgggacaacagcaagaacaccctgtacctccagatgaactccctgagagccgaggacaccgccgtgtactattgtgccagactgggctaccccaccaccacactgctgccctttgattattggggccagggcaccctggtcaccgtttcttct

SEQ ID NO: 3332 - DNA, 363 bp, synthetic construct
  source 1..363: mol_type = other DNA
gaagttcagctggttgaatctggcggcggactggttcaacctggcggatctctgagactgagctgtgccgcctctggcatcgacttcaacagcaactactacatgtgctgggtccgacaggccccaggcaaaggactggaatggatcggctgtatctacgtgggcagccacgtgaacacctattacgccaactgggccaagggcagattcaccatcagccgggacaacagcaagaacaccgtgtacctccagatgaactccctgagagccgaggacaccgccgtgtactactgtgccacatctggcagcagcgtgctgtacttcaagttctggggccagggaaccctggtcaccgtttcttct

SEQ ID NO: 3333 - DNA, 354 bp, synthetic construct
  source 1..354: mol_type = other DNA
caagttcagctggttcagtctggccccgaagtgaagaaacctggggcctctgtgaaggtgtcctgcaaggcttccggctacacctttaccagctaccacatccagtgggtccgacaggctcctggacaaggactggaatggatcggctggatctatcctggcgacggcagcacccagtacaacgagaagttcaagggcagagtgaccatcaccgccgacaagagcacaagcaccgcctacatggaactgagcagcctgaccagcgaggacacagccgtgtattattgcgccagagagggcacctactacgctatggattattggggccagggcaccagcgtgaccgtttcttct

SEQ ID NO: 3334 - DNA, 381 bp, synthetic construct
  source 1..381: mol_type = other DNA
caggttcagctgcaacaaagcggagccggcctgctgaagcctagcgaaacactgtctctgacctgtgccgtgtccggcggcagctttagcggctattactggacctggatcagacagaggccaggcaaaggactggaatggatcggcgagatcaaccacagaggctccaccgactacaaccccagcctgaagtccagagtgaccatgagcatcgacaccagcaagtcccagttcagcctgaatctgaagtccgtgacagccgccgataccgccgtgtactattgtgccagagccgcctggggcagctgctacgatggaacatgttaccccgccgagtatttccagtattggggccagggcaccctggtcacagtctcttct

SEQ ID NO: 3335 - DNA, 369 bp, synthetic construct
  source 1..369: mol_type = other DNA
caagttcagctggttcagagcggagccgaagtgaagaaacctggggcctctgtgaaggtgtcctgcaaggccagcggctacagctttaccagctacggcatcaactgggtccgacaggcacctggacaaggactggaatggatgggctggatcagcgcctacaacggcaacaccaactacgcccagaaactccagggcagagtgaccatgaccagagacaccagcaccagaaccgcctacatggaactgcggagcctgagatccgatgacaccgccgtgtattattgcgccagagagtacgacatcctgaccggctactccgacgcctttgacatctggggccagggcacactggttaccgttagctct

SEQ ID NO: 3336 - DNA, 357 bp, synthetic construct
  source 1..357: mol_type = other DNA
caagtgcagctggttgagtcaggcggtggccttgtgaaacctggcggtagcctgagactgtcttgtgccgccagcggcttcaccttcagcagctactctatgcactgggtccgacaggcccctggcaaaggacttgaatgggtgtccgacatcagcaccaacagcagaacccggaactacgccgacagcgtgaagggcagattcaccatctccagagacaacgccaagaacagcgtgtacctccagatgcacagcctgagagatgaggacacagccgtgtattattgcgccagagactacggcggcatctactacttcgactactggggccagggaaccctggtcacagtctcttct

SEQ ID NO: 3337 - DNA, 381 bp, synthetic construct; identical to SEQ ID NO: 3334
  source 1..381: mol_type = other DNA

SEQ ID NO: 3338 - DNA, 369 bp, synthetic construct
  source 1..369: mol_type = other DNA
caagttcagctggttcagagcggagccgaagtgaagaaacctggggcctctgtgaaggtgtcctgcaaggccagcggctacagctttaccagctacggcatcaactgggtccgacaggcacctggacaaggactggaatggatgggctggatcagcgcctacaacggctacaccaactacgcccagaaactccagggcagagtgaccatgaccagagacaccagcaccagaaccgcctacatggaactgcggagcctgagatccgatgacaccgccgtgtattattgcgccagagagtacgacatcctgaccggctactccgacgcctttgacatctggggccagggcacactggttaccgttagctct

SEQ ID NO: 3339 - DNA, 348 bp, synthetic construct
  source 1..348: mol_type = other DNA
gaggttcagctgcttgagtctggcggaggactggttcaacctggcggaagcctgagactgtcttgtgccgccagcggcttcacctttagcagctacgccatgagctgggtccgacaggctcctggcaaaggactggaatgggtgtccagcatcagcaccagcggcagctatacagcctacgccgatagcgtgaagggcagattcaccatcagccgggacaacagcaagaacaccctgtacctccagatgaacagcctgagagccgaggacaccgccgtgtactattgtgccaaaggcggctacaccttcgactactggggccagggaacactggtcacagtttctagc

SEQ ID NO: 3340 - DNA, 378 bp, synthetic construct
  source 1..378: mol_type = other DNA
gaagtgacactgaaagagtctggccccgctctggtcaagcccacacaaaccctgacactgacctgcaccttcagcggctttagcctgaccacatacggcatgggcgtcggctggattagacagcctcctggaaaagccctggaatggctggctaacatttggtgggacgacgacaagtattacaaccccagcctgaagaaccggctgaccatcagcaaggacaccagcaagaaccaggtggtgctgaccatgaccaacatggaccctgtggacaccgccacatattactgcgccagaatcggccccatcaagtaccccaccgctccttacagatacttcgacttctggggccagggcacaatggtcaccgttagctct

SEQ ID NO: 3341 - DNA, 378 bp, synthetic construct
  source 1..378: mol_type = other DNA
gaagtgacactgaaagagtctggccccgctctggtcaagcccacacaaaccctgacactgacctgcaccttcagcggctttagcctgagcacatacggcatgggcgtcggctggattagacagcctcctggaaaagccctggaatggctggctaacatttggtgggacgacgacaagtattacaaccccagcctgaagaaccggctgaccatcagcaaggacaccagcaagaaccaggtggtgctgaccatgaccaacatggaccctgtggacaccgccacatattactgcgccagaatcggccccatcaagtaccccaccgctccttacagatacttcgacttctggggccagggcacaatggtcaccgttagctct

SEQ ID NO: 3342 - DNA, 357 bp, synthetic construct
  source 1..357: mol_type = other DNA
caggttcagctggttcagtctggggccgaagtgaagaaacctggggcctctgtgaaggtgtcctgcaaggcttccggctacacctttaccgaccacgccatccactgggtccgacaggctccaggacaacggcttgagtggatgggctacttcagccccggcaacgacgacttcaagtacagccagaaattccagggcagagtgaccatcaccgccgatacaagcgccagcaccgcctacatggaactgagcagtctgagaagcgaggataccgccgtgtacttctgcacacggtccctgaacatggcctattggggccagggaaccctggtcacagtgtctagcggaagcacatct

SEQ ID NO: 3343 - DNA, 345 bp, synthetic construct
  source 1..345: mol_type = other DNA
caggtgcagctggttcagagcggagccgaggttgtgaaacctggcgcttccgtgaagatcagctgcaaggccagcggctacaccttcaccgatcacgccatccactgggtcaagcagaatcccggccagagactggaatggatcggctacttcagccccggcaacgacgacttcaagtacaacgagcggttcaagggcaaagccacactgaccgctgataccagcgccagcacagcctacgtggaactgtctagcctgagaagcgaggataccgccgtgtacttctgcacacggtccctgaacatggcctattggggccagggaaccctggtcacagtcagctct

SEQ ID NO: 3344 - DNA, 351 bp, synthetic construct
  source 1..351: mol_type = other DNA
gaagttcagctccagcagagcggccctgagcttgtgaaacctggcgcttccgtgaagatcagctgcaaggccagcggctacagcttcaccggctacaccatgaactgggtcaagcagtcccacggcaagaacctggaatggatcggcctgattaacccctacaacggcggcacctcctacaaccagaagttcaaggccaaggccacactgaccgtggacaagagcagcagcacagcctacatgcagctgaagtccctgaccagcgaggacagcgccgtgtactactgcgccagagattacggctacgtgctggactattggggccagggcacaagcgtgacagtgtctagt

SEQ ID NO: 3345 - DNA, 351 bp, synthetic construct
  source 1..351: mol_type = other DNA
gaagttcagctccagcagagcggccctgagcttgtgaaacctggcgcttccatgaagatcagctgcaaggccagcggcttcagcttcaccggctacaccatgaactgggtcaagcagtcccacggcaagaacctggaatggatcggcctgattagcccctacaacggcggcacctcctacaaccagaagttcaagggcaaggccacactgaccgtggacaagagcagcagcacagcctacatggagctgctgtccctgaccagcgaggacagcgccgtgtactactgcgccagagattacggctacgtgctggactattggggccagggcacaaccctgacagtgtctagt

SEQ ID NO: 3346 - DNA, 351 bp, synthetic construct
  source 1..351: mol_type = other DNA
gaagttcagctccagcagagcggccctgagcttgtgaaacctggcgcttccgtgaagatcagctgcaaggccagcggcttcagcttcaccggctacaccatgaactgggtcaagcagtcccacgtgaagaacctggaatggatcggcctgattagcccctacaacggcggcacctcctacaaccagaagttcaagggcaaggccacactgaccgtggacaagagcagcagcacagcctacatggagctgctgtccctgaccagcgaggacagcgccgtgtactactgcgccagagattacggcttcgtgctggactattggggccagggcacaagcgtgacagtgtctagt

SEQ ID NO: 3347 - DNA, 378 bp, synthetic construct
  source 1..378: mol_type = other DNA
caggttcagctggttcagagcggagccgaagtgaagaaacctggggcctctgtgaaggtgtcctgcaaggcttccggctacacctttaccaactacctgatcgagtgggtccgacaggctccaggacaaggactggaatggatgggcctgattaaccctggcagcggcggcaccaactacaacgagaagttcaagggcagagtgaccatgaccaccgacaccagcacaagcaccgcctacatggaactgcggagcctgagaagcgacgacaccgccgtgtattattgcgccagaagaagccctctcggctcttggatctactacgcctatgacggcgtggcctattggggccagggaacactggttacagtgtcctct

SEQ ID NO: 3348 - DNA, 378 bp, synthetic construct
  source 1..378: mol_type = other DNA
caggttcagctggttcagagcggagccgaagtgaagaaacctggggcctctgtgaaggtgtcctgcaaggcttccggctacgcctttaccaactacctgatcgagtgggtccgacaggctccaggacaaggactggaatggatgggcgtgattaaccctggcagcggcagcaccaactacaacgagaagttcaagggcagagtgaccatgaccaccgacaccagcacaagcaccgcctacatggaactgcggagcctgagaagcgacgacaccgccgtgtattattgcgccagaagaagccctctcggctcttggatctactacgcctatgacggcgtggcctattggggccagggaacactggttacagtgtcctct

SEQ ID NO: 3349 - DNA, 351 bp, synthetic construct
  source 1..351: mol_type = other DNA
gaagtccaacttgtggagtctggagggggcctggtgcagcccggcggctctctcagactgtcttgtgcggcaagcggctacaccttcagctcttactggatagaatgggtgaggcaggcacctggaaagggactggagtggattggagagattctgccaggagggggagatacaaattacaatgaaatcttcaaggggcgggccaccttttcagcggataccagcaagaatacagcttacctgcagatgaatagcctccgggcagaagataccgctgtttattattgcacgagacgggtgccaataagactggactattgggggcaagggactcttgtcaccgtcagttca

SEQ ID NO: 3350 - DNA, 351 bp, synthetic construct
  source 1..351: mol_type = other DNA
gaagtccaacttgtggagtctggagggggcctggtgcagcccggcggctctctcagactgtcttgtgcggcaagcggctacaccttcacctcttactggatagaatgggtgaggcaggcacctggaaagggactggagtggattggagagattctgccaggagggggagatacaaattacaatgaaatcttcaaggggcgggccaccttttcagcggataccagcaagaatacagcttacctgcagatgaatagcctccgggcagaagataccgctgtttattattgcacgagacgggtgccaataagactggactattgggggcaagggactcttgtcaccgtcagttca

SEQ ID NO: 3351 - DNA, 351 bp, synthetic construct; identical to SEQ ID NO: 3350
  source 1..351: mol_type = other DNA

SEQ ID NO: 3352 - DNA, 351 bp, synthetic construct
  source 1..351: mol_type = other DNA
caggttcagctgcaacagcctggcgctgagcttgtgaaacctggcgcttccgtgaagatgagctgcaaggccagcggctacaccttcaccagctactggatcaactggatgaagcagaaaccaggccagggcctcgaatggatcggacagattcttcctggcggcggagacaccaactacaacggcaagttcaagggcagagccacactgaccgccgatacctctagcagcacagcctacatgcagctgagcagcctgaccagcgaagatagcgccgtgtacttctgcaccagacgggtgcccatcagactggattattggggccagggaaccagcgtgaccgtgtcatct

SEQ ID NO: 3353 - DNA, 351 bp, synthetic construct; identical to SEQ ID NO: 3350
  source 1..351: mol_type = other DNA

SEQ ID NO: 3354 - DNA, 351 bp, synthetic construct; identical to SEQ ID NO: 3350
  source 1..351: mol_type = other DNA

SEQ ID NO: 3355 - DNA, 351 bp, synthetic construct
  source 1..351: mol_type = other DNA
caagttcagctggttcagagcggagccgaagtgaagaaacctggggcctctgtgaaggtgtcctgcaaagccagcggctacacctttaccagctactggatcaactgggtccgacaggcccctggacaaggactggaatggatgggacagatccttccaggcggaggggacaccaactacaacggcaagttcaagggcagagtgaccatcaccgccgacaccagcacaagcaccgcctacatggaactgagcagcctgagaagcgaggacaccgccgtgtattattgcaccagacgggtgcccatccggctggattattggggacagggaaccctggtcaccgtgtctagt

SEQ ID NO: 3356 - DNA, 351 bp, synthetic construct; identical to SEQ ID NO: 3350
  source 1..351: mol_type = other DNA

SEQ ID NO: 3357 - DNA, 351 bp, synthetic construct; identical to SEQ ID NO: 3349
  source 1..351: mol_type = other DNA

SEQ ID NO: 3358 - DNA, 339 bp, synthetic construct
  source 1..339: mol_type = other DNA
gaagtgcagctggttgaatcaggcggaggactggttcagcctggcggatctctgagactgtcttgtgccgccagcggctacaccttcaccagctactggatgaactgggtccgacaggcccctggcaaaggactggaatgggtcggaatgatcgaccccagcgacagcgagacacactacaaccacatcttcaaggaccgcttcaccatcagcgccgacaccagcaagaataccgcctacctccagatgaactccctgagagccgaggacaccgccgtgtactactgcgccagaaacctgtatctgttcggccagggaaccctggtcacagtgtcatct

SEQ ID NO: 3359 - DNA, 339 bp, synthetic construct
  source 1..339: mol_type = other DNA
gaagtgcagctggttgaatcaggcggaggactggttcagcctggcggatctctgagactgtcttgtgccgccagcggctacaccttcagcagctactggatgaactgggtccgacaggcccctggcaaaggactggaatgggtcggaatgatcgaccccagcgacagcgagacacactacaaccacatcttcaaggaccgcttcaccatcagcgccgacaccagcaagaataccgcctacctccagatgaactccctgagagccgaggacaccgccgtgtactactgcgccagaaacctgtatctgtggggccagggaaccctggtcacagtgtcatct

SEQ ID NO: 3360 - DNA, 339 bp, synthetic construct; identical to SEQ ID NO: 3358
  source 1..339: mol_type = other DNA

SEQ ID NO: 3361 - DNA, 339 bp, synthetic construct; identical to SEQ ID NO: 3359
  source 1..339: mol_type = other DNA

SEQ ID NO: 3362 - DNA, 339 bp, synthetic construct; identical to SEQ ID NO: 3358
  source 1..339: mol_type = other DNA

SEQ ID NO: 3363 - DNA, 339 bp, synthetic construct
  source 1..339: mol_type = other DNA
gaagtgcagctggttgaatcaggcggaggactggttcagcctggcggatctctgagactgtcttgtgccgccagcggctacaccttcaccaactactggatgaactgggtccgacaggcccctggcaaaggactggaatgggtcggaatgatcgaccccagcgacagcgagacacactacaaccacatcttcaaggaccgcttcaccatcagcgccgacaccagcaagaataccgcctacctccagatgaactccctgagagccgaggacaccgccgtgtactactgcgccagaaacctgtatctgtggggccagggaaccctggtcacagtgtcatct

SEQ ID NO: 3364 - DNA, 339 bp, synthetic construct; identical to SEQ ID NO: 3363
  source 1..339: mol_type = other DNA

SEQ ID NO: 3365 - DNA, 351 bp, synthetic construct
  source 1..351: mol_type = other DNA
gaagttcagcttcagcagagcggagccgagctgatgaagcctggcgcttctgtgaagatttcctgcaaggccaccggctacaccttcagcagctactggatcgagtgggtcaagcagaggcccggacatggcctggaatggatcggagaaattctgcctggcggcggagacaccaactacaacgagattttcaagggcaaagccaccttcaccgccgacaccagcagcaacacagcctacatgcagctgagcagcctgaccagcgaagatagcgccgtgtactactgcaccagacgggtgcccgtgtacttcgattattggggccagggcaccagcgtgaccgtttcttct

SEQ ID NO: 3366 - DNA, 339 bp, synthetic construct
  source 1..339: mol_type = other DNA
caggtgcaactgcagcagcctggcgctgaacttgtgcggccaggcgcctctgtgaagctgagctgtaaagccagcggctacaccttcaccagctactggatgaactgggtcaagcagcgcccaggccagggcctggaatggatcggaatgatcgaccccagcgacagcgagacacactacaaccacatcttcaaggacaaggccaccctgaccgtggacaagtccagcagcacagcctacctgcaactgtccagcctgaccagcgaggacagcgccgtgtactactgcgcccggaacctgtatctgtggggccagggaacaagcgtgaccgtgtctagc

SEQ ID NO: 3367 - DNA, 351 bp, synthetic construct; identical to SEQ ID NO: 3349
  source 1..351: mol_type = other DNA

SEQ ID NO: 3368 - DNA, 351 bp, synthetic construct; identical to SEQ ID NO: 3350
  source 1..351: mol_type = other DNA

SEQ ID NO: 3369 - DNA, 351 bp, synthetic construct; identical to SEQ ID NO: 3349
  source 1..351: mol_type = other DNA

SEQ ID NO: 3370 - DNA, 351 bp, synthetic construct
  source 1..351: mol_type = other DNA
gaagtgcagctggtgcagtctggggccgaagtgaagaaacctggcagcagcgtgaaggtgtcctgcaaagcctctggcggcagctttagcagctacggcatcaactgggtcaagcaggcccctggacaaggactggaatggatcggcgagattttccccagaagcggcaatacctactacaacgagaagttcgagggcagagccacactgaccgccgataagagcacaagcaccgcctacatggaactgcggagcctgagaagcgaggacaccgccgtgtactattgcgccaaaggcgacctgggcgacttcgattattggggccagggcaccaccgtgaccgtttcttct

SEQ ID NO: 3371 - DNA, 357 bp, synthetic construct
  source 1..357: mol_type = other DNA
gaagttcagctggttcagagcggagccgaagtgaagaaacctggggcctctgtgaaggtgtcctgcaaggccagcggctacacctttaccagctacggcatcaactgggttaagcaggctccaggccagggcctcgaatggatcggcgaaatctatcccagaagcgggaacatctactacaacgagaagttcaagggcaaagccacactgaccgccgacaagagcacaagcaccgcctacatggaactgcggagcctgagatccgatgacaccgccgtgtactattgcgccagaggctccgactacgacggcgattttgcctattggggccagggcacactggtcaccgttagctct

SEQ ID NO: 3372 - DNA, 336 bp, synthetic construct
  source 1..336: mol_type = other DNA
gacatcgtgctgacacagagccctccatctctggccgtgtctctgggacagagagccaccatcagctgtagagccagcgagagcgtggacagctacggcaagaccttcatgcactggcaccagcagaagccaggccagcctcctaagctgctgatctaccgggtgtccaacctggaaagcggcatccctgccagattttctggcagcggcagcagaaccgacttcaccctgaccatcaatcccgtggaagccgacgacgtggcaacctactactgccagcagagcaacgaggaccccttcacatttggcggaggcaccaagctggaaatcaagaga

SEQ ID NO: 3373 - DNA, 348 bp, synthetic construct
  source 1..348: mol_type = other DNA
gaagttcagctgcttgagacaggcggaggactggttcaacctggcggaagcagaggactgagctgtgaaggcagcggctttaccttcagcggcttctggatgagctgggtccgacagacacctggcaagaccctggaatggatcggcgacatcaatagcgacggcagcagcatcaactacgcccctagcatcaaggacaggttcaccatcttccgggacaacgacaagagcatcctgtacctccagatgaccaacgtgcggagcgaggacaccggcacctacttttgtgtgaccacctacggcgactactggggccagggaacaaccctgacagtgtctagtgcttct

SEQ ID NO: 3374 - DNA, 348 bp, synthetic construct
  source 1..348: mol_type = other DNA
gaggttcagctgcttgagacaggcggaggactggttcaacctggcggaagcagaggactgagctgtgaaggcagcggctttaccttcagcggcttctggatgagctgggtccgacagacacctggcaagaccctggaatggatcggcgacatcaatagcgacggcagcagcatcaactacgcccctagcatcaaggacaggttcaccatcttccgggacaacgacaagagcatcctgtacctccagatgaccaacgtgcggagcgaggacaccggcacctacttttgtgtgaccacctacggcgactactggggccagggaacaaccctgacagtgtctagtgcttct

SEQ ID NO: 3375 - DNA, 348 bp, synthetic construct
  source 1..348: mol_type = other DNA
gaggttcagctgcttgagacaggcggaggactggttcaacctggcggaagcagaggactgagctgtgaaggcagcggctttaccttcagcggcttctggatgagctgggtccgacagacacctggcaagaccctggaatggatcggcgacatcaatagcgacggcagcgccatcaactacgcccctagcatcaaggacaggttcaccatcttccgggacaacgacaagaacatcctgtacctccagatgaccaacgtgcggagcgaggacaccggcacctacttttgtgtgaccacctacggcgactactggggccagggaacaaccctgacagtgtctagtgcttct

SEQ ID NO: 3376 - DNA, 348 bp, synthetic construct
  source 1..348: mol_type = other DNA
gaggttcagctgcttgagacaggcggaggactggttcaacctggcggaagcagaggactgagctgtgaaggcagcggctttaccttcagcggcttctggatgagctgggtccgacagacacctggcaagaccctggaatggatcggcgacatcaatagcgacggcagcgccgtcaactacgcccctagcatcaaggacaggttcaccatcttccgggacaacgacaagaacatcctgtacctccagatgaccaacgtgcggagcgaggacaccggcacctacttttgtgtgaccacctacggcgactactggggccagggaacaaccctgacagtgtctagtgcttct

SEQ ID NO: 3377 - DNA, 363 bp, synthetic construct
  source 1..363: mol_type = other DNA
caactccagctgcaagagtctggccctggcctggtcaagcctagcgaaacactgagcctgacctgtaccgtgtctggcggctctatcagctccaacagctatttctggggctggatcagacaacctcctggcaaaggactggaatggatcggctccatctactacagcggcagcacctactacaaccccaccctgaagtccagagtgaccatctccgtggacaccagcaagaaccagttctccctgaagctgagcagcgtgacagccgccgataccgccgtgtattattgtgccagacatgacggcgctgtggccggcctgtttgattattggggacagggcaccctggtcaccgtgtcatct

SEQ ID NO: 3378 - DNA, 363 bp, synthetic construct
  source 1..363: mol_type = other DNA
caactccagctgcaagagtctggccctggcctggtcaagcctagcgaaacactgagcctgacctgtaccgtgtctggcggctctatcagctccaacagctattattggggctggatcagacaacctcctggcaaaggactggaatggatcggctccatctactacagcggcagcacctactacaaccccaccctgaagtccagagtgaccatctccgtggacaccagcaagaaccagttctccctgaagctgagcagcgtgacagccgccgataccgccgtgtattattgtgccagacatgacggcgctgtggccggcctgtttgattattggggacagggcaccctggtcaccgtgtcatct

SEQ ID NO: 3379 - DNA, 399 bp, synthetic construct
  source 1..399: mol_type = other DNA
caggttcagctccagcagtctggacctggcctggtcaagcctagccagacactgtctctgacctgtgccatcagcggcgatagcgtgtcctctaatagagccgcctggaactggatcagacagagccctagcagaggactccagtggctgggcagaacctactaccgcagcaagtggtacaacgactacgccgtgtctctgcggagccggatcaccatcaatcccgtgaccagcaagaaccaggtggccctgcacatgaacagcgtgacccctgaagataccgccgtgtactactgtgccagagccggaattgtggtggtgcccggacctgagacattctactactacgaccacggcctggacgtgtggggccagggaacaacagtgactgtctcttct

SEQ ID NO: 3380 - DNA, 399 bp, synthetic construct
  source 1..399: mol_type = other DNA
caggttcagctccagcagtctggacctggcctggtcaagcctagccagacactgtctctgacctgtgccatcagcggcgatagcgtgtcctctaatagcgccgcctggaactggatcagacagagccctagcagaggactcgaatggctgggcagaacctactaccgcagcaagtggtacaacgactacgccgtgtctctgcggagccggatcaccatcaatcccgtgaccagcaagaaccaggtggccctgcacatgaacagcgtgacccctgaagataccgccgtgtactactgtgccagagccggaattgtggtggtgcccggacctgagacattctactactacgaccacggcctggacgtgtggggccagggaacaacagtgactgtctcttct

SEQ ID NO: 3381 - DNA, 399 bp, synthetic construct
  source 1..399: mol_type = other DNA
caggttcagctccagcagtctggacctggcctggtcaagcctagccagacactgtctctgacctgtgccatcagcggcgatagcgtgtcctctaatagcgccgcctggaactggatcagacagagccctagcagaggactcgaatggctgggcagaacctactacaagagcaagtggtacaacgactacgccgtgtctctgcggagccggatcaccatcaatcccgtgaccagcaagaaccaggtggccctgcacatgaacagcgtgacccctgaagataccgccgtgtactactgtgccagagccggaattgtggtggtgcccggacctgagacattctactactacgaccacggcctggacgtgtggggccagggaacaacagtgactgtctcttct

SEQ ID NO: 3382 - DNA, 399 bp, synthetic construct
  source 1..399: mol_type = other DNA
caggttcagctccagcagtctggacctggcctggtcaagcctagccagacactgtctctgacctgtgccatcagcggcgatagcgtgtcctctaatagcgccgcctggaactggatcagacagagccctagcagaggactcgaatggctgggcagaacctactacaagagcaagtggtacaacgactacgccgtgtctctgcggagccggatcaccatcaatcccgtgaccagcaagaaccaggtggccctgcacatgaacagcgtgacccctgaagataccgccgtgtactactgtgccagagccggaattgtggtggtgcccggacctgagacattctactactactaccacggcctggacgtgtggggccagggaacaacagtgactgtctcttct

SEQ ID NO: 3383 - DNA, 399 bp, synthetic construct
  source 1..399: mol_type = other DNA
caggttcagctccagcagtctggacctggcctggtcaagcctagccagacactgtctctgacctgtgccatcagcggcgatagcgtgtcctctaatagcgccgcctggaactggatcagacagagccctagcagaggactcgaatggctgggcagaacctactacaagagcaagtggtacaacgactacgccgtgtctctgcggagccggatcaccatcaatcccgtgaccagcaagaaccaggtggccctgcacatgaacagcgtgacccctgaagataccgccgtgtactactgtgccagagccggaattgtggtggtgcccggacctgacacattctactactacgaccacggcctggacgtgtggggccagggaacaacagtgactgtctcttct

SEQ ID NO: 3384 - DNA, 399 bp, synthetic construct
  source 1..399: mol_type = other DNA
caggttcagctccagcagtctggacctggcctggtcaagcctagccagacactgtctctgacctgtgccatcagcggcgatagcgtgtcctctaatagcgccgcctggaactggatcagacagagccctagcagaggactcgaatggctgggcagaacctactacaagagcaagtggtacaacgactacgccgtgtctctgcggagccggatcaccatcaatcccgtgaccagcaagaaccaggtggccctgcacatgaacagcgtgacccctgaagataccgccgtgtactactgtgccagagccggaattgtggtggtgcccggacctgacacatactactactacgaccacggcctggacgtgtggggccagggaacaacagtgactgtctcttct

SEQ ID NO: 3385 - DNA, 399 bp, synthetic construct
  source 1..399: mol_type = other DNA
caggttcagctccagcagtctggacctggcctggtcaagcctagccagacactgtctctgacctgtgccatcagcggcgatagcgtgtcctctaatagcgccgcctggaactggatcagacagagccctagcagaggactcgaatggctgggcagaacctactacaagagcaagtggtacaacgactacgccgtgtctctgcggagccggatcaccatcaatcccgtgaccagcaagaaccaggtggccctgcacatgaacagcgtgacccctgaagataccgccgtgtactactgtgccagagccggaattgtggtggtgcccggacctgacacatactactactactaccacggcatggacgtgtggggccagggaacaacagtgactgtctcttct

SEQ ID NO: 3386 - DNA, 399 bp, synthetic construct
  source 1..399: mol_type = other DNA
caggttcagctccagcagtctggacctggcctggtcaagcctagccagacactgtctctgacctgtgccatcagcggcgatagcgtgtcctctaatagcgccgcctggaactggatcagacagagccctagcagaggactcgaatggctgggcagaacctactacaagagcaagtggtacaacgactacgccgtgtctgtgaagagccggatcaccatcaatcccgtgaccagcaagaaccaggtggccctgcacatgaacagcgtgacccctgaagataccgccgtgtactactgtgccagagccggaattgtggtggtgcccggacctgagacattctactactactaccacggcctggacgtgtggggccagggaacaacagtgactgtctcttct

SEQ ID NO: 3387 - DNA, 16 bp, synthetic construct
  source 1..16: mol_type = other DNA
gggggggggggggggg

SEQ ID NO: 3388 - DNA, 16 bp, synthetic construct
  source 1..16: mol_type = other DNA
gggggggggggggggg

SEQ ID NO: 3389 - DNA, 16 bp, synthetic construct
  source 1..16: mol_type = other DNA
gggggggggggggggg

SEQ ID NO: 3390 - DNA, 16 bp, synthetic construct
  source 1..16: mol_type = other DNA
gggggggggggggggg

SEQ ID NO: 3391 - DNA, 16 bp, synthetic construct
  source 1..16: mol_type = other DNA
gggggggggggggggg

SEQ ID NO: 3392 - DNA, 16 bp, synthetic construct
  source 1..16: mol_type = other DNA
gggggggggggggggg

SEQ ID NO: 3393 - DNA, 16 bp, synthetic construct
  source 1..16: mol_type = other DNA
gggggggggggggggg

SEQ ID NO: 3394 - DNA, 16 bp, synthetic construct
  source 1..16: mol_type = other DNA
gggggggggggggggg

SEQ ID NO: 3395 - DNA, 16 bp, synthetic construct
  source 1..16: mol_type = other DNA
gggggggggggggggg

SEQ ID NO: 3396 - DNA, 16 bp, synthetic construct
  source 1..16: mol_type = other DNA
gggggggggggggggg

SEQ ID NO: 3397 - DNA, 16 bp, synthetic construct
  source 1..16: mol_type = other DNA
gggggggggggggggg

SEQ ID NO: 3398 - DNA, 16 bp, synthetic construct
  source 1..16: mol_type = other DNA
gggggggggggggggg

SEQ ID NO: 3399 - DNA, 16 bp, synthetic construct
  source 1..16: mol_type = other DNA
gggggggggggggggg

SEQ ID NO: 3400 - DNA, 16 bp, synthetic construct
  source 1..16: mol_type = other DNA
gggggggggggggggg

SEQ ID NO: 3401 - DNA, 16 bp, synthetic construct
  source 1..16: mol_type = other DNA
gggggggggggggggg

SEQ ID NO: 3402 - DNA, 16 bp, synthetic construct
  source 1..16: mol_type = other DNA
gggggggggggggggg

SEQ ID NO: 3403 - DNA, 16 bp, synthetic construct
  source 1..16: mol_type = other DNA
gggggggggggggggg

SEQ ID NO: 3404 - DNA, 16 bp, synthetic construct
  source 1..16: mol_type = other DNA
gggggggggggggggg

SEQ ID NO: 3405 - DNA, 16 bp, synthetic construct
  source 1..16: mol_type = other DNA
gggggggggggggggg

SEQ ID NO: 3406 - DNA, 16 bp, synthetic construct
  source 1..16: mol_type = other DNA
gggggggggggggggg

SEQ ID NO: 3407 - DNA, 16 bp, synthetic construct
  source 1..16: mol_type = other DNA
gggggggggggggggg

SEQ ID NO: 3408 - DNA, 16 bp, synthetic construct
  source 1..16: mol_type = other DNA
gggggggggggggggg

SEQ ID NO: 3409 - DNA, 16 bp, synthetic construct
  source 1..16: mol_type = other DNA
gggggggggggggggg

SEQ ID NO: 3410 - DNA, 16 bp, synthetic construct
  source 1..16: mol_type = other DNA
gggggggggggggggg

SEQ ID NO: 3411 - DNA, 16 bp, synthetic construct
  source 1..16: mol_type = other DNA
gggggggggggggggg

SEQ ID NO: 3412 - DNA, 16 bp, synthetic construct
  source 1..16: mol_type = other DNA
gggggggggggggggg

SEQ ID NO: 3413 - DNA, 16 bp, synthetic construct
  source 1..16: mol_type = other DNA
gggggggggggggggg

SEQ ID NO: 3414 - DNA, 16 bp, synthetic construct
  source 1..16: mol_type = other DNA
gggggggggggggggg

SEQ ID NO: 3415 - DNA, 16 bp, synthetic construct
  source 1..16: mol_type = other DNA
gggggggggggggggg

SEQ ID NO: 3416 - DNA, 16 bp, synthetic construct
  source 1..16: mol_type = other DNA
gggggggggggggggg

SEQ ID NO: 3417 - DNA, 16 bp, synthetic construct
  source 1..16: mol_type = other DNA
gggggggggggggggg

SEQ ID NO: 3418 - DNA, 16 bp, synthetic construct
  source 1..16: mol_type = other DNA
gggggggggggggggg

SEQ ID NO: 3419 - DNA, 16 bp, synthetic construct
  source 1..16: mol_type = other DNA
gggggggggggggggg

SEQ ID NO: 3420 - DNA, 16 bp, synthetic construct
  source 1..16: mol_type = other DNA
gggggggggggggggg

SEQ ID NO: 3421 - DNA, 738 bp, synthetic construct
  source 1..738: mol_type = other DNA
caatctgtgctgacccagcctccaagcgtgtccgtttctcctggacagaccgccagcatcacctgtagcggagataagctgggcgacaagttcgcctgctggtatcagcagaagcccggccagtctcctgtgctggtcatctaccaggatagcaagaggcccagcggcatccccgagagattttccggcagcaacagcggcaataccgccacactgacaatcagcggcacccaggctatggacgaggccgactactattgccaggcttgggattccgatggcaaggccacagtggtgtttggcaccggcaccaaggtggaaatcaagggcggaggcggaagtggaggcggaggatctggcggcggaggctctgaggttcagctgcttgagtctggcggaggactggttcaacctggcggaagcctgagactgtcttgtgccgccagcggcttcacctttagcagctacgccatgagctgggtccgacaggctcctggcaaaggactggaatgggtgtccgccatctctggctctggcggcagcacatattacgccgactctgtgaagggcagattcaccatcagccgggacaacagcaagaacaccctgtacctccagatgaacagcctgagagccgaggacaccgccgtgtactactgtgccaaagagcagtgggagggcgactacttcagcgccttcgatatttggggccagggcacaatggtcaccgtgtctagc

SEQ ID NO: 3422 - DNA, 738 bp, synthetic construct
  source 1..738: mol_type = other DNA
caatctgtgctgacccagcctccaagcgtgtccgtttctcctggacagaccgccagcatcacctgtagcggagataagctgggcgacaagtacgcctgctggtatcagcagaagcccggccagtctcctgtgctggtcatctaccaggatagcaagaggcccagcggcatccccgagagattttccggcagcaacagcggcaataccgccacactgacaatcagcggcacccaggctatggacgaggccgactactattgccaggcttgggattccgatggcaaggccacagtggtgtttggcaccggcaccaaggtggaaatcaagggcggaggcggaagtggaggcggaggatctggcggcggaggctctgaggttcagctgcttgagtctggcggaggactggttcaacctggcggaagcctgagactgtcttgtgccgccagcggcttcacctttagcagctacgccatgagctgggtccgacaggctcctggcaaaggactggaatgggtgtccgccatctctggctctggcggcagcacatattacgccgactctgtgaagggcagattcaccatcagccgggacaacagcaagaacaccctgtacctccagatgaacagcctgagagccgaggacaccgccgtgtactactgtgccaaagagcagtgggagggcgactacttcagcgccttcgatatttggggccagggcacaatggtcaccgtgtctagc

SEQ ID NO: 3423 - DNA, 738 bp, synthetic construct
  source 1..738: mol_type = other DNA
caatctgtgctgacccagcctccaagcgtgtccgtttctcctggacagaccgccagcatcacctgtagcggagataagctgggcgacaagtacgcctgctggtatcagcagaagcccggccagtctcctgtgctggtcatctaccaggataccaagaggcccagcggcatccccgagagattttccggcagcaacagcggcaataccgccacactgacaatcagcggcacccaggctatggacgaggccgactactattgccaggcttgggattccgatggcaaggccacagtggtgtttggcaccggcaccaaggtggaaatcaagggcggaggcggaagtggaggcggaggatctggcggcggaggctctgaggttcagctgcttgagtctggcggaggactggttcaacctggcggaagcctgagactgtcttgtgccgccagcggcttcacctttagcagctacgccatgagctgggtccgacaggctcctggcaaaggactggaatgggtgtccgccatctctggctctggcggcagcacatattacgccgactctgtgaagggcagattcaccatcagccgggacaacagcaagaacaccctgtacctccagatgaacagcctgagagccgaggacaccgccgtgtactactgtgccaaagagcagtgggagggcgactacttcagcgccttcgatatttggggccagggcacaatggtcaccgtgtctagc

SEQ ID NO: 3424 - DNA, 744 bp, synthetic construct
  source 1..744: mol_type = other DNA
caatctgtgctgacccagcctccaagcgtgtccgtttctcctggacagaccgccagcatcacctgtagcggagataagctgggcaataagtacgcctgctggtatcagcagaagcccggccagtctcctgtgctggtcatctaccaggatagcaagaggcccagcggcatccccgagagattttccggcagcaacagcggcaataccgccacactgacaatcagcggcacccaggctatggacgaggccgactactattgccaggcttgggattccgatggcaaggccacagtggtgtttggcaccggcaccaaggtggaaatcaagggcggaggcggaagtggaggcggaggatctggcggcggaggctctgaggttcagctgcttgagtctggcggaggactggttcaacctggcggaagcctgagactgtcttgtgccgccagcggcttcacctttagcagctacgccatgagctgggtccgacaggctcctggcaaaggactggaatgggtgtccgccatctctggctctggcggcagcacatattacgccgactctgtgaagggcagattcaccatcagccgggacaacagcaagaacaccctgtacctccagatgaacagcctgagagccgaggacaccgccgtgtactactgtgccaaagagcagtgggagggcgactacttcagcgccttcgatatttggggccagggcacaatggtcaccgtgtctagcacgcgt

SEQ ID NO: 3425 - DNA, 759 bp, synthetic construct
  source 1..759: mol_type = other DNA
aacttcatgctgacccagcctcacagcgtgtccgagtctccaggcaagaccgtgaccatcagctgcacaagaagcagcggctctatcgccagcaactacgtgcagtggtatcagcagaggccaggcagcgcacctaccaccgtgatctacgaggataaccagaggccaagcggcgtgcccgatagattttctggcagcatcgacagcagcagcaacagcgccagcctgacaatcagcggcctgaaaacagaggacgaggccgactactactgccagagctatgatctggctgccgacgtgcgcgtggtgtttggcactggaacaaaagtgaccgtgagctccggcggaggcggaagtggaggcggaggatctggcggcggaggctctgaagttcagctgcttgaatcaggcggcggactggttcaacctggcggatctctgagactgagctgtgccgccagcggcttcacctttagcagctacgccatgtcctgggtccgacaggctcctggcaaaggactggaatgggtgtccgccatctctggctcaggcggcagcacatattacgccgactctgtgaagggcagattcaccatcagccgggacaacagcaagaacaccctgtacctccagatgaacagcctgagagccgaggacaccgccgtgtactattgtgccaaaggcggcgagaacaccttcgagtctcaccctgtggccttcgacatctggggccagggaacaatggtcaccgtgtctagt

SEQ ID NO: 3426 - DNA, 759 bp, synthetic construct
  source 1..759: mol_type = other DNA
aacttcatgctgacccagcctcacagcgtgtccgagtctccaggcaagaccgtgaccatcagctgcacaagaagaagcggctctatcgccagcaactacgtgcagtggtatcagcagaggccaggcagcgcacctaccaccgtgatctacgaggataaccagaggccaagcggcgtgcccgatagattttctggcagcatcgacagcagcagcaacagcgccagcctgacaatcagcggcctgaaaacagaggacgaggccgactactactgccagagctatgatctggctgccgacgtgcgcgtggtgtttggcactggaacaaaagtgaccgtgagctccggcggaggcggaagtggaggcggaggatctggcggcggaggctctgaagttcagctgcttgaatcaggcggcggactggttcaacctggcggatctctgagactgagctgtgccgccagcggcttcacctttagcagctacgccatgtcctgggtccgacaggctcctggcaaaggactggaatgggtgtccgccatctctggctcaggcggcagcacatattacgccgactctgtgaagggcagattcaccatcagccgggacaacagcaagaacaccctgtacctccagatgaacagcctgagagccgaggacaccgccgtgtactattgtgccaaaggcggcgagaacaccttcgagtctcaccctgtggccttcgacatctggggccagggaacaatggtcaccgtgtctagt

SEQ ID NO: 3427 - DNA, 759 bp, synthetic construct
  source 1..759: mol_type = other DNA
aacttcatgctgacccagcctcacagcgtgtccgagtctccaggcaagaccgtgaccatcagctgcacaagaaacagcggctctatcgccagcaactacgtgcagtggtatcagcagaggccaggcagcgcacctaccaccgtgatctacgaggataaccagaggccaagcggcgtgcccgatagattttctggcagcatcgacagcagcagcaacagcgccagcctgacaatcagcggcctgaaaacagaggacgaggccgactactactgccagagctatgatctggctgccgacgtgcgcgtggtgtttggcactggaacaaaagtgaccgtgagctccggcggaggcggaagtggaggcggaggatctggcggcggaggctctgaagttcagctgcttgaatcaggcggcggactggttcaacctggcggatctctgagactgagctgtgccgccagcggcttcacctttagcagctacgccatgtcctgggtccgacaggctcctggcaaaggactggaatgggtgtccgccatctctggctcaggcggcagcacatattacgccgactctgtgaagggcagattcaccatcagccgggacaacagcaagaacaccctgtacctccagatgaacagcctgagagccgaggacaccgccgtgtactattgtgccaaaggcggcgagaacaccttcgagtctcaccctgtggccttcgacatctggggccagggaacaatggtcaccgtgtctagt

SEQ ID NO: 3428 - DNA, 759 bp, synthetic construct
  source 1..759: mol_type = other DNA
aacttcatgctgacccagcctcacagcgtgtccgagtctccaggcaagaccgtgaccatcagctgcacaagaagcagcggctctatcgccaacaactacgtgcagtggtatcagcagaggccaggcagcgcacctaccaccgtgatctacgaggataaccagaggccaagcggcgtgcccgatagattttctggcagcatcgacagcagcagcaacagcgccagcctgacaatcagcggcctgaaaacagaggacgaggccgactactactgccagagctatgatctggctgccgacgtgcgcgtggtgtttggcactggaacaaaagtgaccgtgagctccggcggaggcggaagtggaggcggaggatctggcggcggaggctctgaagttcagctgcttgaatcaggcggcggactggttcaacctggcggatctctgagactgagctgtgccgccagcggcttcacctttagcagctacgccatgtcctgggtccgacaggctcctggcaaaggactggaatgggtgtccgccatctctggctcaggcggcagcacatattacgccgactctgtgaagggcagattcaccatcagccgggacaacagcaagaacaccctgtacctccagatgaacagcctgagagccgaggacaccgccgtgtactattgtgccaaaggcggcgagaacaccttcgagtctcaccctgtggccttcgacatctggggccagggaacaatggtcaccgtgtctagt

SEQ ID NO: 3429 - DNA, 717 bp, synthetic construct
  source 1..717: mol_type = other DNA
gacatcgtgatgacacagacccctgccacactgtctgtgtctgccggcgagagagtgaccattacctgcaaagccagccagagcgtgtccaacgacgtgacctggtatcagcagaagcctggacaggcccctcggctgctgatctacagcgccagcaatagatacagcggcgtgcccgccagattttccggctctggatacggcaccgagttcaccttcaccatcagcagcgtgcagagcgaggacttcgccgtgtacttctgccagcaagactacagctctttcggccagggcaccaagctggaaatcaagagaggcggaggcggaagtggaggcggaggatctggcggcggaggctctcaggtgcagctggtggaatctggacctggcgtggtgcagcctggcagaagcctgagaatcagctgtgccgtgtccggcttcagcgtgaccaactacggcgtgcactgggtgcgccagccacctggaaaaggactggaatggctgggcgtgatctgggctggcggcatcaccaactacaacagcgccttcatgtcccggctgaccatctccaaggacaacagcaagaacaccgtgtacctccagatgaacagcctgcgggccgaggacaccgccatgtactactgtgcttccagaggcggccactacggctacgccctggattattggggccagggaaccctcgtgaccgtgtcctct

SEQ ID NO: 3430 - DNA, 717 bp, synthetic construct
  source 1..717: mol_type = other DNA
gacatccagatgacacagagccctagcagcctgtctgccagcgtgggagacagagtgaccatcacatgcaaggccagccagagcgtgtccaacgacgtgacctggtatcagcagaagcctggacaggcccctaagctgctgatctacagcgccagcaacagatacagcggagtgcccgccagattttccggctctggctacggcaccgagttcacctttaccatcagcagcgtgcagagcgaggacttcgccgtgtacttctgccagcaagactacagcagcttcggccagggcaccaagctggaaatcaagagaggcggaggcggaagtggaggcggaggatctggcggcggaggctctcaggtgcagctggtggaatctggacctggcgtggtgcagcctggcagaagcctgagaatcagctgtgccgtgtccggcttcagcgtgaccaactacggcgtgcactgggtgcgccagccacctggaaaaggactggaatggctgggcgtgatctgggctggcggcatcaccaactacaacagcgccttcatgtcccggctgaccatctccaaggacaacagcaagaacaccgtgtacctccagatgaacagcctgcgggccgaggacaccgccatgtactactgtgcttccagaggcggccactacggctacgccctggattattggggccagggaaccctcgtgaccgtgtcctct

SEQ ID NO: 3431 - DNA, 726 bp, synthetic construct
  source 1..726: mol_type = other DNA
gacatccagatgacacagagccctagcagcctgtctgccagcgtgggagacagagtgaccatcacctgtagagccagcagcagcgtgtccagcagctacctgcattggtatcagcagaagcccggcaaggcccctaaagtgtggatctacagcaccagcaatctggcctctggcgtgcccagcagattttctggctctggcagcggcaccgacttcaccctgacaatatctagcctccagcctgaggacttcgccacctactactgccagcagtacagcggctaccccatcacctttggacagggcaccaaggtggaaatcaagagaggcggaggcggaagtggaggcggaggatctggcggcggaggctctcaagttcagctgcaagagtctggccctggcctggtcaagcctagccagacactgagcatcacatgcaccgtgtccggctttagcctggcctcctacaacatccactgggtccgacagcctccaggcaaaggactggaatggctgggagtgatttgggctggcggcagcaccaactacaacagcgcactgatgagccggctgaccatcagcaaggacaacagcaagaaccaggtgttcctgaagatgagcagcctgacagccgccgataccgccgtgtactactgtgccaagagaagcgacgactacagttggttcgcctactggggccagggcacactggttacagtcagctct

SEQ ID NO: 3432 - DNA, 729 bp, synthetic construct
  source 1..729: mol_type = other DNA
gagaacgtgctgacacagagccctgccatcatgagtgcctctccaggcgagaaagtgaccatgacctgtagagccagcagcagcgtgtccagcagctacctgcactggtatcagcagaagtccggcgcaagccccaaagtgtggatctacagcaccagcaatctggcctctggcgtgccaggcagattttctggctctggcagcggcacaagctacagcctgacaatcagctccgtggaagccgaagatgccgccacctactactgccagcagtacagcggctaccccatcacatttggagccggcaccaaggtggaagtgaagagaggcggaggcggaagtggaggcggaggatctggcggcggaggctctcaggttcagctcaaagaatctggccccgtgctggtggccccaagccagacactgtctatcacctgtaccgtgtccggcttcagcctggcctcctacaacatccactgggtccgacagcctccaggcaaaggactggaatggctgggagtgatttgggctggcggcagcaccaactacaacagcgcactgatgagccggctgagcatcagcaaggacaacagcaagagccaggtgttcctccagatgaactccctccagaccgacgacaccgccatgtactactgcgccaagagaagcgacgactacagttggttcgcctactggggccagggcacactggttactgtgtctgcttct

SEQ ID NO: 3433 - DNA, 738 bp, synthetic construct
  source 1..738: mol_type = other DNA
gacatcgtgatgacacagagccctgatagcctggccgtgtctctgggagagagagccaccatcaactgcaagagcagccagagcctgctgaacagcggcaaccagaagaactacctggcctggtatcagcagaagcccggccagcctcctaagctgctgatctactggggcagcaccagatccacaggcgtgcccgatagattttctggctctggcagcggcaccgacttcaccctgacaatttctagcctgcaagccgaggacgtggccgtgtactactgccagaacgactacacataccccttcaccttcggccagggcaccaagctggaaatcaaaggcggaggcggaagtggaggcggaggatctggcggcggaggctctcaagttcagctggttcagagcggagccgaagtgaagaaacctggggcctctgtgaaggtgtcctgcaaggcttccggctataccttcaccagcttttggctgaactgggtccgacaggcccctggacaaggactggaatggatgggcaacatctaccccagcaccagctacaccgtgtacaaccagaaattcaaggaccgcgtgaccatgaccagggacaccagcacaagcacagtgtacatggaactgagcagcctgcggagcgaggataccgccgtgtattattgcgccagaacctggcggggcaacagcttcgattattggggccagggaaccaccgtgaccgtgtcatct

SEQ ID NO: 3434 - DNA, 738 bp, synthetic construct
  source 1..738: mol_type = other DNA
gacatcgtgatgacacagagccctgatagcctggccgtgtctctgggagagagagccaccatcaactgcaagagcagccagagcctgctgaacagcggcaacaacaagaactacgtgacatggtatcagcagaagcccggccagcctcctaagctgctgatctactggggcagcaccagatccacaggcgtgcccgatagattttctggctctggcagcggcaccgacttcaccctgacaatttctagcctgcaagccgaggacgtggccgtgtactactgccagaacgactacacataccccttcaccttcggccagggcaccaagctggaaatcaaaggcggaggcggaagtggaggcggaggatctggcggcggaggctctcaagttcagctggttcagagcggagccgaagtgaagaaacctggggcctctgtgaaggtgtcctgcaaggcttccggctataccttcaccagcttttggctgaactgggtccgacaggcccctggacaaggactggaatggatgggcaacatctaccccagcgacagctacaccgtgtacaaccagaaattcaaggaccgcgtgaccatgaccagggacaccagcacaagcacagtgtacatggaactgagcagcctgcggagcgaggataccgccgtgtattattgcgccagaacctggcggggcaacagcttcgattattggggccagggaaccaccgtgaccgtgtcatct

SEQ ID NO: 3435 - DNA, 732 bp, synthetic construct
  source 1..732: mol_type = other DNA
gacatccagatgacacagagccctagcagcctgtctgccagcgtgggagacagagtgaccatcacatgcaaggccagcgaccacatcaacaactggctggcctggtatcagcagaagcctggacaggcccctaagctgctgatctacggcgctaccacactggaaacaggcgtgcccagcagattttctggcagcggctctggcaccgactacaccctgacaatatccagcctccagcctgaggacttcgccacctactactgtcagcagagctggaacaccccttggacattcggccagggcaccaagctggaaatcaagagaggcggaggcggaagtggaggcggaggatctggcggcggaggctctcaagttcagcttcaacagcctggcgctgagctggtcaaacctggcgcttctgtgaagatgagctgcaaagccagcggctacaccttcagcagctactggatcaactggatgaagcagaaacccggccagggactcgaatggatcggccaaatctatcccggcgacggcgacaccaactacaacggcaagttcaagggcagagccacactgaccgccgatacctctagcagcacagcctacatgcagctgagcagcctgaccagcgaagatagcgccgtgtacttctgtgcccggtccatcacaacagtcgtgggctgcgctatggactattggggccagggaacaagcgtgaccgtgtctagt

SEQ ID NO: 3436 - DNA, 732 bp, synthetic construct
  source 1..732: mol_type = other DNA
gacatccagatgacacagagccctagcagcctgtctgccagcgtgggagacagagtgaccatcacatgcaaggccagcgaccacatcaacaactggctggcctggtatcagcagaagcctggacaggcccctaagctgctgatctacggcgctaccacactggaaacaggcgtgcccagcagattttctggcagcggctctggcaccgactacaccctgacaatatccagcctccagcctgaggacttcgccacctactactgtcagcagagctggaacaccccttggacattcggccagggcaccaagctggaaatcaagagaggcggaggcggaagtggaggcggaggatctggcggcggaggctctcaagttcagcttcaacagcctggcgctgagctggtcaaacctggcgcttctgtgaagatgagctgcaaagccagcggctacgccttcagcagctcttggatcaactggatgaagcagaaacccggccagggactcgaatggatcggccaaatctatcccggcgacggcgacaccaactacaacggcaagttcaagggcagagccacactgaccgccgatacctctagcagcacagcctacatgcagctgagcagcctgaccagcgaagatagcgccgtgtacttctgtgcccggtccatcacaacagtcgtgggctgcgctatggactattggggccagggaacaagcgtgaccgtgtctagt

SEQ ID NO: 3437 - DNA, 732 bp, synthetic construct
  source 1..732: mol_type = other DNA
gacatccagatgacacagagccctagcagcctgtctgccagcgtgggagacagagtgaccatcacatgcaaggccagcgaccacatcaacaactggctggcctggtatcagcagaagcctggcaaggcccctaagctgctgatctacggcgctaccacactggaaacaggcgtgcccagcagattttctggcagcggctctggcaccgacttcaccctgacaatatccagcctccagcctgaggacttcgccacctactactgtcagcagagctggaacaccccttggacattcggccagggcaccaaggtggaaatcaagagaggtggcggaggatctggcggaggtggaagcggcggaggcggatctgaagttcagctggttgaatctggcggcggactggttcaacctggcggatctctgagactgagctgtgccgcctctggctacacctttagcagctactgggtcaactgggttcgacaggcccctggcaaaggactggaatgggtcgcccaaatctatcccggcgacggcgacaccaactacaacggcaagttcaagggcagattcaccatcagccgggacaacagcaagaacaccctgtacctccagatgaactccctgagagccgaggacaccgccgtgtactattgtgccagatccatcaccaccgtcgtgggctgcgctatggattattggggccagggaaccctggtcaccgtgtcctct

SEQ ID NO: 3438 - DNA, 732 bp, synthetic construct; identical to SEQ ID NO: 3437
  source 1..732: mol_type = other DNA

SEQ ID NO: 3439 - DNA, 714 bp, synthetic construct
  source 1..714: mol_type = other DNA
cagatcgtgctgacacagagccctgccatcatgtccgcttctcccggcgagaaagtgaccatgacatgtagcgccagcagcagcgtgtccttcatgcactggtatcagcagaagtccggcacaagccccaagcggtggatctacgataccagcacactggcctctggcgtgccagccagatttggcggatctggcagcggcacatcttacagcctgaccatcagcagcatggaagccgaagatgccgccacctactactgccagcagtggtccagcaatcccctgacatttggagccggcaccaagctggaactgaagagaggcggaggcggaagtggaggcggaggatctggcggcggaggctctcaagttcagctgcaacagagcggccctgagctggttaagcctggcgcttctgtgcggatctcttgcaaggccagcggctacaccttcaccagctactacatccactgggtcaagcagcggcctggacagggactcgaatggatcggctggatctaccccggcaacctgaacaccaagtacaacgagaagttcaagggcaaagccacactgaccgccgacaagagcagcagcacagcctacatgcagctgagcagcctgacaagcgaggacagcgccgtgtacttctgcgccagatacgactggtacttcgacgtgtggggagccggaaccaccgtgacagtttcttct

SEQ ID NO: 3440 - DNA, 729 bp, synthetic construct
  source 1..729: mol_type = other DNA
gacatcgtgatgacacagagccctctgagcctgcctgtgacacctggcgaacctgccagcatcagctgtagaagcagcaagagcctgctgcacagcaacggcatcacctacctgtactggtatctccagaagcctggacagagcccacagctgctgatctaccggatgagcaatagagccagcggcgtgcccgatagattttctggctctggcagcggcaccgacttcaccctgaagattagcagagtggaagccgaggacgtgggcgtgtaccattgtggacagctgctcgaaaacccctacaccttcggccagggcaccaagctggaaatcaaaggcggaggcggaagtggaggcggaggatctggcggcggaggctctcaagttcagctggttgaatccggtggcggagtggtgcaacctggcagaagtctgagactgagctgtgccgccagcggcttcagcttcagcaattatggcatggcctgggtccgacaggcccctggaaaaggacttgagtgggtcgccagcatctctaccggcggaggcaatacctactacgccgacagcgtgaaggacagattcaccatcagccgggacaacagcaagaacaccctgtacctccagatgaacagcctgagagccgaggataccgccgtgtactactgcaccagacacgatagaggcggcctgtattggggccagggaacaatggtcaccgtgtcctct

SEQ ID NO: 3441 - DNA, 729 bp, synthetic construct
  source 1..729: mol_type = other DNA
gagatcgtgctgacacagagccctggcacactgtcactgtctccaggcgaaagagccacactgagctgcaaagccagccagagcgtgtccatcagcggcatcaacctgatgaactggtatcagcagaagcccggccagcagccaagactgctgatctaccacgccagcatcctggcctctggcatccccgatagattttctggcagcggctccggcaccgacttcaccctgacaatcagcagactggaacccgaggacttcgccgtgtactactgccagcagaccagagagagccctctgacattcggccagggcacaagactggaaatcaaaggcggaggcggaagtggaggcggaggatctggcggcggaggctctgaactgcaactgcttgaatcaggtggcggcctggttcagcctggcggatctctgagactgagctgtgccgccagcggcttcaccttctctaagtacgctatggcctgggtccgacaggcccctggaaaaggacttgagtgggtcgcctctatcagcacaggcggcgtgaacacctactacgccgacagcgtgaaggacagattcaccatcagccgggacaacgccaagaacaccctgtacctccagatgaacagcctgagagccgaggacacagccgtgtattattgcgccacacacaccggcgactacttcgactattggggccagggaacaatggtcaccgtgtcctct

SEQ ID NO: 3442 - DNA, 732 bp, synthetic construct
  source 1..732: mol_type = other DNA
gacatcgtgatgacacagagccctctgagcctgcctgtgacacctggcgaacctgccagcatcagctgtagaagcagcaagagcctgctgcacagcaacggcatcacctacctgtactggtatctccagaagcctggacagagcccacagctgctgatctaccggatgagcaatagagccagcggcgtgcccgatagattttctggctctggcagcggcaccgacttcaccctgaagattagcagagtggaagccgaggacgtgggcgtgtaccattgtggacagctgctcgaaaacccctacaccttcggccagggcaccaagctggaaatcaaaggcggaggcggaagtggaggcggaggatctggcggcggaggctctgaactgcaactgcttgaatcaggtggcggcctggttcagcctggcggatctctgagactgagctgtgccgccagcggcttcaccttctctaagtacgctatggcctgggtccgacaggcccctggaaaaggacttgagtgggtcgcctctatcagcacaggcggcgtgaacacctactacgccgacagcgtgaaggacagattcaccatcagccgggacaacgccaagaacaccctgtacctccagatgaacagcctgagagccgaggacacagccgtgtattattgcgccacacacaccggcgactacttcgactattggggccagggaacaatggtcaccgtgtcctct

SEQ ID NO: 3443 - DNA, 348 bp, synthetic construct; identical to SEQ ID NO: 3317
  source 1..348: mol_type = other DNA

SEQ ID NO: 3444 - DNA, 741 bp, synthetic construct
  source 1..741: mol_type = other DNA
gagatcgtgctgacacagtctcccgccacactgtcactgtctccaggcgaaagagccacactgagctgtagagccagccagagcgtgtcctcttacctggcctggtatcagcagaagcctggacaggctccccggctgctgatctacgatgccagcaatagagccacaggcatccccgccagattttctggctctggcagcggcaccgatttcaccctgaccataagcagcctggaacctgaggacttcgccgtgtactactgccagcagagaagcaactggcctcctacattcggccagggcaccaaggtggaaatcaaaggcggaggcggaagtggaggcggaggatctggcggcggaggctctcaactccagctgcaagagtctggccccggactggtcaagcctagcgaaacactgagcctgacctgtaccgtgtctggcggcagcatcagcagcagctcttattggtggggctggaccagacagcctcctggcagaggactggaatggatcggcaccatgtactacagcggcaacatctactacaaccccagcctccagagccgggccaccatctctgtggacaccagcaagaaccagttcagcctgaagctgagcagcgtgacagccgccgataccgccgtgtattattgcgccagacatgtgggctacagctacggcagacggttctggtacttcgacctgtggggcagaggcaccctggtcacagtttcttct

SEQ ID NO: 3445 - DNA, 729 bp, synthetic construct
  source 1..729: mol_type = other DNA
gacatccagatgacacagagccctagcagcctgtctgccagcgtgggagacagagtgaccatcacctgtagagccagccaggacgtgcggaacatcgtcgtgtggttccagcagaagcctggcaaggcccctaagctgctgatctacagcggcagctacagatacagcggcgtgcccagcagattttccggctctggctctggcaccgacttcaccctgacaatatccagcctccagcctgaggacttcgccacctactactgccagcagcactacagccctccatacacattcggccagggcaccaaggtggaaatcaagagaggcggaggcggaagtggaggcggaggatctggcggcggaggctctgaagttcagctggtggaatctggccctggcctggtcaagcctagcgagacactgagcctgacctgtaccgtgtccggcttcagcctgaccagatttggcgtgcactgggtccgacagccacctggcaaaggactggaatggctgggagtgatttggagaggcggcagcaccgattacaacgccgccttcatgagccggctgaccatcagcaaggacaacagcaagaaccaggtgtccctgaagctgagcagcgtgacagccgctgataccgccgtgtactactgctccaaccactactacggcagctccgactacgccctggataattggggccagggaaccctggtcaccgtgtcatct

SEQ ID NO: 3446 - DNA, 735 bp, synthetic construct
  source 1..735: mol_type = other DNA
gacatcgtgctgacccagagccctctgagcctggccgtgtctctgggacagcctgccatcatcagctgtagggccagccagagcgtgtcctttgccggcacctctctgatgcactggtatcaccagaagcccggccagcagcccagactgctgatctacagagccagcaacctggaagccggcgtgcccgatagattttccggcagcggcagcaagaccgacttcaccctgaccatcagccccgtggaagccgaagatgccgccacctactactgccagcagagcagagagtacccctacaccttcggcggaggcaccaagctggaaatcaagaggggcggaggcggaagtggaggcggaggatctggcggcggaggctctcaggtccaactggtgcagagcggagccgaggtcgtgaagcctggcgcttccgtgaagattagctgcaaagccagcggctacacctttaccggctactttatgcactgggtcaagcagagccctggccagagcctggaatggatcggcagaatccacccctacgacggcgacaccttctacaaccagaagttccagggcaaggccaccctgacagtggacaagagcagcaacaccgcccacatggaactgctgagcctgaccagcgaggacttcgccgtgtactactgcaccagatacgacggcagccgggctatggactattggggccagggcaccaccgtgaccgtgtctagt

SEQ ID NO: 3447 - DNA, 735 bp, synthetic construct
  source 1..735: mol_type = other DNA
gacatccagatgacacagagccctagcagcctgtctgccagcgtgggagacagagtgaccatcacctgtagagccagccaggacgtgaacacagccgtggcttggtatcagcagaagcctggcaaggcccctaagctgctgatctacagcgcctacttcctgtacagcggcgtgcccagcagattcagcggaagcagaagcggcaccgacttcaccctgacaatatccagcctccagcctgaggacttcgccacctactactgccagcagtacagcagatacagccccgtgacctttggacagggcaccaaggtggaaatcaagagatctggcggaggcggctctggaggaggcggaagtggcggcggaggcgaagttcagctggttgaaagtggtggcggcctggttcaacctggcggatctctgagactgagctgtgccgccagcggcttcaatgtgtacgcctctggaatgcactgggtccgacaggcccctggcaaaggacttgagtgggtcgccaaaatctaccccgacagcgactacacctattacgccgacagcgtgaagggcagattcaccatcagcgccgacaccagcaagaacaccgcctacctccagatgaactccctgagagccgaggacaccgccgtgtactactgtagcagagacagcagcttctactacgtgtacgctatggactactggggccagggcacactggtcacagtctcttct

SEQ ID NO: 3448 - DNA, 735 bp, synthetic construct
  source 1..735: mol_type = other DNA
gacatccagatgacacagagccctagcagcctgtctgccagcgtgggagacagagtgaccatcacctgtagagccagccaggacatcaacacagccgtggcttggtatcagcagaagcctggcaaggcccctaagctgctgatctacagcgcctacttcctgtacagcggcgtgcccagcagattcagcggaagcagaagcggcaccgacttcaccctgacaatatccagcctccagcctgaggacttcgccacctactactgccagcagtacagcagatacagccccgtgacctttggacagggcaccaaggtggaaatcaagagatctggcggaggcggctctggaggaggcggaagtggcggcggaggcgaagttcagctggttgaaagtggtggcggcctggttcaacctggcggatctctgagactgagctgtgccgccagcggcttcaatgtgtacgcctctggaatgcactgggtccgacaggcccctggcaaaggacttgagtgggtcgccaaaatctaccccgacagcgactacacctattacgccgacagcgtgaagggcagattcaccatcagcgccgacaccagcaagaacaccgcctacctccagatgaactccctgagagccgaggacaccgccgtgtactactgtagcagagacagcagcttctactacgtgtacgctatggactactggggccagggcacactggtcacagtctcttct

SEQ ID NO: 3449 - DNA, 720 bp, synthetic construct
  source 1..720: mol_type = other DNA
gacatccagatgacacagagccctagcagcctgtctgccagcgtgggagacagagtgaccatcacctgtagagccagccaggatgtgtctacagccgtggcctggtatcagcagaagcctggaaaggcccctaagctgctgatctacagcgccagctttctgtactccggcgtgcccagcagattcagcggaagcagaagcggcaccgacttcaccctgacaatatccagcctccagcctgaggacttcgccacctactactgccagcagtacctgtaccagccttggacattcggccagggcaccaaggtggaaatcaagagaggcggaggcggaagtggaggcggaggatctggcggcggaggctctgaagttcagctggttgagtctggcggaggactggttcaacctggcggaagcctgagactgtcttgtgccgccagcggcttcaacatcgactactacggaatgcactgggtccgacaggcccctggcaaaggacttgaatgggtcgcctctctgtacggcggcagcgatagcacagattacgccgactctgtgaagggcagattcaccatcagcgccgacaccagcaagaacaccgcctacctccagatgaactccctgagagccgaagataccgccgtgtactactgctccagacagtacagcgcctacttcgactattggggccagggaaccctggtcaccgttagctct

SEQ ID NO: 3450 - DNA, 717 bp, synthetic construct
  source 1..717: mol_type = other DNA
gacatccagatgacacagagccctagcagcctgtctgccagcgtgggagacagagtgaccatcacatgcaaggccagcgacctgatccacaactggctggcctggtatcagcagaagcctggcaaggcccctaagctgctgatctacggcgctacctctctggaaacaggcgtgcccagcagattttctggcagcggctctggcaccgacttcaccctgacaatatccagcctccagcctgaggacttcgccacctactactgccagcagtactggaccacacctttcaccttcggccagggcaccaaggtggaaatcaaaagaggcggaggcggaagtggaggcggaggatctggcggcggaggctctgaagtgcagctggttgaatcaggtggcggcctggttcaacctggcggatctctgagactgagctgtgccgccagcggctacagcatcaccaatgactacgcctggaactgggtccgacaggcccctggaaaaggactggaatgggtcggatatatcagctactccggctacaccacctacaatcccagcatcaagagccggttcaccatcagcagagacaccagcaagaacaccctgtacctccagatgaactccctgagagccgaggacaccgccgtgtactattgtgccagatggaccagcggcctggactattggggacagggaacactggtcaccgtgtcctct

SEQ ID NO: 3451 - DNA, 726 bp, synthetic construct
  source 1..726: mol_type = other DNA
gagatcgtgctgacacagtctcccgccacactgtcactgtctccaggcgaaagagccacactgagctgtagagccagccagagcgtgtcctcttacctggcctggtatcagcagaagcctggacaggctccccggctgctgatctacgatgccagcaatagagccacaggcatccccgccagattttctggctctggcagcggcaccgatttcaccctgaccataagcagcctggaacctgaggacttcgccgtgtactactgccagcagagaagcaactggcccctgacctttggacagggcaccaaggtggaaatcaaaggcggaggcggatctggcggcggaggtagcggtggcggaggatctcaagttcagctggttcagagcggagccgaagtgaagaaacctggcagcagcgtgaaggtgtcctgcaaagcaagcggcggcacctttagcacctacgccatccactgggttcgacaggcaccaggacaaggactggaatggatgggcagaatcatccccatcgagggcagagcctactacgcccagaaattccagggcagagtgaccatcaccgccgacgagtctacaagcaccgcctacatggaactgagcagcctgagaagcgaggataccgctgtgtactattgcgccagaggccggtacagctacagatattggttcgactactggggccagggcaccctggttacagtctcttct

SEQ ID NO: 3452 - DNA, 726 bp, synthetic construct
  source 1..726: mol_type = other DNA
gagatcgtgctgacacagtctcccgccacactgtcactgtctccaggcgaaagagccacactgagctgtagagccagccagagcgtgtcctcttacctggcctggtatcagcagaagcctggacaggctccccggctgctgatctacgatgccagcaatagagccacaggcatccccgccagattttctggctctggcagcggcaccgatttcaccctgaccataagcagcctggaacctgaggacttcgccgtgtactactgccagcagagaagcgactggcccctgacatttggcggcggaacaaaggtggaaatcaaaggcggaggcggatctggcggcggaggtagcggtggcggaggatctcaagttcagctggttcagagcggagccgaagtgaagaaacctggcagcagcgtgaaggtgtcctgcaaagcaagcggcggcacctttagctcctacgccatccactgggttcgacaggcaccaggacaaggactggaatggatgggcagaatcatccccatcgagggcagagcctactacgcccagaaattccagggcagagtgaccatcaccgccgacgagtctacaagcaccgcctacatggaactgagcagcctgagaagcgaggataccgctgtgtactattgcgccagaggccggtacagctacagatattggttcgactactggggccagggcaccctggttacagtctcttct

SEQ ID NO: 3453 - DNA, 723 bp, synthetic construct
  source 1..723: mol_type = other DNA
gacatcgtgatgacccagagccctgccaccctgtccgtgtctccaggcgaaagagccaccctgagctgcagagcttcccagagcgtgtccaacgacgtcgtgtggtatcagcagaagcccggccaggcccccagactgctgatctactacgccagcaacagatacaccggcatccccgccagattcagcggctctggcagcggcaccgagttcaccctgacaatcagcagcctccagagcgaggacttcgccgtgtactactgtcagcaggactacaccagcccctggaccttcggccagggcaccaagctggaaatcaagagaggcggaggcggaagtggaggcggaggatctggcggcggaggctctgaggtgcaactggtgcagagcggagccgaagtgaagaaacctggggccagcgtgcgggtgtcctgcaaggccagcggctacacctttaccaactacggcatgaactgggtgcgccaggctcctggacagggcctggaatggatgggctggatcaacacctacaccggcgagcccacctacgccgacgacttcaagggcagagtgaccatgaccaccgacaccagcacctccaccgcctacatggaactgcggagcctgagaagcgacgacaccgccgtgtattattgcgcccggatcggcgacagcagccccagcgattattggggccagggaaccctcgtgaccgtgtcctct

SEQ ID NO: 3454 - DNA, 732 bp, synthetic construct
  source 1..732: mol_type = other DNA
gacatccagatgacacagagccctagcagcctgtctgccagcgtgggagacagagtgaccatcacctgtagagccagccagagcatcagcagctacctgaactggtatcagcagaagcccggcaaggcccctaaactgctgatctatgccgccagctctctccagagcggagtgcctagcagattttctggcagcggctccggcaccgatttcaccctgacaatatccagcctccagcctgaggacttcgccacctactactgccagcagagctacagcacccctctgacctttggacagggcaccaaggtggaaatcaagggaggcggaggaagtggcggcggaggatctggcggtggtggttctgaggtgcagctggttgaatctggcggaggactggttcagcctggcggatctctgagactgtcttgtgctgccagcggcttcaccttcagctcctacgccatgagctgggtccgacaggctcctggcaaaggactggaatgggtgtccgccatctctggctcaggcggcagcacatattacgccgactctgtgaagggcagattcaccatcagccgggacaacagcaagaacaccctgtacctccagatgaactccctgagagccgaggacaccgccgtgtactattgtgccagactgggctaccccaccaccacactgctgccctttgattattggggccagggcaccctggtcaccgtttcttct

SEQ ID NO: 3455 - DNA, 747 bp, synthetic construct
  source 1..747: mol_type = other DNA
gacatccagatgacacagagccctagcagcctgtctgccagcgtgggagacagagtgaccattacctgtcaggccagcgagaatatctacagcttcctggcctggtatcagcagaagcctggcaaggcccctaagctgctgatctacagcgcctctaaactggccgctggcgtgccaagcagattttctggctctggcagcggcaccgacttcaccctgacaatatctagcctccagcctgaggacttcgccacctactactgccagcagaccaacagatacagcaaccccgacatctacaacgtgttcggccagggcaccaagctgacagttcttggcggaggcggaggatctggtggcggaggaagcggtggcggcggttctgaagttcagctggttgaatctggcggcggactggttcaacctggcggatctctgagactgagctgtgccgcctctggcatcgacttcaacagcaactactacatgtgctgggtccgacaggccccaggcaaaggactggaatggatcggctgtatctacgtgggcagccacgtgaacacctattacgccaactgggccaagggcagattcaccatcagccgggacaacagcaagaacaccgtgtacctccagatgaactccctgagagccgaggacaccgccgtgtactactgtgccacatctggcagcagcgtgctgtacttcaagttctggggccagggaaccctggtcaccgtttcttct

SEQ ID NO: 3456 - DNA, 741 bp, synthetic construct
  source 1..741: mol_type = other DNA
caagttcagctggttcagtctggccccgaagtgaagaaacctggggcctctgtgaaggtgtcctgcaaggcttccggctacacctttaccagctaccacatccagtgggtccgacaggctcctggacaaggactggaatggatcggctggatctatcctggcgacggcagcacccagtacaacgagaagttcaagggcagagtgaccatcaccgccgacaagagcacaagcaccgcctacatggaactgagcagcctgaccagcgaggacacagccgtgtattattgcgccagagagggcacctactacgctatggattattggggccagggcaccagcgtgaccgtttcttctggcggaggcggaggatctggtggcggaggaagcggtggcggcggttctgacatcgtgatgacacagagccccgccacactgagtgtgtctccaggcgagagagccaccatcagctgtagaagcagccagagcatcgtgcacagcaacggcaacacctacctggaatggtatcagcagaagcccggacaggcccctagactgctgatctacaaggtgtccaacagattcagcggcatccccgacagattttccggctctggcagcggcaccgatttcaccctgaccatcagcagactggaacccgaggacttcgccgtgtactactgcttccaaggcagccacgtgccaagaacctttggcggaggcaccaagctggaaatcaagaga

SEQ ID NO: 3457 - DNA, 762 bp, synthetic construct
  source 1..762: mol_type = other DNA
cagtctgctctgacacagcctgcctctgtgtctggctctcctggacagagcatcaccatcagctgtaccggcaccagctctgatgtcggcggctacaattacgtgtcctggtatcagcagcaccccggcaaggcccctaagctgatgatctacgacgtgtccaacagacccagcggcgtgtccaatagattctccggcagcaagagcggcaacaccgccagcctgacaatttctggactgcaagccgaggacgaggccgactacttctgtagcagctacaccagctccagcacacccgtggtttttggcggcggaacaaagctgacagtgctcggcggaggcggaggatctggtggcggaggaagcggtggcggcggttctcaggttcagctgcaacaaagcggagccggcctgctgaagcctagcgaaacactgtctctgacctgtgccgtgtccggcggcagctttagcggctattactggacctggatcagacagaggccaggcaaaggactggaatggatcggcgagatcaaccacagaggctccaccgactacaaccccagcctgaagtccagagtgaccatgagcatcgacaccagcaagtcccagttcagcctgaatctgaagtccgtgacagccgccgataccgccgtgtactattgtgccagagccgcctggggcagctgctacgatggaacatgttaccccgccgagtatttccagtattggggccagggcaccctggtcacagtctcttct

SEQ ID NO: 3458 - DNA, 741 bp, synthetic construct
  source 1..741: mol_type = other DNA
gagatcgtgatgacacagagccccggcacactgtcactgtctccaggcgaaagagccacactgagctgtagagccagccagagcgtgtccagctcttacctggcttggtatcagcagaagcccggacaggctcccagactgctgatctacggtgcctctagcagagccacaggcatccccgatagattttctggcagcggctccggcaccgacttcaccctgacaatcagcagactggaacccgaggacttcgccgtgtactactgtcagcagtacggcagcagccctctgacatttggcggcggaacaaaggtggaaatcaaaggcggaggcggaggatctggtggcggaggaagcggtggcggcggttctcaagttcagctggttcagagcggagccgaagtgaagaaacctggggcctctgtgaaggtgtcctgcaaggccagcggctacagctttaccagctacggcatcaactgggtccgacaggcacctggacaaggactggaatggatgggctggatcagcgcctacaacggcaacaccaactacgcccagaaactccagggcagagtgaccatgaccagagacaccagcaccagaaccgcctacatggaactgcggagcctgagatccgatgacaccgccgtgtattattgcgccagagagtacgacatcctgaccggctactccgacgcctttgacatctggggccagggcacactggttaccgttagctct

SEQ ID NO: 3459 - DNA, 729 bp, synthetic construct
  source 1..729: mol_type = other DNA
gagatcgtgctgacacagtctcccgccacactgtcactgtctccaggcgaaagagccacactgagctgtagagccagccagagcgtgtcctcttacctggcctggtatcagcagaagcctggacaggctccccggctgttgatctacggtgcttctagcagagccacaggcatccccgccagattttctggctctggcagcggcaccgatttcaccctgaccataagcagcctggaacctgaggacttcgccgtgtactactgccagcagagaagcaactggcctccttacacattcggccagggcaccaagctggaaatcaaaggcggaggcggaggatctggtggcggaggaagcggtggcggcggttctcaagtgcagctggttgagtcaggcggtggccttgtgaaacctggcggtagcctgagactgtcttgtgccgccagcggcttcaccttcagcagctactctatgcactgggtccgacaggcccctggcaaaggacttgaatgggtgtccgacatcagcaccaacagcagaacccggaactacgccgacagcgtgaagggcagattcaccatctccagagacaacgccaagaacagcgtgtacctccagatgcacagcctgagagatgaggacacagccgtgtattattgcgccagagactacggcggcatctactacttcgactactggggccagggaaccctggtcacagtctcttct

SEQ ID NO: 3460 - DNA, 750 bp, synthetic construct
  source 1..750: mol_type = other DNA
gagatcgtgctgacacagtctcccgccacactgtcactgtctccaggcgaaagagccacactgagctgtagagccagccagagcgtgtcctcttacctggcctggtatcagcagaagcctggacaggctccccggctgttgatctacggtgcttctagcagagccacaggcatccccgccagattttctggctctggcagcggcaccgatttcaccctgaccataagcagcctggaacctgaggacttcgccgtgtactactgccagcagagaagcaactggcctccttacacattcggccagggcaccaagctggaaatcaaaggaggcggtggatctggcggcggaggtagtggtggtggcggatctcaggttcagctgcaacaaagcggagccggcctgctgaagcctagcgaaacactgtctctgacctgtgccgtgtccggcggcagctttagcggctattactggacctggatcagacagaggccaggcaaaggactggaatggatcggcgagatcaaccacagaggctccaccgactacaaccccagcctgaagtccagagtgaccatgagcatcgacaccagcaagtcccagttcagcctgaatctgaagtccgtgacagccgccgataccgccgtgtactattgtgccagagccgcctggggcagctgctacgatggaacatgttaccccgccgagtatttccagtattggggccagggcaccctggtcacagtctcttct

SEQ ID NO: 3461 - DNA, 738 bp, synthetic construct
  source 1..738: mol_type = other DNA
gagatcgtgatgacacagagccccggcacactgtcactgtctccaggcgaaagagccacactgagctgtagagccagccagagcgtgtccagctcttacctggcttggtatcagcagaagcccggacaggctcccagactgctgatctacggtgcctctagcagagccacaggcatccccgatagattttctggcagcggctccggcaccgacttcaccctgacaatcagcagactggaacccgaggacttcgccgtgtactactgtcagcagtacggcagcagccctctgacatttggcggcggaacaaaggtggaaatcaaaggaggcggtggatctggcggcggaggtagtggtggtggcggatctcaagttcagctggttcagagcggagccgaagtgaagaaacctggggcctctgtgaaggtgtcctgcaaggccagcggctacagctttaccagctacggcatcaactgggtccgacaggcacctggacaaggactggaatggatgggctggatcagcgcctacaacggctacaccaactacgcccagaaactccagggcagagtgaccatgaccagagacaccagcaccagaaccgcctacatggaactgcggagcctgagatccgatgacaccgccgtgtattattgcgccagagagtacgacatcctgaccggctactccgacgcctttgacatctggggccagggcacactggttaccgttagctct

SEQ ID NO: 3462 - DNA, 714 bp, synthetic construct
  source 1..714: mol_type = other DNA
gacatccagatgactcagagccccagcagcctgtctgcctctgtgggagacagagtgaccatcacctgtagagccagccagagcatcagctcctacctgaactggtatcagcagaagcccggcaaggcccctaagctgctgatctacgatgccagcacactccagagcggcgtgccaagcagattttctggcagcggctctggcaccgacttcaccctgacaatatccagcctccagcctgaggacttcgccacctactactgtcagcagagcgacggcaaccctaccacctttggacagggcaccaaggtggaaatcaagggaggcggtggatctggcggcggaggtagtggtggtggcggatctgaggttcagctgcttgagtctggcggaggactggttcaacctggcggaagcctgagactgtcttgtgccgccagcggcttcacctttagcagctacgccatgagctgggtccgacaggctcctggcaaaggactggaatgggtgtccagcatcagcaccagcggcagctatacagcctacgccgatagcgtgaagggcagattcaccatcagccgggacaacagcaagaacaccctgtacctccagatgaacagcctgagagccgaggacaccgccgtgtactattgtgccaaaggcggctacaccttcgactactggggccagggaacactggtcacagtttctagc

SEQ ID NO: 3463 - DNA, 717 bp, synthetic construct
  source 1..717: mol_type = other DNA
gacatccagatgacacagagccctagcagcctgtctgccagcgtgggagacagagtgaccatcacctgtctggcctccgaggacatctacgacaacctggcctggtatcagcagaagcctggcaaggcccctaagctgctgatctactacgccagctctctccaggatggcgtgcccagcagattttctggcagcggctctggcaccgactacaccctgacaatatccagcctccagcctgaggacttcgccacctactactgcctgcaagacagcgagtacccctggacatttggaggcggtggatctggcggcggaggtagtggtggtggcggatctgaagtgacactgaaagagtctggccccgctctggtcaagcccacacaaaccctgacactgacctgcaccttcagcggctttagcctgaccacatacggcatgggcgtcggctggattagacagcctcctggaaaagccctggaatggctggctaacatttggtgggacgacgacaagtattacaaccccagcctgaagaaccggctgaccatcagcaaggacaccagcaagaaccaggtggtgctgaccatgaccaacatggaccctgtggacaccgccacatattactgcgccagaatcggccccatcaagtaccccaccgctccttacagatacttcgacttctggggccagggcacaatggtcaccgttagctct

SEQ ID NO: 3464 - DNA, 717 bp, synthetic construct
  source 1..717: mol_type = other DNA
gacatccagatgacacagagccctagcagcctgtctgccagcgtgggagacagagtgaccatcacctgtctggcctccgaggacatctacaacaacctggcctggtatcagcagaagcctggcaaggcccctaagctgctgatctactacgccagctctctccaggatggcgtgcccagcagattttctggcagcggctctggcaccgactacaccctgacaatatccagcctccagcctgaggacttcgccacctactactgcctgcaagacagcgagtacccctggacatttggaggcggtggatctggcggcggaggtagtggtggtggcggatctgaagtgacactgaaagagtctggccccgctctggtcaagcccacacaaaccctgacactgacctgcaccttcagcggctttagcctgagcacatacggcatgggcgtcggctggattagacagcctcctggaaaagccctggaatggctggctaacatttggtgggacgacgacaagtattacaaccccagcctgaagaaccggctgaccatcagcaaggacaccagcaagaaccaggtggtgctgaccatgaccaacatggaccctgtggacaccgccacatattactgcgccagaatcggccccatcaagtaccccaccgctccttacagatacttcgacttctggggccagggcacaatggtcaccgttagctct

SEQ ID NO: 3465 - DNA, 729 bp, synthetic construct
  source 1..729: mol_type = other DNA
gatattgtgatgacacagagccccgacagcctggccgtgtctcttggagaaagagccaccatcaactgcaagagcagccagagcctgctgtactccagcaacagcaagaactacctggcctggtatcagcagaagcccggccagcctcctaagctgctgatctactgggccagcaccagagaaagcggcgtgcccgatagattttctggctctggcagcggcaccgacttcaccctgacaatttctagcctgcaagccgaggacgtggccgtgtattactgccagcagccttacagctaccctctgagctttggagccggcaccaagctggaactgaaaggcggaggcggaagtggaggcggaggatctggcggcggaggctctcaggttcagctggttcagtctggggccgaagtgaagaaacctggggcctctgtgaaggtgtcctgcaaggcttccggctacacctttaccgaccacgccatccactgggtccgacaggctccaggacaacggcttgagtggatgggctacttcagccccggcaacgacgacttcaagtacagccagaaattccagggcagagtgaccatcaccgccgatacaagcgccagcaccgcctacatggaactgagcagtctgagaagcgaggataccgccgtgtacttctgcacacggtccctgaacatggcctattggggccagggaaccctggtcacagtgtctagc

SEQ ID NO: 3466 - DNA, 732 bp, synthetic construct
  source 1..732: mol_type = other DNA
gacatcgtgatgtctcagagccctgatagcctggccgtgtctctgggagagagagtgaccctgaactgcaagagcagccagagcctgctgtactccggcaaccagaagaactacctggcctggtatcagcagaagcccggacagtctcccaagctgctgatctactgggccagcgccagagaaagcggcgtgccagatagattttctggctctggcagcggcaccgacttcaccctgacaatcagttctgtgcaggccgaggacgtggccgtgtactactgtcagcagtactacagctaccctctgaccttcggagccggcaccaagctggaactgaaaagaggcggaggcggaagtggaggcggaggatctggcggcggaggctctcaggtgcagctggttcagagcggagccgaggttgtgaaacctggcgcttccgtgaagatcagctgcaaggccagcggctacaccttcaccgatcacgccatccactgggtcaagcagaatcccggccagagactggaatggatcggctacttcagccccggcaacgacgacttcaagtacaacgagcggttcaagggcaaagccacactgaccgctgataccagcgccagcacagcctacgtggaactgtctagcctgagaagcgaggataccgccgtgtacttctgcacacggtccctgaacatggcctattggggccagggaaccctggtcacagtcagctct

SEQ ID NO: 3467 - DNA, 732 bp, synthetic construct
  source 1..732: mol_type = other DNA
gacatccagttgacccagtcccccagctcactcagcgccagtgtgggggaccgggtgaccattacctgtaaagccagtcagagtgtggactatgacggggatagcttcctgaattggtatcagcagaagcctggcaaagccccaaagctgctgatctacgctgcatctaatctggagtcaggcgtgccttccaggttctccggtagtgggtctgggaccgatttcacattgaccatttcatccctccaacccgaggatttcgctacatattactgtcagcagtccaatgaggaccctctcacctttggccagggcaccaaagttgaaattaagagaggcggaggcggaagtggaggcggaggatctggcggcggaggctctgaagtccaacttgtggagtctggagggggcctggtgcagcccggcggctctctcagactgtcttgtgcggcaagcggctacaccttcagctcttactggatagaatgggtgaggcaggcacctggaaagggactggagtggattggagagattctgccaggagggggagatacaaattacaatgaaatcttcaaggggcgggccaccttttcagcggataccagcaagaatacagcttacctgcagatgaatagcctccgggcagaagataccgctgtttattattgcacgagacgggtgccaataagactggactattgggggcaagggactcttgtcaccgtcagttca

SEQ ID NO: 3468 - DNA, 732 bp, synthetic construct
  source 1..732: mol_type = other DNA
gacatccagttgacccagtcccccagctcactcagcgccagtgtgggggaccgggtgaccattacctgtaaagccagtcagagtgtggactatgacggggatagcttcctgaattggtatcagcagaagcctggcaaagccccaaagctgctgatctacgctgcatctaatctggagtcaggcgtgccttccaggttctccggtagtgggtctgggaccgatttcacattgaccatttcatccctccaacccgaggatttcgctacatattactgtcagcagtccaatgaggaccctctcacctttggccagggcaccaaagttgaaattaagagaggcggaggcggaagtggaggcggaggatctggcggcggaggctctgaagtccaacttgtggagtctggagggggcctggtgcagcccggcggctctctcagactgtcttgtgcggcaagcggctacaccttcacctcttactggatagaatgggtgaggcaggcacctggaaagggactggagtggattggagagattctgccaggagggggagatacaaattacaatgaaatcttcaaggggcgggccaccttttcagcggataccagcaagaatacagcttacctgcagatgaatagcctccgggcagaagataccgctgtttattattgcacgagacgggtgccaataagactggactattgggggcaagggactcttgtcaccgtcagttca

SEQ ID NO: 3469 - DNA, 732 bp, synthetic construct
  source 1..732: mol_type = other DNA
gacatccagttgacccagtcccccagctcactcagcgccagtgtgggggaccgggtgaccattacctgtaaagccagtcagagtgtggactatgagggggatagcttcctgaattggtatcagcagaagcctggcaaagccccaaagctgctgatctacgctgcatctaatctggagtcaggcgtgccttctaggttctccggtagtgggtctgggaccgatttcacattgaccatttcatccctccaacccgaggatttcgctacatattactgtcagcagtccaatgaggaccctctcacctttggccagggcaccaaagttgaaattaagagaggcggaggcggaagtggaggcggaggatctggcggcggaggctctgaagtccaacttgtggagtctggagggggcctggtgcagcccggcggctctctcagactgtcttgtgcggcaagcggctacaccttcacctcttactggatagaatgggtgaggcaggcacctggaaagggactggagtggattggagagattctgccaggagggggagatacaaattacaatgaaatcttcaaggggcgggccaccttttcagcggataccagcaagaatacagcttacctgcagatgaatagcctccgggcagaagataccgctgtttattattgcacgagacgggtgccaataagactggactattgggggcaagggactcttgtcaccgtcagttca

SEQ ID NO: 3470 - DNA, 732 bp, synthetic construct
  source 1..732: mol_type = other DNA
gacatccagttgacccagtcccccagctcactcagcgccagtgtgggggaccgggtgaccattacctgtaaagccagtcagagtgtggactatgagggggatagcttcctgaattggtatcagcagaagcctggcaaagccccaaagctgctgatctacgctgcatctaatctggagtcaggcgtgccttctaggttctccggtagtgggtctgggaccgatttcacattgaccatttcatccctccaacccgaggatttcgctacatattactgtcagcagtccaatgaggaccctctcacctttggccagggcaccaaagttgaaattaagagaggcggaggcggaagtggaggcggaggatctggcggcggaggctctcaggttcagctgcaacagcctggcgctgagcttgtgaaacctggcgcttccgtgaagatgagctgcaaggccagcggctacaccttcaccagctactggatcaactggatgaagcagaaaccaggccagggcctcgaatggatcggacagattcttcctggcggcggagacaccaactacaacggcaagttcaagggcagagccacactgaccgccgatacctctagcagcacagcctacatgcagctgagcagcctgaccagcgaagatagcgccgtgtacttctgcaccagacgggtgcccatcagactggattattggggccagggaaccagcgtgaccgtgtcatct

SEQ ID NO: 3471 - DNA, 729 bp, synthetic construct
  source 1..729: mol_type = other DNA
gacatcgtgatgacacagagccctgatagcctggccgtgtctctgggagagagagccaccattaactgcaaggccagccagagcgtggactacgagggcgacagcttcctgaactggtatcagcagaagcccggccagcctcctaagctgctgatctacgccgccagcaatctggaaagcggcgtgccaagcagattttccggctctggcagcggcaccgatttcaccctgacaatatccagcctccagcctgaggacgtggccgtgtactactgccagcagagcaatgaggaccctctgacctttggccagggcaccaaggtggaaatcaagggcggaggcggaagtggaggcggaggatctggcggcggaggctctgaagtccaacttgtggagtctggagggggcctggtgcagcccggcggctctctcagactgtcttgtgcggcaagcggctacaccttcacctcttactggatagaatgggtgaggcaggcacctggaaagggactggagtggattggagagattctgccaggagggggagatacaaattacaatgaaatcttcaaggggcgggccaccttttcagcggataccagcaagaatacagcttacctgcagatgaatagcctccgggcagaagataccgctgtttattattgcacgagacgggtgccaataagactggactattgggggcaagggactcttgtcaccgtcagttca

SEQ ID NO: 3472 - DNA, 729 bp, synthetic construct
  source 1..729: mol_type = other DNA
gacatcgtgatgacacagagccctgatagcctggccgtgtctctgggagagagagccaccattaactgcaaggccagccagagcgtggactacgagggcgacagcttcctgaactggtatcagcagaagcccggccagcctcctaagctgctgatctatgccgccagaaagctcggcagaggcgtgccaagcagattttctggcagcggctctggcaccgacttcaccctgacaatatccagcctccagcctgaggacgtggccgtgtactactgccagcagagcaatgaggaccctctgacattcggccagggcaccaaggtggaaatcaagggcggaggcggaagtggaggcggaggatctggcggcggaggctctgaagtccaacttgtggagtctggagggggcctggtgcagcccggcggctctctcagactgtcttgtgcggcaagcggctacaccttcacctcttactggatagaatgggtgaggcaggcacctggaaagggactggagtggattggagagattctgccaggagggggagatacaaattacaatgaaatcttcaaggggcgggccaccttttcagcggataccagcaagaatacagcttacctgcagatgaatagcctccgggcagaagataccgctgtttattattgcacgagacgggtgccaataagactggactattgggggcaagggactcttgtcaccgtcagttca

SEQ ID NO: 3473 - DNA, 741 bp, synthetic construct
  source 1..741: mol_type = other DNA
gacatcgtgatgacacagagccctgatagcctggccgtgtctctgggagagagagccaccattaactgcaaggccagccagagcgtggactacgacggcgacagcttcctgaactggtatcagcagaagcccggccagcctcctaagctgctgatctacgccgccagcaatctggaaagcggcgtgccaagcagattttccggctctggcagcggcaccgatttcaccctgacaatatccagcctccagcctgaggacgtggccgtgtactactgccagcagagcaacgacgaccctctgacctttggacagggcaccaaggtggaaatcaaactcgagggcggaggcggaagtggaggcggaggatctggcggcggaggctctttcgaacaagttcagctggttcagagcggagccgaagtgaagaaacctggggcctctgtgaaggtgtcctgcaaagccagcggctacacctttaccagctactggatcaactgggtccgacaggcccctggacaaggactggaatggatgggacagatccttccaggcggaggggacaccaactacaacggcaagttcaagggcagagtgaccatcaccgccgacaccagcacaagcaccgcctacatggaactgagcagcctgagaagcgaggacaccgccgtgtattattgcaccagacgggtgcccatccggctggattattggggacagggaaccctggtcaccgtgtctagt

SEQ ID NO: 3474 - DNA, 720 bp, synthetic construct
  source 1..720: mol_type = other DNA
gacatccagatgacacagagccctagcagcctgtctgccagcgtgggagacagagtgaccatcacatgcaagagcagccagagcctgctggactccgatggcaagacctacctgaactggtatcagcagaagcccggcaaggcccctaagctgctgatctacctggtgtccaagctggatagcggcgtgcccagcagattttctggcagcggcagcggaaccgacttcaccctgacaatatccagcctccagcctgaggacttcgccacctactactgcttccaaggcacccactttccattcaccttcggccagggcaccaaggtggaaatcaaaagaggcggcggaggaagcggaggcggatctggtggcggaggatctgaagtgcagctggttgaatcaggcggaggactggttcagcctggcggatctctgagactgtcttgtgccgccagcggctacaccttcaccagctactggatgaactgggtccgacaggcccctggcaaaggactggaatgggtcggaatgatcgaccccagcgacagcgagacacactacaaccacatcttcaaggaccgcttcaccatcagcgccgacaccagcaagaataccgcctacctccagatgaactccctgagagccgaggacaccgccgtgtactactgcgccagaaacctgtatctgttcggccagggaaccctggtcacagtgtcatct

SEQ ID NO: 3475 - DNA, 744 bp, synthetic construct
  source 1..744: mol_type = other DNA
gacatccagatgacacagagccctagcagcctgtctgccagcgtgggagacagagtgaccatcacatgcaagagcagccagagcctgctggactccgatggcaagacctacctgaactggtatcagcagaagcccggcaaggcccctaagctgctgatctacctggtgtccaagctggatagcggcgtgcccagcagattttctggcagcggcagcggaaccgacttcaccctgacaatatccagcctccagcctgaggacttcgccacctactactgcttccaaggcacccactttccattcaccttcggccagggcaccaaggtggaaatcaaaagaggcggcggaggaagcggaggcggatctggtggcggaggatctgaagtgcagctggttgaatcaggcggaggactggttcagcctggcggatctctgagactgtcttgtgccgccagcggctacaccttcagcagctactggatgaactgggtccgacaggcccctggcaaaggactggaatgggtcggaatgatcgaccccagcgacagcgagacacactacaaccacatcttcaaggaccgcttcaccatcagcgccgacaccagcaagaataccgcctacctccagatgaactccctgagagccgaggacaccgccgtgtactactgcgccagaaacctgtatctgtggggccagggaaccctggtcacagtgtcatctacgcgtcctcgactgtgccttcta

SEQ ID NO: 3476 - DNA, 720 bp, synthetic construct
  source 1..720: mol_type = other DNA
gacatccagatgacacagagccctagcagcctgtctgccagcgtgggagacagagtgaccatcacatgcaagagcagccagagcctgctggactccgatggcaagacctacctgaactggtatcagcagaagcccggcaaggcccctaagctgctgatctacctggtgtccaagctggatagcggcgtgcccagcagattttctggcagcggcagcggaaccgacttcaccctgacaatatccagcctccagcctgaggacttcgccacctactactgctggcaaggcacccactttccattcaccttcggccagggcaccaaggtggaaatcaaaagaggcggcggaggaagcggaggcggatctggtggcggaggatctgaagtgcagctggttgaatcaggcggaggactggttcagcctggcggatctctgagactgtcttgtgccgccagcggctacaccttcaccagctactggatgaactgggtccgacaggcccctggcaaaggactggaatgggtcggaatgatcgaccccagcgacagcgagacacactacaaccacatcttcaaggaccgcttcaccatcagcgccgacaccagcaagaataccgcctacctccagatgaactccctgagagccgaggacaccgccgtgtactactgcgccagaaacctgtatctgttcggccagggaaccctggtcacagtgtcatct

SEQ ID NO: 3477 - DNA, 720 bp, synthetic construct
  source 1..720: mol_type = other DNA
gacatccagatgacacagagccctagcagcctgtctgccagcgtgggagacagagtgaccatcacatgcaagagcagccagagcctgctggactccgatggcaagacctacctgaactggtatcagcagaagcccggcaaggcccctaagctgctgatctacctggtgtccaagctggatagcggcgtgcccagcagattttctggcagcggcagcggaaccgacttcaccctgacaatatccagcctccagcctgaggacttcgccacctactactgctggcaaggcacccactttccattcaccttcggccagggcaccaaggtggaaatcaaaagaggcggcggaggaagcggaggcggatctggtggcggaggatctgaagtgcagctggttgaatcaggcggaggactggttcagcctggcggatctctgagactgtcttgtgccgccagcggctacaccttcagcagctactggatgaactgggtccgacaggcccctggcaaaggactggaatgggtcggaatgatcgaccccagcgacagcgagacacactacaaccacatcttcaaggaccgcttcaccatcagcgccgacaccagcaagaataccgcctacctccagatgaactccctgagagccgaggacaccgccgtgtactactgcgccagaaacctgtatctgtggggccagggaaccctggtcacagtgtcatct

SEQ ID NO: 3478 - DNA, 720 bp, synthetic construct
  source 1..720: mol_type = other DNA
gacatccagatgacacagagccctagcagcctgtctgccagcgtgggagacagagtgaccatcacatgcaagagcagccagagcctgctggactccgatggcaagacctacctgaactggtatcagcagaagcccggcaaggcccctaagctgctgatctacctggtgtccaagctggatagcggcgtgcccagcagattttctggcagcggcagcggaaccgacttcaccctgacaatatccagcctccagcctgaggacttcgccacctactactgcttccaaggcacccactttccatacaccttcggccagggcaccaaggtggaaatcaaaagaggcggcggaggaagcggaggcggatctggtggcggaggatctgaagtgcagctggttgaatcaggcggaggactggttcagcctggcggatctctgagactgtcttgtgccgccagcggctacaccttcaccagctactggatgaactgggtccgacaggcccctggcaaaggactggaatgggtcggaatgatcgaccccagcgacagcgagacacactacaaccacatcttcaaggaccgcttcaccatcagcgccgacaccagcaagaataccgcctacctccagatgaactccctgagagccgaggacaccgccgtgtactactgcgccagaaacctgtatctgttcggccagggaaccctggtcacagtgtcatct

SEQ ID NO: 3479 - DNA, 744 bp, synthetic construct
  source 1..744: mol_type = other DNA
gacatccagatgacacagagccctagcagcctgtctgccagcgtgggagacagagtgaccatcacatgcaagagcagccagagcctgctggactccgatggcaagacctacctgaactggtatcagcagaagcccggcaaggcccctaagctgctgatctacctggtgtccaagctggatagcggcgtgcccagcagattttctggcagcggcagcggaaccgacttcaccctgacaatatccagcctccagcctgaggacttcgccacctactactgcttccaaggcacccactttccatacaccttcggccagggcaccaaggtggaaatcaaaagaggcggcggaggaagcggaggcggatctggtggcggaggatctgaagtgcagctggttgaatcaggcggaggactggttcagcctggcggatctctgagactgtcttgtgccgccagcggctacaccttcaccaactactggatgaactgggtccgacaggcccctggcaaaggactggaatgggtcggaatgatcgaccccagcgacagcgagacacactacaaccacatcttcaaggaccgcttcaccatcagcgccgacaccagcaagaataccgcctacctccagatgaactccctgagagccgaggacaccgccgtgtactactgcgccagaaacctgtatctgtggggccagggaaccctggtcacagtgtcatctacgcgtcctcgactgtgccttcta

SEQ ID NO: 3480 - DNA, 720 bp, synthetic construct
  source 1..720: mol_type = other DNA
gacatccagatgacacagagccctagcagcctgtctgccagcgtgggagacagagtgaccatcacatgcaagagcagccagagcctgctggactccgatggcaagacctacctgaactggtatcagcagaagcccggcaaggcccctaagctgctgatctacctggtgtccaagctggatagcggcgtgcccagcagattttctggcagcggcagcggaaccgacttcaccctgacaatatccagcctccagcctgaggacttcgccacctactactgcttccaaggcacccactttccattcaccttcggccagggcaccaaggtggaaatcaaaagaggcggcggaggaagcggaggcggatctggtggcggaggatctgaagtgcagctggttgaatcaggcggaggactggttcagcctggcggatctctgagactgtcttgtgccgccagcggctacaccttcaccaactactggatgaactgggtccgacaggcccctggcaaaggactggaatgggtcggaatgatcgaccccagcgacagcgagacacactacaaccacatcttcaaggaccgcttcaccatcagcgccgacaccagcaagaataccgcctacctccagatgaactccctgagagccgaggacaccgccgtgtactactgcgccagaaacctgtatctgtggggccagggaaccctggtcacagtgtcatct

SEQ ID NO: 3481 - DNA, 750 bp, synthetic construct
  source 1..750: mol_type = other DNA
gacatcgtgctgacacagagccctgcttctctggccgtgtctctgggacagagagccaccatcagctgcaaggcttctcagagcgtggactacgacggcgacagcttcctgaactggtatcagaagccaggccagcctcctaagctgttcatctacgccgccagcaacctggaaagcggcatccctgccagattttctggcagcggctctggcaccgacttcaccctgaatatccatcctgtggaagaagaggacgccgccacctactactgccagcagtctaatgaggaccctctgacctttggagccggcaccgagctggaactgaaaagaggcggcggaggaagcggaggcggatctggtggcggaggatctgaagttcagcttcagcagagcggagccgagctgatgaagcctggcgcttctgtgaagatttcctgcaaggccaccggctacaccttcagcagctactggatcgagtgggtcaagcagaggcccggacatggcctggaatggatcggagaaattctgcctggcggcggagacaccaactacaacgagattttcaagggcaaagccaccttcaccgccgacaccagcagcaacacagcctacatgcagctgagcagcctgaccagcgaagatagcgccgtgtactactgcaccagacgggtgcccgtgtacttcgattattggggccagggcaccagcgtgaccgtttcttctacgcgtcctcgactgtgccttcta

SEQ ID NO: 3482 - DNA, 720 bp, synthetic construct
  source 1..720: mol_type = other DNA
gacatcgtgatgacccagacccccctgaccctgagcgtgacaatcggacagcctgccagcatctcctgcaagagcagccagagcctgctggacagcgacggcaagacctacctgaactggctgctgcagaggccaggccagagccccgagagactgatctacctggtgtccaagctggactccggcgtgcccgatagattcacaggcagcggctccggcaccgacttcaccctgaagatcagccgggtggaagccgaggacctgggcgtgtactactgttggcagggcacccacttcccttacaccttcggcggagggaccaaggtggaaatcaagggcggaggcggaagtggaggcggaggatctggcggcggaggctctcaggtgcaactgcagcagcctggcgctgaacttgtgcggccaggcgcctctgtgaagctgagctgtaaagccagcggctacaccttcaccagctactggatgaactgggtcaagcagcgcccaggccagggcctggaatggatcggaatgatcgaccccagcgacagcgagacacactacaaccacatcttcaaggacaaggccaccctgaccgtggacaagtccagcagcacagcctacctgcaactgtccagcctgaccagcgaggacagcgccgtgtactactgcgcccggaacctgtatctgtggggccagggaacaagcgtgaccgtgtctagc

SEQ ID NO: 3483 - DNA, 756 bp, synthetic construct
  source 1..756: mol_type = other DNA
gacatccagttgacccagtcccccagctcactcagcgccagtgtgggggaccgggtgaccattacctgtaaagccagtcagagtgtggactatgagggggatagcttcctgaattggtatcagcagaagcctggcaaagccccaaagctgctgatctacgctgcatctaatctggagtcaggcgtgccttctaggttctccggtagtgggtctgggaccgatttcacattgaccatttcatccctccaacccgaggatttcgctacatattactgtcagcagtccaatgaggaccctctcacctttggccagggcaccaaagttgaaattaagagaggcggaggcggaagtggaggcggaggatctggcggcggaggctctgaagtccaacttgtggagtctggagggggcctggtgcagcccggcggctctctcagactgtcttgtgcggcaagcggctacaccttcagctcttactggatagaatgggtgaggcaggcacctggaaagggactggagtggattggagagattctgccaggagggggagatacaaattacaatgaaatcttcaaggggcgggccaccttttcagcggataccagcaagaatacagcttacctgcagatgaatagcctccgggcagaagataccgctgtttattattgcacgagacgggtgccaataagactggactattgggggcaagggactcttgtcaccgtcagttcaacgcgtcctcgactgtgccttcta

SEQ ID NO: 3484 - DNA, 729 bp, synthetic construct
  source 1..729: mol_type = other DNA
gacatcgtgatgacacagagccctgatagcctggccgtgtctctgggagagagagccaccattaactgcaaggccagccagagcgtggactacgacggcgacagcttcctgaactggtatcagcagaagcccggccagcctcctaagctgctgatctacgccgccagcaatctggaaagcggcgtgccaagcagattttccggctctggcagcggcaccgatttcaccctgacaatatccagcctccagcctgaggacgtggccgtgtactactgccagcagagcaacgacgaccctctgacctttggacagggcaccaaggtggaaatcaaaggcggaggcggaagtggaggcggaggatctggcggcggaggctctgaagtccaacttgtggagtctggagggggcctggtgcagcccggcggctctctcagactgtcttgtgcggcaagcggctacaccttcacctcttactggatagaatgggtgaggcaggcacctggaaagggactggagtggattggagagattctgccaggagggggagatacaaattacaatgaaatcttcaaggggcgggccaccttttcagcggataccagcaagaatacagcttacctgcagatgaatagcctccgggcagaagataccgctgtttattattgcacgagacgggtgccaataagactggactattgggggcaagggactcttgtcaccgtcagttca

SEQ ID NO: 3485 - DNA, 729 bp, synthetic construct
  source 1..729: mol_type = other DNA
gacatcgtgatgacacagagccctgatagcctggccgtgtctctgggagagagagccaccattaactgcaaggccagccagagcgtggactacgacggcgagagcttcctgaactggtatcagcagaagcccggccagcctcctaagctgctgatctacgccgccagcaatctggaaagcggcgtgccaagcagattttccggctctggcagcggcaccgatttcaccctgacaatatccagcctccagcctgaggacgtggccgtgtactactgccagcagagcaacgacgaccctctgacctttggacagggcaccaaggtggaaatcaaaggcggaggcggaagtggaggcggaggatctggcggcggaggctctgaagtccaacttgtggagtctggagggggcctggtgcagcccggcggctctctcagactgtcttgtgcggcaagcggctacaccttcacctcttactggatagaatgggtgaggcaggcacctggaaagggactggagtggattggagagattctgccaggagggggagatacaaattacaatgaaatcttcaaggggcgggccaccttttcagcggataccagcaagaatacagcttacctgcagatgaatagcctccgggcagaagataccgctgtttattattgcacgagacgggtgccaataagactggactattgggggcaagggactcttgtcaccgtcagttca

SEQ ID NO: 3486 - DNA, 729 bp, synthetic construct
  source 1..729: mol_type = other DNA
gacatcgtgatgacacagagccctgatagcctggccgtgtctctgggagagagagccaccattaactgcaaggccagccagagcgtggactacgagggcgacagcttcctgaactggtatcagcagaagcccggccagcctcctaagctgctgatctacgccgccagcaatctggaaagcggcgtgccaagcagattttccggctctggcagcggcaccgatttcaccctgacaatatccagcctccagcctgaggacgtggccgtgtactactgccagcagagcaatgaggaccctctgacctttggccagggcaccaaggtggaaatcaagggcggaggcggaagtggaggcggaggatctggcggcggaggctctgaagtccaacttgtggagtctggagggggcctggtgcagcccggcggctctctcagactgtcttgtgcggcaagcggctacaccttcagctcttactggatagaatgggtgaggcaggcacctggaaagggactggagtggattggagagattctgccaggagggggagatacaaattacaatgaaatcttcaaggggcgggccaccttttcagcggataccagcaagaatacagcttacctgcagatgaatagcctccgggcagaagataccgctgtttattattgcacgagacgggtgccaataagactggactattgggggcaagggactcttgtcaccgtcagttca

SEQ ID NO: 3487 - DNA, 732 bp, synthetic construct
  source 1..732: mol_type = other DNA
gacttcgtgatgacccagacacctctgagcctgcctgtgacacctggcgaacctgccagcatcagctgtagaagcagccagagcatcgtgcaccacgacggcaacacctacctggaatggtatctccagaagcctggacagagccccaagctgctgatctacaaggtgtccaacagattcagcggcgtgcccgacagattttctggcagcggctctggcaccgacttcaccctgaagattagcagagtggaagccgaggacgtgggcgtgtactactgcttccaaggcagccatgttccttggacctttggcggaggcaccaaggtggaaatcaagagaggcggcggaggaagcggaggcggatctggtggcggaggatctgaagtgcagctggtgcagtctggggccgaagtgaagaaacctggcagcagcgtgaaggtgtcctgcaaagcctctggcggcagctttagcagctacggcatcaactgggtcaagcaggcccctggacaaggactggaatggatcggcgagattttccccagaagcggcaatacctactacaacgagaagttcgagggcagagccacactgaccgccgataagagcacaagcaccgcctacatggaactgcggagcctgagaagcgaggacaccgccgtgtactattgcgccaaaggcgacctgggcgacttcgattattggggccagggcaccaccgtgaccgtttcttct

SEQ ID NO: 3488 - DNA, 741 bp, synthetic construct
  source 1..741: mol_type = other DNA
gacgtcgtgatgacacagacacctctgagcctgcctgtgacacctggcgaacctgccagcatcagctgtagaagcagccagagcatcgtgcacagcgacggcaacacctacttcgagtggtatctccagaagcctggacagagccctcagctgctgatctacaaggtgtccaacagattcagcggcgtgcccgacagattttctggcagcggctctggcaccgacttcaccctgaagattagcagagtggaagccgaggacgtgggcgtgtactactgcttccaaggcagccatgttccttggacctttggcggaggcaccaaggtggaaatcaagagaggcggaggcggaagtggaggcggaggatctggcggcggaggctctgaagttcagctggttcagagcggagccgaagtgaagaaacctggggcctctgtgaaggtgtcctgcaaggccagcggctacacctttaccagctacggcatcaactgggttaagcaggctccaggccagggcctcgaatggatcggcgaaatctatcccagaagcgggaacatctactacaacgagaagttcaagggcaaagccacactgaccgccgacaagagcacaagcaccgcctacatggaactgcggagcctgagatccgatgacaccgccgtgtactattgcgccagaggctccgactacgacggcgattttgcctattggggccagggcacactggtcaccgttagctct

SEQ ID NO: 3489 - DNA, 714 bp, synthetic construct
  source 1..714: mol_type = other DNA
gaagttcagctgcaagagtctggccctggcctggtcaagcctagccaaagcctgagcctgacctgtaccgtgaccggctacagcatcaccagcgactacgcctggaactggatcagacagttccccggcaacaaactggaatggatgggcaacatctggtacagcggctccaccacctacaatcccagcctgaagtcccggatctccatcaccagagataccagcaagaaccagttcttcctgcaactgaacagcgtgaccagcgaggacaccgccacctactattgcagccggatggatttttggggccagggcaccacactgaccgtgtcatctggcggcggaggaagcggaggcggatctggtggcggaggatctgacatcgtgctgacacagagccctccatctctggccgtgtctctgggacagagagccaccatcagctgtagagccagcgagagcgtggacagctacggcaagaccttcatgcactggcaccagcagaagccaggccagcctcctaagctgctgatctaccgggtgtccaacctggaaagcggcatccctgccagattttctggcagcggcagcagaaccgacttcaccctgaccatcaatcccgtggaagccgacgacgtggcaacctactactgccagcagagcaacgaggaccccttcacatttggcggaggcaccaagctggaaatcaagaga

SEQ ID NO: 3490 - DNA, 732 bp, synthetic construct
  source 1..732: mol_type = other DNA
agctacgtgctgacacagcctccatccgtgtctgtggctccaggacagaccgccagaatcacatgcggcggcaacaacatcggcagccagagcgtgcactggtatcagcagaagcctggacaggctccagtgctggtggtgtacgacgacagcgatagacctagcggcatccccgagagattcagcggcagcaattccggcaataccgccacactgaccatcagcagagtggaagctggcgacgaggccgactactactgccaagtgtgggacagcagcagcgatcacgtggtgtttggcggcggaacaaagctgacagtgcttggcggaggcggatctggcggcggaggtagcggtggcggaggatctcaactccagctgcaagagtctggccctggcctggtcaagcctagcgaaacactgagcctgacctgtaccgtgtctggcggctctatcagctccaacagctatttctggggctggatcagacaacctcctggcaaaggactggaatggatcggctccatctactacagcggcagcacctactacaaccccaccctgaagtccagagtgaccatctccgtggacaccagcaagaaccagttctccctgaagctgagcagcgtgacagccgccgataccgccgtgtattattgtgccagacatgacggcgctgtggccggcctgtttgattattggggacagggcaccctggtcaccgtgtcatct

SEQ ID NO: 3491 - DNA, 732 bp, synthetic construct
  source 1..732: mol_type = other DNA
agctacgtgctgacacagcctccatccgtgtctgtggctccaggacagaccgccagaatcacatgcggcggcaacaacatcggcagcaagggcgtgcactggtatcagcagaagcctggacaggctccagtgctggtggtgtacgacgacagcgatagacctagcggcatccccgagagattcagcggcagcaattccggcaataccgccacactgaccatcagcagagtggaagctggcgacgaggccgactactactgccaagtgtgggacagcagcagcgatcacgtggtgtttggcggcggaacaaagctgacagtgcttggcggaggcggatctggcggcggaggtagcggtggcggaggatctcaactccagctgcaagagtctggccctggcctggtcaagcctagcgaaacactgagcctgacctgtaccgtgtctggcggctctatcagctccaacagctattattggggctggatcagacaacctcctggcaaaggactggaatggatcggctccatctactacagcggcagcacctactacaaccccaccctgaagtccagagtgaccatctccgtggacaccagcaagaaccagttctccctgaagctgagcagcgtgacagccgccgataccgccgtgtattattgtgccagacatgacggcgctgtggccggcctgtttgattattggggacagggcaccctggtcaccgtgtcatct

SEQ ID NO: 3492 - DNA, 729 bp, synthetic construct
  source 1..729: mol_type = other DNA
gaagttcagctgcttgagacaggcggaggactggttcaacctggcggaagcagaggactgagctgtgaaggcagcggctttaccttcagcggcttctggatgagctgggtccgacagacacctggcaagaccctggaatggatcggcgacatcaatagcgacggcagcagcatcaactacgcccctagcatcaaggacaggttcaccatcttccgggacaacgacaagagcatcctgtacctccagatgaccaacgtgcggagcgaggacaccggcacctacttttgtgtgaccacctacggcgactactggggccagggaacaaccctgacagtgtctagtgcttctggcggaggcggaagtggaggcggaggatctggcggcggaggctctgatattgtgatgacccagagccagaaattcatgagcaccagcgtgggcgacagagtgtccgtgacatgtaaagccagccagaacgtgggctctcacgtcggctggtatcagcagaagtctggacagagccccaaggcactgatctacagcgccagcaatcggtacatcggcgtgcccgatagattcaccggctctggcagcggcaccgatttcaccctgaccatcagcaacgtgcagtccgaggacctggccgagtatttctgccagcagtaccacatctacccctacacctttggaggcggcacccggctggaaatcaagagaacagtggctgcc

SEQ ID NO: 3493 - DNA, 16 bp, synthetic construct
  source 1..16: mol_type = other DNA
gggggggggggggggg

SEQ ID NO: 3494 - DNA, 16 bp, synthetic construct
  source 1..16: mol_type = other DNA
gggggggggggggggg

SEQ ID NO: 3495 - DNA, 16 bp, synthetic construct
  source 1..16: mol_type = other DNA
gggggggggggggggg

SEQ ID NO: 3496 - DNA, 16 bp, synthetic construct
  source 1..16: mol_type = other DNA
gggggggggggggggg

SEQ ID NO: 3497 - DNA, 16 bp, synthetic construct
  source 1..16: mol_type = other DNA
gggggggggggggggg

SEQ ID NO: 3498 - DNA, 16 bp, synthetic construct
  source 1..16: mol_type = other DNA
gggggggggggggggg

SEQ ID NO: 3499 - DNA, 16 bp, synthetic construct
  source 1..16: mol_type = other DNA
gggggggggggggggg

SEQ ID NO: 3500 - DNA, 16 bp, synthetic construct
  source 1..16: mol_type = other DNA
gggggggggggggggg

SEQ ID NO: 3501 - DNA, 16 bp, synthetic construct
  source 1..16: mol_type = other DNA
gggggggggggggggg

SEQ ID NO: 3502 - DNA, 16 bp, synthetic construct
  source 1..16: mol_type = other DNA
gggggggggggggggg

SEQ ID NO: 3503 - DNA, 16 bp, synthetic construct
  source 1..16: mol_type = other DNA
gggggggggggggggg

SEQ ID NO: 3504 - DNA, 16 bp, synthetic construct
  source 1..16: mol_type = other DNA
gggggggggggggggg

SEQ ID NO: 3505 - DNA, 16 bp, synthetic construct
  source 1..16: mol_type = other DNA
gggggggggggggggg

SEQ ID NO: 3506 - DNA, 16 bp, synthetic construct
  source 1..16: mol_type = other DNA
gggggggggggggggg

SEQ ID NO: 3507 - DNA, 16 bp, synthetic construct
  source 1..16: mol_type = other DNA
gggggggggggggggg

SEQ ID NO: 3508 - DNA, 16 bp, synthetic construct
  source 1..16: mol_type = other DNA
gggggggggggggggg

SEQ ID NO: 3509 - DNA, 16 bp, synthetic construct
  source 1..16: mol_type = other DNA
gggggggggggggggg

SEQ ID NO: 3510 - DNA, 16 bp, synthetic construct
  source 1..16: mol_type = other DNA
gggggggggggggggg

SEQ ID NO: 3511 - DNA, 16 bp, synthetic construct
  source 1..16: mol_type = other DNA
gggggggggggggggg

SEQ ID NO: 3512 - DNA, 16 bp, synthetic construct
  source 1..16: mol_type = other DNA
gggggggggggggggg

SEQ ID NO: 3513 - DNA, 16 bp, synthetic construct
  source 1..16: mol_type = other DNA
gggggggggggggggg

SEQ ID NO: 3514 - DNA, 16 bp, synthetic construct
  source 1..16: mol_type = other DNA
gggggggggggggggg

SEQ ID NO: 3515 - DNA, 16 bp, synthetic construct
  source 1..16: mol_type = other DNA
gggggggggggggggg

SEQ ID NO: 3516 - DNA, 16 bp, synthetic construct
  source 1..16: mol_type = other DNA
gggggggggggggggg

SEQ ID NO: 3517 - DNA, 16 bp, synthetic construct
  source 1..16: mol_type = other DNA
gggggggggggggggg

SEQ ID NO: 3518 - DNA, 16 bp, synthetic construct
  source 1..16: mol_type = other DNA
gggggggggggggggg

SEQ ID NO: 3519 - DNA, 16 bp, synthetic construct
  source 1..16: mol_type = other DNA
gggggggggggggggg

SEQ ID NO: 3520 - DNA, 16 bp, synthetic construct
  source 1..16: mol_type = other DNA
gggggggggggggggg

SEQ ID NO: 3521 - DNA, 16 bp, synthetic construct
  source 1..16: mol_type = other DNA
gggggggggggggggg

SEQ ID NO: 3522 - DNA, 16 bp, synthetic construct
  source 1..16: mol_type = other DNA
gggggggggggggggg

SEQ ID NO: 3523 - DNA, 16 bp, synthetic construct
  source 1..16: mol_type = other DNA
gggggggggggggggg

SEQ ID NO: 3524 - DNA, 16 bp, synthetic construct
  source 1..16: mol_type = other DNA
gggggggggggggggg

SEQ ID NO: 3525 - DNA, 16 bp, synthetic construct
  source 1..16: mol_type = other DNA
gggggggggggggggg

SEQ ID NO: 3526 - DNA, 539 bp, synthetic construct
  source 1..539: mol_type = other DNA
gatccatcgattagtccaatttgttaaagacaggatatcagtggtccaggctctagttttgactcaacaatatcaccagctgaagcctatagagtacgagccatagatagaataaaagattttatttagtctccagaaaaaggggggaatgaaagaccccacctgtaggtttggcaagctaggatcaaggttaggaacagagagacagcagaatatgggccaaacaggatatctgtggtaagcagttcctgccccggctcagggccaagaacagttggaacagcagaatatgggccaaacaggatatctgtggtaagcagttcctgccccggctcagggccaagaacagatggtccccagatgcggtcccgccctcagcagtttctagcgaaccatcagatgtttccagggtgccccaaggacctgaaatgaccctgtgccttatttgaactaaccaatcagttcgcttctcgcttctgttcgcgcgcttctgctccccgagctcaataaaagagcccacaacccctcactcggcgcga

SEQ ID NO: 3527 - DNA, 538 bp, synthetic construct
  source 1..538: mol_type = other DNA
gatccatcgattagtccaatttgttaaagacaggatatcagtggtccaggctctagttttgactcaacaatatcaccagctgaagcctatagagtacgagccatagatagaataaaagattttatttagtctccagaaaaaggggggaatgaaagaccccacctgtaggtttggcaagctaggatcaaggttaggaacagagagacagcagaatatgggccaaacaggatatctgtggtaagcagttcctgccccggctcagggccaagaacagttggaacagcagaatatgggccaaacaggatatctgtggtaagcagttcctgccccggctcagggccaagaacagatggtccccagatgcggtcccgccctcagcagtttctagagaaccatcagatgtttccagggtgccccaaggacctgaaatgaccctgtgccttatttgaactaaccaatcagttcgcttctcgcttctgttcgcgcgcttctgctccccgagctcaataaaagagcccacaacccctcactcggcgcg

SEQ ID NO: 3528 - DNA, 1632 bp, synthetic construct
  source 1..1632: mol_type = other DNA
atggccgacaagaacatcctgtacggccccgagcctttctaccctctggaagatggaacagccggcgagcagatgttcgacgccctgagcagatatgccgccattcctggatgtatcgccctgacaaacgcccacaccaaagaaaacgtgctgtacgaagagttcctgaagctgagctgtcggctggccgagagcttcaagaagtacggcctgaagcagaacgacacaatcgccgtgtgcagcgagaacagcctccagttcttcctgcctgtgatcgccagcctgtacctgggcattattgtggcccctgtgaacgacaagtacatcgagagagagctgatccacagcctgggcatcgtgaagccccggatcgtgttctgctccaagaacaccttccagaaggtgctgaacgtcaagagcaagctgaagtccatcgagacaatcatcatcctggacctgaacgaggacctcggcggctaccagtgcctgaacaacttcatcagccagaacagcgacagcaacctggacgtgaagaagttcaagccctacagcttcaaccgggacgaccaggtggcctccatcatgtttagcagcggcaccaccggactgcccaaaggcgttatgctgacccacaagaatatcgtggcccggttctctatcgctaaggaccccaccttcggcaacgccatcaatcctacaagcgctatcctgacagtgatccccttccaccacggcttcggcatgatgaccacactgggctacttcacctgtggcttcagagtggtgctgatgcacaccttcgaggaaaagctgtttctccagagcctccaggactacaaggtggaaagcaccctgctggtgcctactctgatggccttcctggctaagtctgccctggtcgagaagtacgatctgagccacctgaaagagatcgcctctggcggagcccctctgagcaaagaaatcggcgagatggtcaagaagcggttcaagctgaacttcgtgcggcaaggctatggcctgaccgagacaacaagcgccgtgctgattacccctaagggcgacgccaagcctggcagcacaggcaaaattgtgcctctgcacgccgtgaaggtggtggaccctaccacaggcaagatcctgggacctaatgagcccggcgagctgtacttcaagggacccatgattatgaagggctactacaacaacgaggaagccaccaaggccattatcgacaacgacggctggctgcggagcggcgatattgcctactacgacaatgacggccacttctacatcgtggacagactgaagtccctcatcaagtacaagggctatcaggtggccccagccgagatcgagggtatcctgctgcaacacccctatatcgtggatgccggcgtgacaggcatccctgatgaagctgctggcgaacttccagcagctggcgtggtggttcagaccggcaagtacctgaatgagcagatcgtgcaggactacgtggcctctcaggtgtccacagccaaatggctgagaggcggcgtgaagttcctggacgagatcccaaagggctctaccggcaagatcgacagaaaggtgctgcggcagatgctggaaaagcacaccaatggc

SEQ ID NO: 3529 - DNA, 732 bp, synthetic construct
  source 1..732: mol_type = other DNA
ggagacatccagatgacacagagcccttctagcctgagcgccagcgtgggagacagagtgaccatcacatgtagcgccagcagcagcgtgtcctacatgaactggtatcagcagacccctggcaaggcccctaagcggtggatctacgataccagcaaactggcctccggcgtgcccagcagattttctggttctggcagcggcaccgactacaccttcacaatatccagcctccagccagaggacattgccacctactactgccagcagtggtccagcaatcccttcacattcggccagggcaccaagctccagatcaccagaacatctggcggcggaggatctggcggaggtggaagcggaggcggcggatctcaagttcagctggttcaaagtggcggaggcgttgtgcagcctggcagaagtctgagactgagctgtaaagccagcggctacacattcacccggtacaccatgcactgggtccgacaggcacctggcaaaggactggaatggatcggctacatcaaccccagccggggctacaccaactacaaccagaaagtgaaggaccgcttcaccatcagccgggacaacagcaagaacaccgcctttctccagatggactccctgcggcctgaagataccggcgtgtacttctgtgcccggtactacgacgaccactactgcctggattattggggccagggaacccctgtgacagtgtctagc

SEQ ID NO: 3530 - DNA, 7181 bp, synthetic construct
  source 1..7181: mol_type = other DNA
cccgactggaaagcgggcagtgagcgcaacgcaattaatgtgagttagctcactcattaggcaccccaggctttacactttatgcttccggctcgtatgttgtgtggaattgtgagcggataacaatttcacacaggaaacagctatgaccatgattacgccaagcgcgcaattaaccctcactaaagggaacaaaagctggagctgcaagcttggccattgcatacgttgtatccatatcataatatgtacatttatattggctcatgtccaacattaccgccatgttgacattgattattgactagttattaatagtaatcaattacggggtcattagttcatagcccatatatggagttccgcgttacataacttacggtaaatggcccgcctggctgaccgcccaacgacccccgcccattgacgtcaataatgacgtatgttcccatagtaacgccaatagggactttccattgacgtcaatgggtggagtatttacggtaaactgcccacttggcagtacatcaagtgtatcatatgccaagtacgccccctattgacgtcaatgacggtaaatggcccgcctggcattatgcccagtacatgaccttatgggactttcctacttggcagtacatctacgtattagtcatcgctattaccatggtgatgcggttttggcagtacatcaatgggcgtggatagcggtttgactcacggggatttccaagtctccaccccattgacgtcaatgggagtttgttttggcaccaaaatcaacgggactttccaaaatgtcgtaacaactccgccccattgacgcaaatgggcggtaggcgtgtacggtgggaggtctatataagcagagctcgtttagtgaaccggggtctctctggttagaccagatctgagcctgggagctctctggctaactagggaacccactgcttaagcctcaataaagcttgccttgagtgcttcaagtagtgtgtgcccgtctgttgtgtgactctggtaactagagatccctcagacccttttagtcagtgtggaaaatctctagcagtggcgcccgaacagggacttgaaagcgaaagggaaaccagaggagctctctcgacgcaggactcggcttgctgaagcgcgcacggcaagaggcgaggggcggcgactggtgagtacgccaaaaattttgactagcggaggctagaaggagagagatgggtgcgagagcgtcagtattaagcgggggagaattagatcgcgatgggaaaaaattcggttaaggccagggggaaagaaaaaatataaattaaaacatatagtatgggcaagcagggagctagaacgattcgcagttaatcctggcctgttagaaacatcagaaggctgtagacaaatactgggacagctacaaccatcccttcagacaggatcagaagaacttagatcattatataatacagtagcaaccctctattgtgtgcatcaaaggatagagataaaagacaccaaggaagctttagacaagatagaggaagagcaaaacaaaagtaagaccaccgcacagcaagcggccgctgatcttcagacctggaggaggagatatgagggacaattggagaagtgaattatataaatataaagtagtaaaaattgaaccattaggagtagcacccaccaaggcaaagagaagagtggtgcagagagaaaaaagagcagtgggaataggagctttgttccttgggttcttgggagcagcaggaagcactatgggcgcagcgtcaatgacgctgacggtacaggccagacaattattgtctggtatagtgcagcagcagaacaatttgctgagggctattgaggcgcaacagcatctgttgcaactcacagtctggggcatcaagcagctccaggcaagaatcctggctgtggaaagatacctaaaggatcaacagctcctggggatttggggttgctctggaaaactcatttgcaccactgctgtgccttggaatgctagttggagtaataaatctctggaacagatttggaatcacacgacctggatggagtgggacagagaaattaacaattacacaagcttaatacactccttaattgaagaatcgcaaaaccagcaagaaaagaatgaacaagaattattggaattagataaatgggcaagtttgtggaattggtttaacataacaaattggctgtggtatataaaattattcataatgatagtaggaggcttggtaggtttaagaatagtttttgctgtactttctatagtgaatagagttaggcagggatattcaccattatcgtttcagacccacctcccaaccccgaggggacccgacaggcccgaaggaatagaagaagaaggtggagagagagacagagacagatccattcgattagtgaacggatctcgacggtatcgataagctaattcacaaatggcagtattcatccacaattttaaaagaaaaggggggattggggggtacagtgcaggggaaagaatagtagacataatagcaacagacatacaaactaaagaattacaaaaacaaattacaaaaattcaaaattttcgggtttattacagggacagcagagatccagtttgggaattagcttgatcgattagtccaatttgttaaagacaggatatcagtggtccaggctctagttttgactcaacaatatcaccagctgaagcctatagagtacgagccatagatagaataaaagattttatttagtctccagaaaaaggggggaatgaaagaccccacctgtaggtttggcaagctaggatcaaggttaggaacagagagacagcagaatatgggccaaacaggatatctgtggtaagcagttcctgccccggctcagggccaagaacagttggaacagcagaatatgggccaaacaggatatctgtggtaagcagttcctgccccggctcagggccaagaacagatggtccccagatgcggtcccgccctcagcagtttctagagaaccatcagatgtttccagggtgccccaaggacctgaaatgaccctgtgccttatttgaactaaccaatcagttcgcttctcgcttctgttcgcgcgcttctgctccccgagctcaataaaagagcccacaacccctcactcggcgcgatctagatctcgaatcgaattcgccgctagcgtcgactgatccgataatcaacctctggattacaaaatttgtgaaagattgactggtattcttaactatgttgctccttttacgctatgtggatacgctgctttaatgcctttgtatcatgctattgcttcccgtatggctttcattttctcctccttgtataaatcctggttgctgtctctttatgaggagttgtggcccgttgtcaggcaacgtggcgtggtgtgcactgtgtttgctgacgcaacccccactggttggggcattgccaccacctgtcagctcctttccgggactttcgctttccccctccctattgccacggcggaactcatcgccgcctgccttgcccgctgctggacaggggctcggctgttgggcactgacaattccgtggtgttgtcggggaaatcatcgtcctttccttggctgctcgcctgtgttgccacctggattctgcgcgggacgtccttctgctacgtcccttcggccctcaatccagcggaccttccttcccgcggcctgctgccggctctgcggcctcttccgcgtcttcgccttcgccctcagacgagtcggatctccctttgggccgcctccccgcatcggatcaaattcgagctcggtacctttaagaccaatgacttacaaggcagctgtagatcttagccactttttaaaagaaaaggggggactggaagggctaattcactcccaacgaagacaagatctgctttttgcttgtactgggtctctctggttagaccagatctgagcctgggagctctctggctaactagggaacccactgcttaagcctcaataaagcttgccttgagtgcttcaagtagtgtgtgcccgtctgttgtgtgactctggtaactagagatccctcagacccttttagtcagtgtggaaaatctctagcagtagtagttcatgtcatcttattattcagtatttataacttgcaaagaaatgaatatcagagagtgagaggaacttgtttattgcagcttataatggttacaaataaagcaatagcatcacaaatttcacaaataaagcatttttttcactgcattctagttgtggtttgtccaaactcatcaatgtatcttatcatgtctggctctagctatcccgcccctaactccgcccatcccgcccctaactccgcccagttccgcccattctccgccccatggctgactaattttttttatttatgcagaggccgaggccgcctcggcctctgagctattccagaagtagtgaggaggcttttttggaggcctagggacgtacccaattcgccctatagtgagtcgtattacgcgcgctcactggccgtcgttttacaacgtcgtgactgggaaaaccctggcgttacccaacttaatcgccttgcagcacatccccctttcgccagctggcgtaatagcgaagaggcccgcaccgatcgcccttcccaacagttgcgcagcctgaatggcgaatgggacgcgccctgtagcggcgcattaagcgcggcgggtgtggtggttacgcgcagcgtgaccgctacacttgccagcgccctagcgcccgctcctttcgctttcttcccttcctttctcgccacgttcgccggctttccccgtcaagctctaaatcgggggctccctttagggttccgatttagtgctttacggcacctcgaccccaaaaaacttgattagggtgatggttcacgtagtgggccatcgccctgatagacggtttttcgccctttgacgttggagtccacgttctttaatagtggactcttgttccaaactggaacaacactcaaccctatctcggtctattcttttgatttataagggattttgccgatttcggcctattggttaaaaaatgagctgatttaacaaaaatttaacgcgaattttaacaaaatattaacgcttacaatttaggtggcacttttcggggaaatgtgcgcggaacccctatttgtttatttttctaaatacattcaaatatgtatccgctcatgagacaataaccctgataaatgcttcaataatattgaaaaaggaagagtatgagtattcaacatttccgtgtcgcccttattcccttttttgcggcattttgccttcctgtttttgctcacccagaaacgctggtgaaagtaaaagatgctgaagatcagttgggtgcacgagtgggttacatcgaactggatctcaacagcggtaagatccttgagagttttcgccccgaagaacgttttccaatgatgagcacttttaaagttctgctatgtggcgcggtattatcccgtattgacgccgggcaagagcaactcggtcgccgcatacactattctcagaatgacttggttgagtactcaccagtcacagaaaagcatcttacggatggcatgacagtaagagaattatgcagtgctgccataaccatgagtgataacactgcggccaacttacttctgacaacgatcggaggaccgaaggagctaaccgcttttttgcacaacatgggggatcatgtaactcgccttgatcgttgggaaccggagctgaatgaagccataccaaacgacgagcgtgacaccacgatgcctgtagcaatggcaacaacgttgcgcaaactattaactggcgaactacttactctagcttcccggcaacaattaatagactggatggaggcggataaagttgcaggaccacttctgcgctcggcccttccggctggctggtttattgctgataaatctggagccggtgagcgtgggtctcgcggtatcattgcagcactggggccagatggtaagccctcccgtatcgtagttatctacacgacggggagtcaggcaactatggatgaacgaaatagacagatcgctgagataggtgcctcactgattaagcattggtaactgtcagaccaagtttactcatatatactttagattgatttaaaacttcatttttaatttaaaaggatctaggtgaagatcctttttgataatctcatgaccaaaatcccttaacgtgagttttcgttccactgagcgtcagaccccgtagaaaagatcaaaggatcttcttgagatcctttttttctgcgcgtaatctgctgcttgcaaacaaaaaaaccaccgctaccagcggtggtttgtttgccggatcaagagctaccaactctttttccgaaggtaactggcttcagcagagcgcagataccaaatactgttcttctagtgtagccgtagttaggccaccacttcaagaactctgtagcaccgcctacatacctcgctctgctaatcctgttaccagtggctgctgccagtggcgataagtcgtgtcttaccgggttggactcaagacgatagttaccggataaggcgcagcggtcgggctgaacggggggttcgtgcacacagcccagcttggagcgaacgacctacaccgaactgagatacctacagcgtgagctatgagaaagcgccacgcttcccgaagggagaaaggcggacaggtatccggtaagcggcagggtcggaacaggagagcgcacgagggagcttccagggggaaacgcctggtatctttatagtcctgtcgggtttcgccacctctgacttgagcgtcgatttttgtgatgctcgtcaggggggcggagcctatggaaaaacgccagcaacgcggcctttttacggttcctggccttttgctggccttttgctcacatgttctttcctgcgttatcccctgattctgtggataaccgtattaccgcctttgagtgagctgataccgctcgccgcagccgaacgaccgagcgcagcgagtcagtgagcgaggaagcggaagagcgcccaatacgcaaaccgcctctccccgcgcgttggccgattcattaatgcagctggcacgacaggttt

SEQ ID NO: 3531 - DNA, 354 bp, synthetic construct
  source 1..354: mol_type = other DNA
gaagtgcaactgctggaatccggtggcggcctggtgcaagcaggcggatctctcagacttagctgtgccgcctccggcagaaccttcacaatgggatggtttaggcaggctccagggaaagagagagagttcgtcgccgccatctctctgtctcccacactggcctactacgccgactctgtgaaaggccggttcaccatctccagagataatgccaagaacaccgtggtgctgcaaatgaactctctgaaacccgaggatacagccctgtactattgtgccgctgaccggaagtccgtgatgagcatcagacccgattactggggacagggcacactggtcacagtgtctagt

SEQ ID NO: 3532 - DNA, 354 bp, synthetic construct
  source 1..354: mol_type = other DNA
caagtgcaactggttgaatccggtggcggcctggtgcaagcaggcggatctctcagacttagctgtgccgcctccggcagaaccttcacaatgggatggtttaggcaggctccagggaaagagagagagttcgtcgccgccatctctctgtctcccacactggcctactacgccgactctgtgaaaggccggttcaccatctccagagataatgccaagaacaccgtggtgctgcaaatgaactctctgaaacccgaggatacagccctgtactattgtgccgctgaccggaagtccgtgatgagcatcagacccgattactggggacagggcacactggtcacagtgtctagt

SEQ ID NO: 3533 - DNA, 354 bp, synthetic construct
  source 1..354: mol_type = other DNA
gaagtgcaactgctggaatccggtggcggcctggtgcaagcaggcggatctctcagacttagctgtgccgcctccggcagaaccttcacaatgggatggtttaggcaggctccagggaaagagagagagttcgtcgccgccatctctctgtctcccacactggcctactacgccgactctgtgaaaggccggttcaccatctccagagataatgccaagaacaccgtggtgctgcaaatgaactctctgaaacccgaggatacagccctgtactattgtgccgctgaccggaagtccgtgatgagcatcagacccgattactggggacagggcacacaagtcacagtgtcctct

SEQ ID NO: 3534 - DNA, 354 bp, synthetic construct
  source 1..354: mol_type = other DNA
caagtgcaactggttgaatccggtggcggcctggtgcaagcaggcggatctctcagacttagctgtgccgcctccggcagaaccttcacaatgggatggtttaggcaggctccagggaaagagagagagttcgtcgccgccatctctctgtctcccacactggcctactacgccgactctgtgaaaggccggttcaccatctccagagataatgccaagaacaccgtggtgctgcaaatgaactctctgaaacccgaggatacagccctgtactattgtgccgctgaccggaagtccgtgatgagcatcagacccgattactggggacagggcacacaagtcacagtgtcctct

SEQ ID NO: 3535 - DNA, 354 bp, synthetic construct
  source 1..354: mol_type = other DNA
gaagtgcaactgctggaatccggtggcggcctggtgcaagcaggcggatctctcagacttagctgtgccgcctccggcagaaccttcacaatgggatggtttaggcaggctccagggaaagagagagagttcgtcgccgccatctctctgtctcccacactggcctactacgccagctctgtgagaggccggttcaccatctccagagataatgccaagaacaccgtggtgctgcaaatgaactctctgaaacccgaggatacagccctgtactattgtgccgctgaccggaagtccgtgatgagcatcagacccgattactggggacagggcacacaagtcacagtgtcctct

SEQ ID NO: 3536 - DNA, 354 bp, synthetic construct
  source 1..354: mol_type = other DNA
caagtgcaactggttgaatccggtggcggcctggtgcaagcaggcggatctctcagacttagctgtgccgcctccggcagaaccttcacaatgggatggtttaggcaggctccagggaaagagagagagttcgtcgccgccatctctctgtctcccacactggcctactacgccgactctgtgagaggccggttcaccatctccagagataatgccaagaacaccgtgtacctgcaaatgaactctctgaaacccgaggatacagccgtgtactattgtgccgctgaccggaagtccgtgatgagcatcagacccgattactggggacagggcacacaagtcacagtgtcctct

SEQ ID NO: 3537 - DNA, 354 bp, synthetic construct
  source 1..354: mol_type = other DNA
caagtgcaactggttgaatccggtggcggcctggtgcaagcaggcggatctctcagacttagctgtgccgcctccggcagaaccttctctatgggatggtttaggcaggctccagggaaagagagagagttcgtcgccgccatctctctgtctcccacactggcctactacgccgactctgtgagaggccggttcaccatctccagagataatgccaagaacaccgtgtacctgcaaatgaactctctgaaacccgaggatacagccgtgtactattgtgccgctgaccggaagtccgtgatgagcatcagacccgattactggggacagggcacacaagtcacagtgtcctct

SEQ ID NO: 3538 - DNA, 354 bp, synthetic construct
  source 1..354: mol_type = other DNA
caagtgcaactggttgaatccggtggcggcctggtgcaagcaggcggatctctcagacttagctgtgccgcctccggcagaaccttctctatgggatggtttaggcaggctccagggaaagagagagagttcgtcgccgccatcaccctgtctcccacactggcctactacgccgactctgtgagaggccggttcaccatctccagagataatgccaagaacaccgtgtacctgcaaatgaactctctgaaacccgaggatacagccgtgtactattgtgccgctgaccggaagtccgtgatgagcatcagacccgattactggggacagggcacacaagtcacagtgtcctct

SEQ ID NO: 3539 - DNA, 354 bp, synthetic construct
  source 1..354: mol_type = other DNA
caagtgcaactgcaagaatccggtggcggcctggcacaagcaggcggatctctcagacttagctgtgccgcctccggcagaaccttctctatgggatggtttaggcaggctccagggaaagagagagagttcgtcgccgccatcaccctgtctcccacactggcctactacgccgactctgtgagaggccggttcaccatctccagagataatgccaagaacaccgtgtacctgcaaatgaactctctgaaacccgaggatacagccgtgtactattgtgccgctgaccggaagtccgtgatgagcatcagacccgattactggggacagggcacacaagtcacagtgtcctct

SEQ ID NO: 3540 - DNA, 354 bp, synthetic construct
  source 1..354: mol_type = other DNA
caagtgcaactggttgaatccggtggcggcctggcacaaccaggcggatctctcagacttagctgtgccgcctccggcagaaccttctctatgggatggtttaggcaggctccagggaaagagagagagttcgtcgccgccatcaccctgtctcccacactggcctactacgccgactctgtgagaggccggttcaccatctccagagataatgccaagaacaccgtgtacctgcaaatgaactctctgaaacccgaggatacagccgtgtactattgtgccgctgaccggaagtccgtgatgagcatcagacccgattactggggacagggcacacaagtcacagtgtcctct

SEQ ID NO: 3541 - DNA, 354 bp, synthetic construct
  source 1..354: mol_type = other DNA
gaagtgcagctgctggaatctggcggaggactggttcaggctggcggatctctgagactgtcttgtgccgccagcggcagaacctttagcatgggctggtttagacaggcccctggcaaagagagagagttcgtcgccgccatcacatactctggcggcagcccttactacgccgactctgtgaagggcagattcaccatcagccgggacaacgccaagaacaccgtgtacctccagatgaacagcctgaagcctgaggacaccgccgtgtactactgcgccgccaatccaacatacggcagcgactggaacgccgagaattggggccagggaacccaagtgacagtgtctagc

SEQ ID NO: 3542 - DNA, 354 bp, synthetic construct
  source 1..354: mol_type = other DNA
gaagtgcagctgctggaatctggcggaggactggttcaggctggcggatctctgagactgtcttgtgccgccagcggcagaacctttagcatgggctggtttagacaggcccctggcaaagagagagagttcgtcgccgccatcacatactctggcggcagcccttactacgccgactctgtgaagggcagattcaccatcagccgggacaacgccaagaacaccgtgtacctccagatgaacagcctgaagcctgaggacaccgccgtgtactactgcgccgccaatccaacatacggcagcgactggaacgccgagaattggggccagggaaccctggtgacagtgtctagc

SEQ ID NO: 3543 - DNA, 354 bp, synthetic construct
  source 1..354: mol_type = other DNA
gaagtgcagctggttgaatctggcggaggactggttcaggctggcggatctctgagactgtcttgtgccgccagcggcagaacctttacaatgggctggtttagacaggcccctggcaaagagagagagttcgtcgccgccatcacatactctggcggcagcccttactacgccgactctgtgaagggcagattcaccatcagccgggacaacgccaagaacaccgtggtgctccagatgaacagcctgaagcctgaggacaccgccctgtactactgcgccgccaatccaacatacggcagcgactggaacgccgagaattggggccagggaacccaagtgacagtgtctagc

SEQ ID NO: 3544 - DNA, 354 bp, synthetic construct
  source 1..354: mol_type = other DNA
gaagtgcagctggttgaatctggcggaggactggttcaggctggcggatctctgagactgtcttgtgccgccagcggcagaacctttacaatgggctggtttagacaggcccctggcaaagagagagagttcgtcgccgccatcagctactctggcggcagcccttactacgccgactctgtgaagggcagattcaccatcagccgggacaacgccaagaacaccgtggtgctccagatgaacagcctgaagcctgaggacaccgccctgtactactgcgccgccaatccaacatacggcagcgactggaacgccgagaattggggccagggaacccaagtgacagtgtctagc

SEQ ID NO: 3545 - DNA, 366 bp, synthetic construct
  source 1..366: mol_type = other DNA
caggttcagctgcaagagtctggccctggcctggtcaagcctagccaaacactgagcctgacctgtaccgtgtctggcggctctatcaccaccggcgagttctactggaactggttcagacagcctcctggcaaaggactggaatggatgggagccgtggccgccagcggcagcacaacatacagccctagcttcgagagccggaccagcatcagcagagacaccagcaagaatcagttcagcctgaagctgagcagcgtgacagccgccgatacagccctgtattactgcggcagatcctttggagtggccgccattacaaccggccagaatagaggacagggcaccctggtcacagtgtctagc

SEQ ID NO: 3546 - DNA, 375 bp, synthetic construct
  source 1..375: mol_type = other DNA
caggtgcagctggttgaatctggcggaggactggttcagcctggcggatctctgagactgtcttgtgccgccagcggcaacatcaacagcagatcctgcatgggctggttcagacaggcccctggcaagggaagagaaggcgtggcagctatcggacaagtgaccggcagaacctactacgtggacagcgtgaagggcagattcaccatcagcctggacaacagcaagaacaccctgtacctccagatgaacagcctgagagccgaggacaccgccgtgtactattgtgctgctgcccctggctgtctgctgtctgcacttagaagcgccgactacagaaactggggccagggcacactggtcaccgtttcttct

SEQ ID NO: 3547 - DNA, 375 bp, synthetic construct
  source 1..375: mol_type = other DNA
caggtgcagctggttgaatctggcggaggactggttcagcctggcggatctctgagactgtcttgtgccgccagcggcagcatcaacagcagatcctgcatgggctggttcagacaggcccctggcaagggaagagaaggcgtggcagctatcggacaagtgaccggcagaacctactacgtggacagcgtgaagggcagattcaccatcagcctggacaacagcaagaacaccctgtacctccagatgaacagcctgagagccgaggacaccgccgtgtactattgtgctgctgcccctggctgtctgctgtctgcacttagaagcgccgactacagaaactggggccagggcacactggtcaccgtttcttct

SEQ ID NO: 3548 - DNA, 375 bp, synthetic construct
  source 1..375: mol_type = other DNA
gaagtgcagctgctggaatctggcggaggactggttcaggctggcggatctctgagactgtcttgtgccgccagcggcaacatcaacagcagatcctgcatgggctggttcagacaggcccctggcaagggaagagaaggcgtggcagctatcggacaagtgaccggcagaacctactacgtggacagcgtgaagggcagattcaccatcagcctggacaacagcaagaacaccctgtacctccagatgaacagcctgagagccgaggacaccgccgtgtactattgtgctgctgcccctggctgtctgctgtctgcacttagaagcgccgactacagaaactggggccagggcacactggtcaccgtttcttct

SEQ ID NO: 3549 - DNA, 375 bp, synthetic construct
  source 1..375: mol_type = other DNA
caggtgcagctggttgaatctggcggaggactggttcagcctggcggatctctgagactgtcttgtgccgccagcggcaacatcagcagcagaaactgcatgggctggttcagacaggcccctggcaagggaagagaaggcgtggcagctatcggacaagtgaccggcagaacctactacgtggacagcgtgaagggcagattcaccatcagcctggacaacagcaagaacaccctgtacctccagatgaacagcctgagagccgaggacaccgccgtgtactattgtgctgctgcccctggctgtctgctgtctgcacttagaagcgccgactacagaaactggggccagggcacactggtcaccgtttcttct

SEQ ID NO: 3550 - DNA, 375 bp, synthetic construct
  source 1..375: mol_type = other DNA
caggtgcagctggttgaatctggcggaggatctgttcaggctggcggctctctgagactgtcttgtggcgcttccggcaacatcagcagcagaaactgcatgggctggttcagacaggcccctggcaaagagagagaaggcgttgccgccatcggacaagtgaccggcagaacctactacgtggacagcgtgaagggcagattcaccatcagcctggacaacgccaagaacaccctgtacctccagatgaacacactgaagcccgaggacaccgccatgtactactgtgctgctgcccctggctgtctgctgtctgcacttagaagcgccgactacagaaactggggccagggaacccaagtgacagtgtctagt

SEQ ID NO: 3551 - DNA, 375 bp, synthetic construct
  source 1..375: mol_type = other DNA
caggtgcagctggttgaatctggcggaggactggttcagcctggcggatctctgagactgtcttgtgccgccagcggcagcatcaacagcagaaactgcatgggctggttcagacaggcccctggcaagggaagagaaggcgtggcagctatcggacaagtgaccggcagaacctactacgtggacagcgtgaagggcagattcaccatcagcctggacaacagcaagaacaccctgtacctccagatgaacagcctgagagccgaggacaccgccgtgtactattgtgctgctgcccctggctgtctgctgtctgcacttagaagcgccgactacagaaactggggccagggcacactggtcaccgtttcttct

SEQ ID NO: 3552 - DNA, 375 bp, synthetic construct
  source 1..375: mol_type = other DNA
caggtgcagctggttgaatctggcggaggactggttcagcctggcggatctctgagactgtcttgtgccgccagcggcaacatcaacagcagaacctgcatgggctggttcagacaggcccctggcaagggaagagaaggcgtggcagctatcggacaagtgaccggcagatcctactacgtggacagcgtgaagggcagattcaccatcagcctggacaacagcaagaacaccctgtacctccagatgaacagcctgagagccgaggacaccgccgtgtactattgtgctgctgcccctggctgtctgctgtctgcacttagaagcgccgactacagaaactggggccagggcacactggtcaccgtttcttct

SEQ ID NO: 3553 - DNA, 375 bp, synthetic construct
  source 1..375: mol_type = other DNA
caggtgcagctggttgaatctggcggaggatctgttcaggctggcggctctctgagactgtcttgtggcgcttccggcaacatcaacagcagaaactgcatgggctggttcagacaggcccctggcaaagagagagaaggcgttgccgccatcggacaagtgaccggcagatcctactacgtggacagcgtgaagggcagattcaccatcagcctggacaacgccaagaacaccctgtacctccagatgaacacactgaagcccgaggacaccgccatgtactactgtgctgctgcccctggctgtctgctgtctgcacttagaagcgccgactacagaaactggggccagggaacccaagtgacagtgtctagt

SEQ ID NO: 3554 - DNA, 381 bp, synthetic construct
  source 1..381: mol_type = other DNA
gaggtgcagctggttgaatctggcggaggatctgttcaggctggcggctctctgagactgtcttgtgccgcctctggctacacctacggcatcaactgcatgggctggttcagacaggcccctggcaaagaacgagaaggcgtggccgccatctctaccggcggaggcagaaccgactaccgggattctgtgaagggcagattcaccatcagccaggacaacgccaagaacaccgtgtacctccagatgaacagcctgaagcctgaggacaccgccatgtactactgtgccggcaagaccacctatcctggctacggatgtggcctgggcagaagcgcctacaattattggggccagggcacccaagtgaccgtgtctagc

SEQ ID NO: 3555 - DNA, 381 bp, synthetic construct
  source 1..381: mol_type = other DNA
caggtgcagctggttgaatctggcggaggactggttcagcctggcagaagtctgagactgtcttgtgccgccagcggctacacctacggcatcaactgtatgggctggttcagacaggcccctggcaagggaagagaaggcgtggccgccatctctaccggcggaggcagaaccgactaccgggattctgtgaagggcagattcaccatcagccaggacaacagcaagaacaccgtgtacctgcagatgaacagcctgagagccgaggacaccgccatgtactattgtgccggcaagaccacctatcctggctacggatgtggcctgggcagaagcgcctacaattattggggccagggcacccaagtgaccgtgtctagc

SEQ ID NO: 3556 - DNA, 381 bp, synthetic construct
  source 1..381: mol_type = other DNA
caggtgcagctggttgaatctggcggaggactggttcagcctggcagaagtctgagactgtcttgtgccgccagcggctacacctacggcatcaactgtatgggctggttcagacaggcccctggcaagggaagagaaggcgtggccgccatctctaccggcggaggcagaaccgactaccgggattctgtgagaggcagattcaccatcagccaggacaacagcaagaacaccgtgtacctgcagatgaacagcctgagagccgaggacaccgccatgtactattgtgccggcaagaccacctatcctggctacggatgtggcctgggcagaagcgcctacaattattggggccagggcacccaagtgaccgtgtctagc

SEQ ID NO: 3557 - DNA, 381 bp, synthetic construct
  source 1..381: mol_type = other DNA
gaggtgcagctggttgaatctggcggaggatctgttcaggctggcggctctctgagactgtcttgtgccgcctctggctacacctacggcatcaactgcatgggctggttcagacaggcccctggcaaagaacgagaaggcgtggccgccatctctaccggcggaggcagaaccgactaccgggattctgtgagaggcagattcaccatcagccaggacaacgccaagaacaccgtgtacctccagatgaacagcctgaagcctgaggacaccgccatgtactactgtgccggcaagaccacctatcctggctacggatgtggcctgggcagaagcgcctacaattattggggccagggcacccaagtgaccgtgtctagc

SEQ ID NO: 3558 - DNA, 384 bp, synthetic construct
  source 1..384: mol_type = other DNA
caggttcagctggtggaaagcggtggtggcgttgtgcaacctggcagaagtctgaggctgagctgtgtggcctccggctacacatactctattaactgcatgggatggtttcggcaggctcccggaaaaggcagagagggaattgccgtgatctctacaggcggcggaacaacaggcgtggcagatagcgtgaaaggccggttcaccatctctcaggacaatgccaagaatacggtctatctccagatgaactctctgcgggccgaagatacagccatgtattactgcgccgccaggtccacctacagcggctatgcctgtgtgtacagcgaagtgaacggctacaactacagaggccagggaacacaagtcacagtcagcagc

SEQ ID NO: 3559 - DNA, 375 bp, synthetic construct
  source 1..375: mol_type = other DNA
caagttcagctggtggaaagcggtggtggcgttgtgcaacctggtggaagtctgaggctgagctgtgccgcttctggcctgagctttagcacctacactgtggcctggttcaggcaggctcccggaaagggtcttgaaggcgtggccgccattccttacaccagccagcacatggtgtacacagacagcgtcagaggccggttcaccatcagcagagacaactccaagaatacgctctatctccagatgaactctctgcgcgccgaagatacagccgtgtattactgcgccaccgacagacggcctggcacctctatgctggctatcaacggctacaacagatggggacagggaaccaccgtgaccgtgtcatct

SEQ ID NO: 3560 - DNA, 375 bp, synthetic construct
  source 1..375: mol_type = other DNA
caagttcagctggtggaaagcggtggtggcgttgtgcaacctggtggaagtctgaggctgagctgtgccgcttctggcctgagctttagcacctacactgtggcctggttcaggcaggctcccggaaagggtcttgaaggcgtggccgccattccttacaccagccagcacatggtgtacacagacagcgtcagaggccggttcaccatcagcagagacaactccaagaatacgctctatctccagatgaactctctgcgcgccgaagatacagccgtgtattactgcgccaccgacagacggcctggcacctctatgctggctgtgaacggctacaaccactggggacagggaaccaccgtgaccgtgtcatct

SEQ ID NO: 3561 - DNA, 375 bp, synthetic construct
  source 1..375: mol_type = other DNA
caagttcagctggtggaaagcggtggtggcgttgtgcaacctggtggaagtctgaggctgagctgtgccgcttctggcctgagctttagcacctacactgtggcctggttcaggcaggctcccggaaagggtcttgaaggcgtggccgccattccttacaccagccagcacatggtgtacgccgacagcgtcaagggccggttcaccatcagcagagacaactccaagaatacgctctatctccagatgaactctctgcgcgccgaagatacagccgtgtattactgcgccaccgacagacggcctggcaccaccatgctggctatcaacggctacaaccactggggacagggaaccaccgtgaccgtgtcatct

SEQ ID NO: 3562 - DNA, 375 bp, synthetic construct
  source 1..375: mol_type = other DNA
caagttcagctggtggaaagcggtggtggcgttgtgcaacctggtggaagtctgaggctgagctgtgccgcttctggcctgagctttagcacctacactgtggcctggttcaggcaggctcccggaaagggtcttgaaggcgtggccgccattccttacaccagccagcacatggtgtacgccgacagcgtcaagggccggttcaccatcagcagagacaactccaagaatacgctctatctccagatgaactctctgcgcgccgaagatacagccgtgtattactgcgccaccgacagacggcctggcacctctatgctggctgtgaacggctacaaccactggggacagggaaccaccgtgaccgtgtcatct

SEQ ID NO: 3563 - DNA, 375 bp, synthetic construct
  source 1..375: mol_type = other DNA
caagttcagctggtggaaagcggtggtggcgttgtgcaacctggtggaagtctgaggctgagctgtgccgcttctggcctgagctttagcacctacactgtggcctggttcaggcaggctcccggaaagggtcttgaaggcgtggccgccattccttacaccagccagcacatggtgtacgccgacagcgtcaagggccggttcaccatcagcagagacaactccaagaatacgctctatctccagatgaactctctgcgcgccgaagatacagccgtgtattactgcgccaccgacagacggcctggcaccaccatgctggctgtgaacggctacaaccactggggacagggaaccaccgtgaccgtgtcatct

SEQ ID NO: 3564 - DNA, 375 bp, synthetic construct
  source 1..375: mol_type = other DNA
caagttcagctggtggaaagcggtggtggcgttgtgcaacctggtaggagtctgaggctgagctgtgccgcttctggcctgagctttagcacctacactgtggcctggttcaggcaggctcccggaaagggtcttgaaggcgtggccgccattccttacaccagccagcacatggtgtacgccgacagcgtcaagggccggttcaccatcagcagagacaactccaagaatacgctctatctccagatgaactctctgcgcgccgaagatacagccgtgtattactgcgccaccgacagacggcctggcaccaccatgctggctgtgaacggctacaaccactggggacagggaaccctggtgaccgtgtcatct

SEQ ID NO: 3565 - DNA, 375 bp, synthetic construct
  source 1..375: mol_type = other DNA
caggtgcagctggttgaatctggtggcggagttgttcagcctggcggctctctgagactgtcttgtgccgccagctttagcggctacggcgtgtcaacaatggcctggtttagacaggcccctggcaaaggactggaaggcgtggccgtgatcacagtcggcagcggcaatacctactacgccgactctgtgagaggcagattcaccatcagccgggacaacagcaagaacaccgtgtacctccagatgaacagcctgagagccgaggacaccgccatgtactattgtgccgttggctggctgagcggcggatcttggcatgtgcctggcagatacaactactggggccagggcacactggtcacagtttctagc

SEQ ID NO: 3566 - DNA, 375 bp, synthetic construct
  source 1..375: mol_type = other DNA
caggtgcagctggttgaatctggtggcggagttgttcagcctggcggctctctgagactgtcttgtgccgccagctttagcggctacggcgtgtcaacaatggcctggtttagacaggcccctggcaaaggactggaaggcgtggccgtgatcacagtcggcagcggcaatacctactacaccgactctgtgagaggcagattcaccatcagccgggacaacagcaagaacaccgtgtacctccagatgaacagcctgagagccgaggacaccgccatgtactattgtgccgttggctggctgagcggcggatcttggcatgtgcctggcagatacaactactggggccagggcacactggtcacagtttctagc

SEQ ID NO: 3567 - DNA, 375 bp, synthetic construct
  source 1..375: mol_type = other DNA
caggtgcagctggttgaatctggtggcggagttgttcagcctggcagatctctgagactgtcttgtgccgccagctttagcggctacggcgtgtcaacaatggcctggtttagacaggcccctggcaaaggactggaaggcgtggccgtgatcacagtcggcagcggcaatacctactacaccgactctgtgagaggcagattcaccatcagccgggacaacagcaagaacaccgtgtacctccagatgaacagcctgagagccgaggacaccgccatgtactattgtgccgttggctggctgagcggcggatcttggcatgtgcctggcagatacaactactggggccagggcacactggtcacagtttctagc

SEQ ID NO: 3568 - DNA, 375 bp, synthetic construct
  source 1..375: mol_type = other DNA
caagttcagctggtggaaagcggtggtggcgttgtgcaacctggtagaagtctgaggcttagctgcgccgccagcttttctggatacggcgtgtcaacaatgggatggtttaggcaggctccaggcaagggccttgaaggcgtggccgctatcacagtcggctccggcaatacctactacgccgatagcgtgagaggcaggttcacaatctccagagacaacagcaagaatacggtgtacctgcaaatgaacagcctccgcgccgaggatacagccatgtattactgtgccgtgggctacctgtctggcggctcttgggatgtgcccggcagatacaattactggggacagggaaccctggttaccgtgtctagt

SEQ ID NO: 3569 - DNA, 375 bp, synthetic construct
  source 1..375: mol_type = other DNA
caagttcagctggtggaaagcggtggtggcgttgtgcaacctggtagaagtctgaggcttagctgcgccgccagcttttctggatacggcgtgtcaacaatgggatggtttaggcaggctccaggcaagggccttgaaggcgtggccgtgatcacagtcggctccggcaatacctactacgccgatagcgtgagaggcaggttcacaatctccagagacaacagcaagaatacggtgtacctgcaaatgaacagcctccgcgccgaggatacagccatgtattactgtgccgtgggctacctgtctggcggctcttgggatgtgcccggcagatacaattactggggacagggaaccctggttaccgtgtctagt

SEQ ID NO: 3570 - DNA, 375 bp, synthetic construct
  source 1..375: mol_type = other DNA
caagttcagctggtggaaagcggtggtggcgttgtgcaacctggtagaagtctgaggcttagctgcgccgccagcttttctggatacggcgtgtcaacaatgggatggtttaggcaggctccaggcaagggccttgaaggcgtggccgtgatcacagtcggctccggcaatacctactacaccgatagcgtgagaggcaggttcacaatctccagagacaacagcaagaatacggtgtacctgcaaatgaacagcctccgcgccgaggatacagccatgtattactgtgccgtgggctacctgtctggcggctcttgggatgtgcccggcagatacaattactggggacagggaaccctggttaccgtgtctagt

SEQ ID NO: 3571 - DNA, 375 bp, synthetic construct
  source 1..375: mol_type = other DNA
caagttcagctggtggaaagcggtggtggcgttgtgcaacctggtggaagtctgaggcttagctgcgccgccagcttttctggatacggcgtgtcaacaatggcatggtttaggcaggctccaggcaagggccttgaaggcgtggccgctatcacagtcggctccggcaatacctactacgccgatagcgtgaagggcaggttcacaatctccagagacaacagcaagaatacggtgtacctgcaaatgaacagcctccgcgccgaggatacagccatgtattactgtgccgtgggctacctgtctggcggctcttgggatgtgcccggcagatacaattactggggacagggaaccctggttaccgtgtctagt

SEQ ID NO: 3572 - DNA, 384 bp, synthetic construct
  source 1..384: mol_type = other DNA
gaagtgcagctggttgaatctggcggaggactggttcagcctggcggatctctgagactgtcttgtgccgcctctggcttcgccagcgactactatatcatcggctggttcagacaggcccctggcaaagagagagagggcgtcagctgtatcagcagcagatacgccaacaccaactacgccgacagcgtgaagggcagattcaccatcagccgggacaacgccaagaacaccgtgtacctccagatgaacagcctgaagcctgaggacaccgccgtgtactactgtgccgccgacaccagaagatacacctgtcctgacattgccaccatgcaccggaacttcgattcttggggccagggcacactggtcaccgtttcttct

SEQ ID NO: 3573 - DNA, 384 bp, synthetic construct
  source 1..384: mol_type = other DNA
caagtgcagctggttgaatctggcggaggactggttcagcctggcggatctctgagactgtcttgtgccgcctctggcttcgccagcgactactatatcatcggctggttcagacaggcccctggcaaagggagagagggcgtcagctgtatcagcagcagatacgccaacaccaactacgccgacagcgtgaagggcagattcaccatcagcctggacaactccaagaacaccgtgtacctccagatgaacagcctgaagcctgaggacaccgccgtgtactactgtgccgccgacaccagaagatacacctgtcctgagattgccaccatgcaccggaacttcgattcttggggccagggcacactggtcaccgtttcttct

SEQ ID NO: 3574 - DNA, 384 bp, synthetic construct
  source 1..384: mol_type = other DNA
gaagtgcagctggttgaatctggcggaggactggttcagcctggcggatctctgagactgagctgtgaagccagcggcttcgccagcgacgattacatcatcggctggttcagacaggcccctggcaaagagagagagggcgtcagctgcatcagctctaagtacgccaacaccgtgtacaccgacagcgtgaagggcagattcagactgagcagaggcaccgccaagaataccgtgtacctccagatgagcgccctgaagcctgaggataccgccgtgtactactgcgctatggacagccgcagagtgacatgccctgagatcagcaccatgcaccggaacttcgattcttggggccagggcacactggtcacagtgtcatct

SEQ ID NO: 3575 - DNA, 384 bp, synthetic construct
  source 1..384: mol_type = other DNA
caagtgcagctggttgaatctggcggaggactggttcagcctggcggatctctgagactgagctgtgaagccagcggcttcgccagcgacgattacatcatcggctggttcagacaggcccctggcaaagggagagagggcgtcagctgcatcagctctaagtacgccaacaccgtgtacaccgacagcgtgcggggcagattcagactgagcagaggcaccgccaagaataccctgtacctccagatgaactccctgagggctgaggataccgccgtgtactactgcgctgccgacacccgcagagtgacatgccctgagatcagcaccatgcaccggaacttcgattcttggggccagggcacactggtcacagtgtcatct

SEQ ID NO: 3576 - DNA, 360 bp, synthetic construct
  source 1..360: mol_type = other DNA
caggttcagctgcaagagtctggcggaggactggttcaggctggcgatagcctgagactgtcttgtgccgcttctggcagagccgtgtccagcctgtttatgggctggtttcggagagcccctggcaaagagagagaactggttgccgccatcagccggtacagcctgtacacctactacgccgacagcgtgaagggcagattcaccatcagcgccgacaacgccaagaacgccgtgtacctccagatgaacagcctgaagcctgaggacacagccgtgtactactgcgccagcaaacttgagtacaccagcaacgactacgacagctggggccagggaacccaagtgacagtctcttct

SEQ ID NO: 3577 - DNA, 360 bp, synthetic construct
  source 1..360: mol_type = other DNA
gaagttcagctgcaagagtctggcggaggactggttcaacctggcggaagcctgagactgtcttgtgccgcctctggcagaaccttcagcagcctgttcatgggctggttcagacaggcccctggcaaagagagagaactggtcgccgccatcagccggtacagcctgtacacctactacgccgacagcgtgaagggcagattcaccatcagcgccgacaacgccaagaacgccgtgtacctccagatgaacagcctgaagccagaggacacagccgtgtactactgcgccagcaaacttgagtacaccagcaacgactacgacagctggggccagggaacccaagtgacagtctcttct

SEQ ID NO: 3578 - DNA, 360 bp, synthetic construct
  source 1..360: mol_type = other DNA
caagttcagctgcaagagtctggcggaggactggttcaacctggcggaagcctgagactgtcttgtgccgcctctggcagagccgtcagcagcctgttcatgggctggttcagacaggcccctggcaaagggagagaactggtcgccgccatcagcaagtacagcctgtacacctactacgccgacagcgtgaagggcagattcaccatcagcctggacaactccaagaacgccctgtacctccagatgaacagcctgcgggcagaggacacagccgtgtactactgcgccagcaaacttgagtacaccagctacgactacgacagctggggccagggaacccaagtgacagtctcttct

SEQ ID NO: 3579 - DNA, 360 bp, synthetic construct
  source 1..360: mol_type = other DNA
gaagttcagctgcaagagtctggcggaggactggttcaacctggcggaagcctgagactgtcttgtgccgcctctggcagaaccttcagcagcctgtttatgggctgggtccgacaggcccctggcaaaggactggaactggtgtctgccatcagccggtacagcctgtacacctactacgccgacagcgtgaagggcagattcaccatcagcagagacaacgccaagaacaccctgtacctccagatgaacagcctgcggcctgaggataccgccgtgtactactgcgccagcaaacttgagtacaccagcaacgactacgacagctggggccagggaacactggtcacagtctcttct

SEQ ID NO: 3580 - DNA, 360 bp, synthetic construct
  source 1..360: mol_type = other DNA
caagttcagctgcaagagtctggcggaggactggttcaagctggcgacagcctgagactgtcttgtgccgcctctggcagagccttcagcagcctgtttatgggctggttccgacgcgcccctggcaaagaacgggaactggtggctgccatcagcaagtacagcctgtacacctactacgccgacagcgtgaagggcagattcaccatcagcgccgacaacgccaagaacgccgtgtacctccagatgaacagcctgaagcctgaggataccgccgtgtactactgcgccagcaaacttgagtacaccagcaacgactacgactactggggccagggaacacaggtcacagtctcttct

SEQ ID NO: 3581 - DNA, 16 bp, synthetic construct
  source 1..16: mol_type = other DNA
gggggggggggggggg

SEQ ID NO: 3582 - DNA, 16 bp, synthetic construct
  source 1..16: mol_type = other DNA
gggggggggggggggg

SEQ ID NO: 3583 - DNA, 16 bp, synthetic construct
  source 1..16: mol_type = other DNA
gggggggggggggggg

SEQ ID NO: 3584 - DNA, 16 bp, synthetic construct
  source 1..16: mol_type = other DNA
gggggggggggggggg

SEQ ID NO: 3585 - DNA, 16 bp, synthetic construct
  source 1..16: mol_type = other DNA
gggggggggggggggg

SEQ ID NO: 3586 - DNA, 16 bp, synthetic construct
  source 1..16: mol_type = other DNA
gggggggggggggggg

SEQ ID NO: 3587 - DNA, 16 bp, synthetic construct
  source 1..16: mol_type = other DNA
gggggggggggggggg

SEQ ID NO: 3588 - DNA, 16 bp, synthetic construct
  source 1..16: mol_type = other DNA
gggggggggggggggg

SEQ ID NO: 3589 - DNA, 16 bp, synthetic construct
  source 1..16: mol_type = other DNA
gggggggggggggggg

SEQ ID NO: 3590 - DNA, 16 bp, synthetic construct
  source 1..16: mol_type = other DNA
gggggggggggggggg

SEQ ID NO: 3591 - DNA, 16 bp, synthetic construct
  source 1..16: mol_type = other DNA
gggggggggggggggg

SEQ ID NO: 3592 - DNA, 16 bp, synthetic construct
  source 1..16: mol_type = other DNA
gggggggggggggggg

SEQ ID NO: 3593 - DNA, 16 bp, synthetic construct
  source 1..16: mol_type = other DNA
gggggggggggggggg

SEQ ID NO: 3594 - DNA, 16 bp, synthetic construct
  source 1..16: mol_type = other DNA
gggggggggggggggg

SEQ ID NO: 3595 - DNA, 16 bp, synthetic construct
  source 1..16: mol_type = other DNA
gggggggggggggggg

SEQ ID NO: 3596 - DNA, 16 bp, synthetic construct
  source 1..16: mol_type = other DNA
gggggggggggggggg

SEQ ID NO: 3597 - DNA, 16 bp, synthetic construct
  source 1..16: mol_type = other DNA
gggggggggggggggg

SEQ ID NO: 3598 - DNA, 16 bp, synthetic construct
  source 1..16: mol_type = other DNA
gggggggggggggggg

SEQ ID NO: 3599 - DNA, 16 bp, synthetic construct
  source 1..16: mol_type = other DNA
gggggggggggggggg

SEQ ID NO: 3600 - DNA, 16 bp, synthetic construct
  source 1..16: mol_type = other DNA
gggggggggggggggg

SEQ ID NO: 3601 - DNA, 16 bp, synthetic construct
  source 1..16: mol_type = other DNA
gggggggggggggggg

SEQ ID NO: 3602 - DNA, 16 bp, synthetic construct
  source 1..16: mol_type = other DNA
gggggggggggggggg

SEQ ID NO: 3603 - DNA, 16 bp, synthetic construct
  source 1..16: mol_type = other DNA
gggggggggggggggg

SEQ ID NO: 3604 - DNA, 16 bp, synthetic construct
  source 1..16: mol_type = other DNA
gggggggggggggggg

SEQ ID NO: 3605 - DNA, 16 bp, synthetic construct
  source 1..16: mol_type = other DNA
gggggggggggggggg

SEQ ID NO: 3606 - DNA, 16 bp, synthetic construct
  source 1..16: mol_type = other DNA
gggggggggggggggg

SEQ ID NO: 3607 - DNA, 16 bp, synthetic construct
  source 1..16: mol_type = other DNA
gggggggggggggggg

SEQ ID NO: 3608 - DNA, 16 bp, synthetic construct
  source 1..16: mol_type = other DNA
gggggggggggggggg

SEQ ID NO: 3609 - DNA, 16 bp, synthetic construct
  source 1..16: mol_type = other DNA
gggggggggggggggg

SEQ ID NO: 3610 - DNA, 16 bp, synthetic construct
  source 1..16: mol_type = other DNA
gggggggggggggggg

SEQ ID NO: 3611 - DNA, 16 bp, synthetic construct
  source 1..16: mol_type = other DNA
gggggggggggggggg

SEQ ID NO: 3612 - DNA, 16 bp, synthetic construct
  source 1..16: mol_type = other DNA
gggggggggggggggg

SEQ ID NO: 3613 - DNA, 16 bp, synthetic construct
  source 1..16: mol_type = other DNA
gggggggggggggggg

SEQ ID NO: 3614 - DNA, 357 bp, synthetic construct
  source 1..357: mol_type = other DNA
gaagtgcagctgcttgaaagtggcggcggactgattcagcctggcggatctctgagactgagctgtgccgccagcggcttcaccttttctagctacgccatgacctgggtccgacaggcacctggaaaagggcttgaatgggtgtccgccatcagcggctctggcgattacacacactacgccgacagcgtgaagggcagattcaccatcagcagagacaacagcaagaacaccgtgtacctccagatgaacagcctgagagccgaggacagcgccgtgtattattgcgccaaggatgaggatggcggcagcctgcttggacacagaggacaaggcaccctggtcaccgtttcttcc

SEQ ID NO: 3615 - DNA, 363 bp, synthetic construct
  source 1..363: mol_type = other DNA
gaggttcagctgcttgagtctggcggaggactggttcaacctggcggaagcctgagactgtcttgtgccgccagcggcttcacctttagcagccacgccatgagctgggtccgacaggctcctggcaaaggactggaatgggtgtccagcatcagcggcagcggcgactacatctactacgccgatagcgtgaagggcagattcaccatcagccgggacatcagcaagaacaccctgtacctccagatgaacagcctgagagccgaggacaccgccgtgtactactgtgccaaagaaggcaccggcgctaacagcagcctggccgattatagaggccagggcacactggtcaccgtgtctagt

SEQ ID NO: 3616 - DNA, 354 bp, synthetic construct
  source 1..354: mol_type = other DNA
caggtgcagctggttgaatctggcggaggactggttcagcctggcggatctctgagactgtcttgtgccgccagcggcttcaccttcagctctcacgccatgagctgggtccgacaggcccctggaaaaggactggaactggtgtctagcatcagcggcaacggcagaaccacctactacgccgatagcgtgaagggcagattcaccatcagccgggacatcagcaagaacaccctggacctccagatgaacagcctgagagccgaggataccgccgtgtactactgtgccaaggatggcggagagacactggtggatagcagaggccagggcacactggtcacagtgtcatct

SEQ ID NO: 3617 - DNA, 354 bp, synthetic construct
  source 1..354: mol_type = other DNA
cagctccagctgcaagagtctggacctggcctggtcaagcctagcgagacactgagcctgacctgtaccgtgtccggcggaagcatcagcagcggcagctactactggggctggatcagacagcctcctggcaaaggactggaatggatcggccacatctactacagcggcgtgacctactacaaccccagcctgaagtccagagtgaccatcagcgtggacaccagccggaaccagttctccctgaagctgtctagcgtgacagccgccgataccgccgtgtactactgcaccagagaggacagcagcaactggcggagtagaggccagggaacactggtcacagttagctct

SEQ ID NO: 3618 - DNA, 354 bp, synthetic construct
  source 1..354: mol_type = other DNA
cagctccagctgcaagagtctggacctggcctggtcaagcctagcgagacactgagcctgacctgtaccgtgtccggcgatagcatcagcagcggcgattactactggggctggatcagacagcctcctggcaaaggactggaatggatcggccacatctactacagcggcatcacctactacaaccccagcctgaagtccagagtgaccatcagcgtggacaccagccggaaccagttctccctgaagctgtctagcgtgacagccgccgataccgccgtgtactactgcaccagagaggacagcagcaactggcggagtagaggccagggaacactggtcacagttagctct

SEQ ID NO: 3619 - DNA, 354 bp, synthetic construct
  source 1..354: mol_type = other DNA
cagctccagctgcaagagtctggacctggcctggtcaagcctagcgagacactgagcctgacctgtaccgtgtccggcgatagcatcagcagcggcgattactactggggctggatcagacagcctcctggcaaaggactggaatggatcggccacatctactacagcggcatcagctactacaaccccagcctgaagtccagagtgaccatcagcgtggacaccagccggaaccagttctccctgaagctgtctagcgtgacagccgccgataccgccgtgtactactgcaccagagaggacagcagcaactggcggagtagaggccagggaacactggtcacagttagctct

SEQ ID NO: 3620 - DNA, 354 bp, synthetic construct
  source 1..354: mol_type = other DNA
cagctccagctgcaagagtctggacctggcctggtcaagcctagcgagacactgagcctgacctgtaccgtgtccggcgatagcatcagcagcggcgattactactggggctggatcagacagcctcctggcaaaggactggaatggatcggccacatctaccacagcggcatcagctactacaaccccagcctgaagtccagagtgaccatcagcgtggacaccagccggaaccagttctccctgaagctgtctagcgtgacagccgccgataccgccgtgtactactgcaccagagaggacagcagcaactggcggagtagaggccagggaacactggtcacagttagctct

SEQ ID NO: 3621 - DNA, 354 bp, synthetic construct
  source 1..354: mol_type = other DNA
cagctccagctgcaagagtctggacctggcctggtcaagcctagcgagacactgagcctgacctgtaccgtgtccggcgatagcatcagcagcggcgattactactggggctggatcagacagcctcctggcaaaggactggaatggatcggccacatctactacaacggcatcagctactacaaccccagcctgaagtccagagtgaccatcagcgtggacaccagccggaaccagttctccctgaagctgtctagcgtgacagccgccgataccgccgtgtactactgcaccagagaggacagcagcaactggcggagtagaggccagggaacactggtcacagttagctct

SEQ ID NO: 3622 - DNA, 354 bp, synthetic construct
  source 1..354: mol_type = other DNA
cagctccagctgcaagagtctggacctggcctggtcaagcctagcgagacactgagcctgacctgtaccgtgtccggcgatagcatcagcagcggcgattactactggggctggatcagacagcctcctggcaaaggactggaatggatcggccacatctactacgctggcatcagctactacaaccccagcctgaagtccagagtgaccatcagcgtggacaccagccggaaccagttctccctgaagctgtctagcgtgacagccgccgataccgccgtgtactactgcaccagagaggacagcagcaactggcggagtagaggccagggaacactggtcacagttagctct

SEQ ID NO: 3623 - DNA, 12 bp, synthetic construct
  source 1..12: mol_type = other DNA
gggggggggggg

SEQ ID NO: 3624 - DNA, 12 bp, synthetic construct
  source 1..12: mol_type = other DNA
gggggggggggg

SEQ ID NO: 3625 - DNA, 12 bp, synthetic construct
  source 1..12: mol_type = other DNA
gggggggggggg

SEQ ID NO: 3626 - DNA, 12 bp, synthetic construct
  source 1..12: mol_type = other DNA
gggggggggggg

SEQ ID NO: 3627 - DNA, 2244 bp, synthetic construct
  source 1..2244: mol_type = other DNA
atggtggccggatctgatgctggtagagcactgggcgtgctgagcgttgtgtgtctgctgcactgcttcggcttcatcagctgcttcagccagcaaatctacggcgtggtgtacggcaacgtgaccttccacgtgccaagcaacgtgcccctgaaagaggtgctctggaagaaacagaaagacaaggtggccgagctggaaaacagcgagttcagagccttcagcagcttcaagaaccgggtgtacctggacaccgtgtctggcagcctgaccatctacaacctgaccagcagcgacgaggacgagtacgagatggaaagccccaacatcaccgatacgatgaagttcttcctgtacgtgctggaaagcctgccttctcctacactgacatgcgccctgaccaacggctctatcgaggtgcagtgcatgatccccgagcactacaatagccaccggggcctgattatgtactcctgggactgccctatggaacagtgcaagcggaacagcaccagcatctacttcaagatggaaaacgacctgccgcagaaaatccagtgtaccctgagcaaccctctgttcaacaccaccagcagcatcatcctgaccacatgcatccctagcagcggccacagcagacatagactcgagggaagcgaattcggagacatccagatgacacagagcccttctagcctgagcgccagcgtgggagacagagtgaccatcacatgtagcgccagcagcagcgtgtcctacatgaactggtatcagcagacccctggcaaggcccctaagcggtggatctacgataccagcaaactggcctccggcgtgcccagcagattttctggttctggcagcggcaccgactacaccttcacaatatccagcctccagccagaggacattgccacctactactgccagcagtggtccagcaatcccttcacattcggccagggcaccaagctccagatcaccagaacatctggcggcggaggatctggcggaggtggaagcggaggcggcggatctcaagttcagctggttcaaagtggcggaggcgttgtgcagcctggcagaagtctgagactgagctgtaaagccagcggctacacattcacccggtacaccatgcactgggtccgacaggcacctggcaaaggactggaatggatcggctacatcaaccccagccggggctacaccaactacaaccagaaagtgaaggaccgcttcaccatcagccgggacaacagcaagaacaccgcctttctccagatggactccctgcggcctgaagataccggcgtgtacttctgtgcccggtactacgacgaccactactgcctggattattggggccagggaacccctgtgacagtgtctagcgctggatcctctggtggttcaggcggtggtggctccggcggaggcggttcaggtggtggcggatctagcggattcgaagtgatccacgtgaccaaagaagtgaaagaagtcgccacactgagctgcggccacaacgtgtcagtggaagaactggcccagaccagaatctactggcagaaagaaaagaaaatggtgctgaccatgatgagcggcgacatgaatatctggcccgagtacaagaaccgcaccatcttcgacatcaccaacaacctgagcatcgtgatcctggctctgaggccatctgacgagggcacctatgagtgcgtggtgctgaagtacgagaaggacgccttcaagcgggaacacctcgccgaagtgacactgagcgtgaaggccgactttcccacacctagcatcagcgacttcgagatccccacctccaacatccggcggatcatctgttctaccagcggcggctttcctgagcctcacctgagctggcttgagaacggcgaggaactgaacgccatcaacacaaccgtgtctcaggaccccgaaaccgagctgtatgccgtgtccagcaagctggacttcaacatgaccaccaaccacagcttcatgtgcctcattaagtacggccacctgagagtgaaccagaccttcaactggaataccaccaagcaagagcacttccccgacaacctgctgcctagctgggccatcacactgatctccgtgaacggcatcttcgtgatctgctgcctgacctactgcttcgcccctagatgcagagagcggcggagaaacgagcggctgagaagagaaagcgtcagacccgtttaatctaga

SEQ ID NO: 3628 - DNA, 645 bp, synthetic construct
  source 1..645: mol_type = other DNA
atggtggccggatctgatgctggtagagcactgggcgtgctgagcgttgtgtgtctgctgcactgcttcggcttcatcagctgcttcagccagcaaatctacggcgtggtgtacggcaacgtgaccttccacgtgccaagcaacgtgcccctgaaagaggtgctctggaagaaacagaaagacaaggtggccgagctggaaaacagcgagttcagagccttcagcagcttcaagaaccgggtgtacctggacaccgtgtctggcagcctgaccatctacaacctgaccagcagcgacgaggacgagtacgagatggaaagccccaacatcaccgatacgatgaagttcttcctgtacgtgctggaaagcctgccttctcctacactgacatgcgccctgaccaacggctctatcgaggtgcagtgcatgatccccgagcactacaatagccaccggggcctgattatgtactcctgggactgccctatggaacagtgcaagcggaacagcaccagcatctacttcaagatggaaaacgacctgccgcagaaaatccagtgtaccctgagcaaccctctgttcaacaccaccagcagcatcatcctgaccacatgcatccctagcagcggccacagcagacataga

SEQ ID NO: 3629 - DNA, 762 bp, synthetic construct
  source 1..762: mol_type = other DNA
gtgatccacgtgaccaaagaagtgaaagaagtcgccacactgagctgcggccacaacgtgtcagtggaagaactggcccagaccagaatctactggcagaaagaaaagaaaatggtgctgaccatgatgagcggcgacatgaatatctggcccgagtacaagaaccgcaccatcttcgacatcaccaacaacctgagcatcgtgatcctggctctgaggccatctgacgagggcacctatgagtgcgtggtgctgaagtacgagaaggacgccttcaagcgggaacacctcgccgaagtgacactgagcgtgaaggccgactttcccacacctagcatcagcgacttcgagatccccacctccaacatccggcggatcatctgttctaccagcggcggctttcctgagcctcacctgagctggcttgagaacggcgaggaactgaacgccatcaacacaaccgtgtctcaggaccccgaaaccgagctgtatgccgtgtccagcaagctggacttcaacatgaccaccaaccacagcttcatgtgcctcattaagtacggccacctgagagtgaaccagaccttcaactggaataccaccaagcaagagcacttccccgacaacctgctgcctagctgggccatcacactgatctccgtgaacggcatcttcgtgatctgctgcctgacctactgcttcgcccctagatgcagagagcggcggagaaacgagcggctgagaagagaaagcgtcagacccgtt

SEQ ID NO: 3630 - DNA, 456 bp, synthetic construct
  source 1..456: mol_type = other DNA
atggccttaccagtgaccgccttgctcctgccgctggccttgctgctccacgccgccaggccggacgccagaagcgaggacagatacagaaaccccaagggcagcgcctgctccagaatctggcaaagccccagattcattgcccggaagaggggcttcaccgtgaagatgcactgctacatgaacagcgccagcggcaacgtttcctggctgtggaagcaagagatggacgagaaccctcagcagctgaagctggaaaagggccgcatggaagagagccagaacgagtctctggccacactgaccatccagggcatcagattcgaggacaacggcatctacttttgccagcagaagtgcaacaacaccagcgaggtgtaccaaggctgtggcaccgagctgagagtgatgggctttagcacactggcccagctgaaacagcggaacaccctgaag

SEQ ID NO: 3631 - DNA, 390 bp, synthetic construct
  source 1..390: mol_type = other DNA
gccagaagcgaggacagatacagaaaccccaagggcagcgcctgctccagaatctggcaaagccccagattcattgcccggaagaggggcttcaccgtgaagatgcactgctacatgaacagcgccagcggcaacgtttcctggctgtggaagcaagagatggacgagaaccctcagcagctgaagctggaaaagggccgcatggaagagagccagaacgagtctctggccacactgaccatccagggcatcagattcgaggacaacggcatctacttttgccagcagaagtgcaacaacaccagcgaggtgtaccaaggctgtggcaccgagctgagagtgatgggctttagcacactggcccagctgaaacagcggaacaccctgaag

SEQ ID NO: 3632 - DNA, 2910 bp, synthetic construct
  source 1..2910: mol_type = other DNA
atggccttaccagtgaccgccttgctcctgccgctggccttgctgctccacgccgccaggccggacatccagttgacccagtcccccagctcactcagcgccagtgtgggggaccgggtgaccattacctgtaaagccagtcagagtgtggactatgacggggatagcttcctgaattggtatcagcagaagcctggcaaagccccaaagctgctgatctacgctgcatctaatctggagtcaggcgtgccttccaggttctccggtagtgggtctgggaccgatttcacattgaccatttcatccctccaacccgaggatttcgctacatattactgtcagcagtccaatgaggaccctctcacctttggccagggcaccaaagttgaaattaagagactcgagacagtggccgccccatctgtattcatctttcctccatctgatgaacagcttaagtccggcactgcttctgttgtttgcctgcttaacaatttttacccgcgggaagccaaggtgcaatggaaagtggacaacgccctgcagtctggtaacagtcaggaaagcgtgactgaacaggacagcaaagactccacatactccttgagttccaccttgacgctcagtaaggcagactacgagaagcacaaggtttatgcctgtgaagtgactcaccagggcctctctagcccagtgactaagtccttcaaccgcggggagtgtaggaagcgacgggggtcaggcgccactaacttctctctgctgaaacaagccggggacgtggaggagaatccaggtcccactagtatggactggatttggcgcatccttttccttgtcggcgctgctaccggcgcgcattccttcgaagaagtccaacttgtggagtctggagggggcctggtgcagcccggcggctctctcagactgtcttgtgcggcaagcggctacaccttcacctcttactggatagaatgggtgaggcaggcacctggaaagggactggagtggattggagagattctgccaggagggggagatacaaattacaatgaaatcttcaaggggcgggccaccttttcagcggataccagcaagaatacagcttacctgcagatgaatagcctccgggcagaagataccgctgtttattattgcacgagacgggtgccaataagactggactattgggggcaagggactcttgtcaccgtcagttcaacgcgtgcctctacaaagggaccctccgtgtttcctctggctccctgtagcagaagcaccagcgaatctacagccgctctgggctgcctggtcaaggactactttcctgagcctgtgaccgtgtcctggaacagcggagcactgacatctggcgtgcacacctttccagccgtgctccaaagcagcggcctgtactctctgagcagcgtggtcacagtgcctagctctagcctgggcaccaagacctacacctgtaatgtggaccacaagcctagcaacaccaaggtggacaagcgcgtggaatctaagtacggccctccttgtcctccatgtcctgctccagagtttctcggcggaccttctgtgttcctgtttcctccaaagcctaaggacaccctgatgatctccagaacacccgaagtgacctgcgtggtggtggacgtttcacaagaggaccccgaggtgcagtttaattggtacgtggacggcgtggaagtgcacaacgccaagaccaagcctagagaggaacagttcaacagcacctacagagtggtgtccgtgctgaccgtgctgcaccaggattggctgaacggcaaagagtacaagtgcaaggtgtccaacaagggcctgcctagcagcatcgagaaaaccatcagcaaggccaagggccagccaagggaaccccaggtttacacactgcctccaagccaagaggaaatgaccaagaaccaggtgtccctgacctgccttgtgaagggcttctaccccagcgacattgccgtggaatgggagtctaacggccagcctgagaacaactacaagacaacccctcctgtgctggacagcgacggctcattcttcctgtacagcagactgaccgtggacaagagcagatggcaagagggcaacgtgttcagctgctccgtgatgcacgaagccctgcataaccactacacccagaagtctctgagcctgagtccgggtaaacgcgccaagagaagcggatctggcgtgaagcagaccctgaatttcgacctgctgaagctggctggcgacgtggaatccaacccaggcccttctagaggccatatgaccgagtacaagcccacggtgcgcctcgccacccgcgacgacgtccccagggccgtacgcaccctcgccgccgcgttcgccgactaccccgccacgcgccacaccgtcgatccggaccgccacatcgagcgggtcaccgagctgcaagaactcttcctcacgcgcgtcgggctcgacatcggcaaggtgtgggtcgcggacgacggcgccgcggtggcggtctggaccacgccggagagcgtcgaagcgggggcggtgttcgccgagatcggcccgcgcatggccgagttgagcggttcccggctggccgcgcagcaacagatggaaggcctcctggcgccgcaccggcccaaggagcccgcgtggttcctggccaccgtcggcgtctcgcccgaccaccagggcaagggtctgggcagcgccgtcgtgctccccggagtggaggcggccgagcgcgccggggtgcccgccttcctggagacctccgcgccccgcaacctccccttctacgagcggctcggcttcaccgtcaccgccgacgtcgaggtgcccgaaggaccgcgcacctggtgcatgacccgcaagcccggtgcctga

SEQ ID NO: 3633 - DNA, 2910 bp, synthetic construct
  source 1..2910: mol_type = other DNA
atggccttaccagtgaccgccttgctcctgccgctggccttgctgctccacgccgccaggccggacatccagttgacccagtcccccagctcactcagcgccagtgtgggggaccgggtgaccattacctgtaaagccagtcagagtgtggactatgagggggatagcttcctgaattggtatcagcagaagcctggcaaagccccaaagctgctgatctacgctgcatctaatctggagtcaggcgtgccttctaggttctccggtagtgggtctgggaccgatttcacattgaccatttcatccctccaacccgaggatttcgctacatattactgtcagcagtccaatgaggaccctctcacctttggccagggcaccaaagttgaaattaagagactcgagacagtggccgccccatctgtattcatctttcctccatctgatgaacagcttaagtccggcactgcttctgttgtttgcctgcttaacaatttttacccgcgggaagccaaggtgcaatggaaagtggacaacgccctgcagtctggtaacagtcaggaaagcgtgactgaacaggacagcaaagactccacatactccttgagttccaccttgacgctcagtaaggcagactacgagaagcacaaggtttatgcctgtgaagtgactcaccagggcctctctagcccagtgactaagtccttcaaccgcggggagtgtaggaagcgacgggggtcaggcgccactaacttctctctgctgaaacaagccggggacgtggaggagaatccaggtcccactagtatggactggatttggcgcatccttttccttgtcggcgctgctaccggcgcgcattccttcgaagaagtccaacttgtggagtctggagggggcctggtgcagcccggcggctctctcagactgtcttgtgcggcaagcggctacaccttcagctcttactggatagaatgggtgaggcaggcacctggaaagggactggagtggattggagagattctgccaggagggggagatacaaattacaatgaaatcttcaaggggcgggccaccttttcagcggataccagcaagaatacagcttacctgcagatgaatagcctccgggcagaagataccgctgtttattattgcacgagacgggtgccaataagactggactattgggggcaagggactcttgtcaccgtcagttcaacgcgtgcctctacaaagggaccctccgtgtttcctctggctccctgtagcagaagcaccagcgaatctacagccgctctgggctgcctggtcaaggactactttcctgagcctgtgaccgtgtcctggaacagcggagcactgacatctggcgtgcacacctttccagccgtgctccaaagcagcggcctgtactctctgagcagcgtggtcacagtgcctagctctagcctgggcaccaagacctacacctgtaatgtggaccacaagcctagcaacaccaaggtggacaagcgcgtggaatctaagtacggccctccttgtcctccatgtcctgctccagagtttctcggcggaccttctgtgttcctgtttcctccaaagcctaaggacaccctgatgatctccagaacacccgaagtgacctgcgtggtggtggacgtttcacaagaggaccccgaggtgcagtttaattggtacgtggacggcgtggaagtgcacaacgccaagaccaagcctagagaggaacagttcaacagcacctacagagtggtgtccgtgctgaccgtgctgcaccaggattggctgaacggcaaagagtacaagtgcaaggtgtccaacaagggcctgcctagcagcatcgagaaaaccatcagcaaggccaagggccagccaagggaaccccaggtttacacactgcctccaagccaagaggaaatgaccaagaaccaggtgtccctgacctgccttgtgaagggcttctaccccagcgacattgccgtggaatgggagtctaacggccagcctgagaacaactacaagacaacccctcctgtgctggacagcgacggctcattcttcctgtacagcagactgaccgtggacaagagcagatggcaagagggcaacgtgttcagctgctccgtgatgcacgaagccctgcataaccactacacccagaagtctctgagcctgagtccgggtaaacgcgccaagagaagcggatctggcgtgaagcagaccctgaatttcgacctgctgaagctggctggcgacgtggaatccaacccaggcccttctagaggccatatgaccgagtacaagcccacggtgcgcctcgccacccgcgacgacgtccccagggccgtacgcaccctcgccgccgcgttcgccgactaccccgccacgcgccacaccgtcgatccggaccgccacatcgagcgggtcaccgagctgcaagaactcttcctcacgcgcgtcgggctcgacatcggcaaggtgtgggtcgcggacgacggcgccgcggtggcggtctggaccacgccggagagcgtcgaagcgggggcggtgttcgccgagatcggcccgcgcatggccgagttgagcggttcccggctggccgcgcagcaacagatggaaggcctcctggcgccgcaccggcccaaggagcccgcgtggttcctggccaccgtcggcgtctcgcccgaccaccagggcaagggtctgggcagcgccgtcgtgctccccggagtggaggcggccgagcgcgccggggtgcccgccttcctggagacctccgcgccccgcaacctccccttctacgagcggctcggcttcaccgtcaccgccgacgtcgaggtgcccgaaggaccgcgcacctggtgcatgacccgcaagcccggtgcctga

SEQ ID NO: 3634 - DNA, 2910 bp, synthetic construct
  source 1..2910: mol_type = other DNA
atggccttaccagtgaccgccttgctcctgccgctggccttgctgctccacgccgccaggccggacgacatcgtgatgacacagagccctgatagcctggccgtgtctctgggagagagagccaccattaactgcaaggccagccagagcgtggactacgacggcgacagcttcctgaactggtatcagcagaagcccggccagcctcctaagctgctgatctacgccgccagcaatctggaaagcggcgtgccaagcagattttccggctctggcagcggcaccgatttcaccctgacaatatccagcctccagcctgaggacgtggccgtgtactactgccagcagagcaacgacgaccctctgacctttggacagggcaccaaggtggaaatcaaactcgagacagtggccgccccatctgtattcatctttcctccatctgatgaacagcttaagtccggcactgcttctgttgtttgcctgcttaacaatttttacccgcgggaagccaaggtgcaatggaaagtggacaacgccctgcagtctggtaacagtcaggaaagcgtgactgaacaggacagcaaagactccacatactccttgagttccaccttgacgctcagtaaggcagactacgagaagcacaaggtttatgcctgtgaagtgactcaccagggcctctctagcccagtgactaagtccttcaaccgcggggagtgtaggaagcgacgggggtcaggcgccactaacttctctctgctgaaacaagccggggacgtggaggagaatccaggtcccactagtatggactggatttggcgcatccttttccttgtcggcgctgctaccggcgcgcattccttcgaagaagtccaacttgtggagtctggagggggcctggtgcagcccggcggctctctcagactgtcttgtgcggcaagcggctacaccttcacctcttactggatagaatgggtgaggcaggcacctggaaagggactggagtggattggagagattctgccaggagggggagatacaaattacaatgaaatcttcaaggggcgggccaccttttcagcggataccagcaagaatacagcttacctgcagatgaatagcctccgggcagaagataccgctgtttattattgcacgagacgggtgccaataagactggactattgggggcaagggactcttgtcaccgtcagttcaacgcgtgcctctacaaagggaccctccgtgtttcctctggctccctgtagcagaagcaccagcgaatctacagccgctctgggctgcctggtcaaggactactttcctgagcctgtgaccgtgtcctggaacagcggagcactgacatctggcgtgcacacctttccagccgtgctccaaagcagcggcctgtactctctgagcagcgtggtcacagtgcctagctctagcctgggcaccaagacctacacctgtaatgtggaccacaagcctagcaacaccaaggtggacaagcgcgtggaatctaagtacggccctccttgtcctccatgtcctgctccagagtttctcggcggaccttctgtgttcctgtttcctccaaagcctaaggacaccctgatgatctccagaacacccgaagtgacctgcgtggtggtggacgtttcacaagaggaccccgaggtgcagtttaattggtacgtggacggcgtggaagtgcacaacgccaagaccaagcctagagaggaacagttcaacagcacctacagagtggtgtccgtgctgaccgtgctgcaccaggattggctgaacggcaaagagtacaagtgcaaggtgtccaacaagggcctgcctagcagcatcgagaaaaccatcagcaaggccaagggccagccaagggaaccccaggtttacacactgcctccaagccaagaggaaatgaccaagaaccaggtgtccctgacctgccttgtgaagggcttctaccccagcgacattgccgtggaatgggagtctaacggccagcctgagaacaactacaagacaacccctcctgtgctggacagcgacggctcattcttcctgtacagcagactgaccgtggacaagagcagatggcaagagggcaacgtgttcagctgctccgtgatgcacgaagccctgcataaccactacacccagaagtctctgagcctgagtccgggtaaacgcgccaagagaagcggatctggcgtgaagcagaccctgaatttcgacctgctgaagctggctggcgacgtggaatccaacccaggcccttctagaggccatatgaccgagtacaagcccacggtgcgcctcgccacccgcgacgacgtccccagggccgtacgcaccctcgccgccgcgttcgccgactaccccgccacgcgccacaccgtcgatccggaccgccacatcgagcgggtcaccgagctgcaagaactcttcctcacgcgcgtcgggctcgacatcggcaaggtgtgggtcgcggacgacggcgccgcggtggcggtctggaccacgccggagagcgtcgaagcgggggcggtgttcgccgagatcggcccgcgcatggccgagttgagcggttcccggctggccgcgcagcaacagatggaaggcctcctggcgccgcaccggcccaaggagcccgcgtggttcctggccaccgtcggcgtctcgcccgaccaccagggcaagggtctgggcagcgccgtcgtgctccccggagtggaggcggccgagcgcgccggggtgcccgccttcctggagacctccgcgccccgcaacctccccttctacgagcggctcggcttcaccgtcaccgccgacgtcgaggtgcccgaaggaccgcgcacctggtgcatgacccgcaagcccggtgcctga

SEQ ID NO: 3635 - DNA, 2898 bp, synthetic construct
  source 1..2898: mol_type = other DNA
atggccttaccagtgaccgccttgctcctgccgctggccttgctgctccacgccgccaggccggacatccagatgacacagagccctagcagcctgtctgccagcgtgggagacagagtgaccatcacatgcaagagcagccagagcctgctggactccgatggcaagacctacctgaactggtatcagcagaagcccggcaaggcccctaagctgctgatctacctggtgtccaagctggatagcggcgtgcccagcagattttctggcagcggcagcggaaccgacttcaccctgacaatatccagcctccagcctgaggacttcgccacctactactgcttccaaggcacccactttccattcaccttcggccagggcaccaaggtggaaatcaaaagactcgagacagtggccgccccatctgtattcatctttcctccatctgatgaacagcttaagtccggcactgcttctgttgtttgcctgcttaacaatttttacccgcgggaagccaaggtgcaatggaaagtggacaacgccctgcagtctggtaacagtcaggaaagcgtgactgaacaggacagcaaagactccacatactccttgagttccaccttgacgctcagtaaggcagactacgagaagcacaaggtttatgcctgtgaagtgactcaccagggcctctctagcccagtgactaagtccttcaaccgcggggagtgtaggaagcgacgggggtcaggcgccactaacttctctctgctgaaacaagccggggacgtggaggagaatccaggtcccactagtatggactggatttggcgcatccttttccttgtcggcgctgctaccggcgcgcattccttcgaagtgcagctggttgaatcaggcggaggactggttcagcctggcggatctctgagactgtcttgtgccgccagcggctacaccttcagcagctactggatgaactgggtccgacaggcccctggcaaaggactggaatgggtcggaatgatcgaccccagcgacagcgagacacactacaaccacatcttcaaggaccgcttcaccatcagcgccgacaccagcaagaataccgcctacctccagatgaactccctgagagccgaggacaccgccgtgtactactgcgccagaaacctgtatctgtggggccagggaaccctggtcacagtgtcatctacgcgtgcctctacaaagggaccctccgtgtttcctctggctccctgtagcagaagcaccagcgaatctacagccgctctgggctgcctggtcaaggactactttcctgagcctgtgaccgtgtcctggaacagcggagcactgacatctggcgtgcacacctttccagccgtgctccaaagcagcggcctgtactctctgagcagcgtggtcacagtgcctagctctagcctgggcaccaagacctacacctgtaatgtggaccacaagcctagcaacaccaaggtggacaagcgcgtggaatctaagtacggccctccttgtcctccatgtcctgctccagagtttctcggcggaccttctgtgttcctgtttcctccaaagcctaaggacaccctgatgatctccagaacacccgaagtgacctgcgtggtggtggacgtttcacaagaggaccccgaggtgcagtttaattggtacgtggacggcgtggaagtgcacaacgccaagaccaagcctagagaggaacagttcaacagcacctacagagtggtgtccgtgctgaccgtgctgcaccaggattggctgaacggcaaagagtacaagtgcaaggtgtccaacaagggcctgcctagcagcatcgagaaaaccatcagcaaggccaagggccagccaagggaaccccaggtttacacactgcctccaagccaagaggaaatgaccaagaaccaggtgtccctgacctgccttgtgaagggcttctaccccagcgacattgccgtggaatgggagtctaacggccagcctgagaacaactacaagacaacccctcctgtgctggacagcgacggctcattcttcctgtacagcagactgaccgtggacaagagcagatggcaagagggcaacgtgttcagctgctccgtgatgcacgaagccctgcataaccactacacccagaagtctctgagcctgagtccgggtaaacgcgccaagagaagcggatctggcgtgaagcagaccctgaatttcgacctgctgaagctggctggcgacgtggaatccaacccaggcccttctagaggccatatgaccgagtacaagcccacggtgcgcctcgccacccgcgacgacgtccccagggccgtacgcaccctcgccgccgcgttcgccgactaccccgccacgcgccacaccgtcgatccggaccgccacatcgagcgggtcaccgagctgcaagaactcttcctcacgcgcgtcgggctcgacatcggcaaggtgtgggtcgcggacgacggcgccgcggtggcggtctggaccacgccggagagcgtcgaagcgggggcggtgttcgccgagatcggcccgcgcatggccgagttgagcggttcccggctggccgcgcagcaacagatggaaggcctcctggcgccgcaccggcccaaggagcccgcgtggttcctggccaccgtcggcgtctcgcccgaccaccagggcaagggtctgggcagcgccgtcgtgctccccggagtggaggcggccgagcgcgccggggtgcccgccttcctggagacctccgcgccccgcaacctccccttctacgagcggctcggcttcaccgtcaccgccgacgtcgaggtgcccgaaggaccgcgcacctggtgcatgacccgcaagcccggtgcctga

SEQ ID NO: 3636 - DNA, 2898 bp, synthetic construct
  source 1..2898: mol_type = other DNA
atggccttaccagtgaccgccttgctcctgccgctggccttgctgctccacgccgccaggccggacatccagatgacacagagccctagcagcctgtctgccagcgtgggagacagagtgaccatcacatgcaagagcagccagagcctgctggactccgatggcaagacctacctgaactggtatcagcagaagcccggcaaggcccctaagctgctgatctacctggtgtccaagctggatagcggcgtgcccagcagattttctggcagcggcagcggaaccgacttcaccctgacaatatccagcctccagcctgaggacttcgccacctactactgcttccaaggcacccactttccattcaccttcggccagggcaccaaggtggaaatcaaaagactcgagacagtggccgccccatctgtattcatctttcctccatctgatgaacagcttaagtccggcactgcttctgttgtttgcctgcttaacaatttttacccgcgggaagccaaggtgcaatggaaagtggacaacgccctgcagtctggtaacagtcaggaaagcgtgactgaacaggacagcaaagactccacatactccttgagttccaccttgacgctcagtaaggcagactacgagaagcacaaggtttatgcctgtgaagtgactcaccagggcctctctagcccagtgactaagtccttcaaccgcggggagtgtaggaagcgacgggggtcaggcgccactaacttctctctgctgaaacaagccggggacgtggaggagaatccaggtcccactagtatggactggatttggcgcatccttttccttgtcggcgctgctaccggcgcgcattccttcgaagtgcagctggttgaatcaggcggaggactggttcagcctggcggatctctgagactgtcttgtgccgccagcggctacaccttcaccagctactggatgaactgggtccgacaggcccctggcaaaggactggaatgggtcggaatgatcgaccccagcgacagcgagacacactacaaccacatcttcaaggaccgcttcaccatcagcgccgacaccagcaagaataccgcctacctccagatgaactccctgagagccgaggacaccgccgtgtactactgcgccagaaacctgtatctgttcggccagggaaccctggtcacagtgtcatctacgcgtgcctctacaaagggaccctccgtgtttcctctggctccctgtagcagaagcaccagcgaatctacagccgctctgggctgcctggtcaaggactactttcctgagcctgtgaccgtgtcctggaacagcggagcactgacatctggcgtgcacacctttccagccgtgctccaaagcagcggcctgtactctctgagcagcgtggtcacagtgcctagctctagcctgggcaccaagacctacacctgtaatgtggaccacaagcctagcaacaccaaggtggacaagcgcgtggaatctaagtacggccctccttgtcctccatgtcctgctccagagtttctcggcggaccttctgtgttcctgtttcctccaaagcctaaggacaccctgatgatctccagaacacccgaagtgacctgcgtggtggtggacgtttcacaagaggaccccgaggtgcagtttaattggtacgtggacggcgtggaagtgcacaacgccaagaccaagcctagagaggaacagttcaacagcacctacagagtggtgtccgtgctgaccgtgctgcaccaggattggctgaacggcaaagagtacaagtgcaaggtgtccaacaagggcctgcctagcagcatcgagaaaaccatcagcaaggccaagggccagccaagggaaccccaggtttacacactgcctccaagccaagaggaaatgaccaagaaccaggtgtccctgacctgccttgtgaagggcttctaccccagcgacattgccgtggaatgggagtctaacggccagcctgagaacaactacaagacaacccctcctgtgctggacagcgacggctcattcttcctgtacagcagactgaccgtggacaagagcagatggcaagagggcaacgtgttcagctgctccgtgatgcacgaagccctgcataaccactacacccagaagtctctgagcctgagtccgggtaaacgcgccaagagaagcggatctggcgtgaagcagaccctgaatttcgacctgctgaagctggctggcgacgtggaatccaacccaggcccttctagaggccatatgaccgagtacaagcccacggtgcgcctcgccacccgcgacgacgtccccagggccgtacgcaccctcgccgccgcgttcgccgactaccccgccacgcgccacaccgtcgatccggaccgccacatcgagcgggtcaccgagctgcaagaactcttcctcacgcgcgtcgggctcgacatcggcaaggtgtgggtcgcggacgacggcgccgcggtggcggtctggaccacgccggagagcgtcgaagcgggggcggtgttcgccgagatcggcccgcgcatggccgagttgagcggttcccggctggccgcgcagcaacagatggaaggcctcctggcgccgcaccggcccaaggagcccgcgtggttcctggccaccgtcggcgtctcgcccgaccaccagggcaagggtctgggcagcgccgtcgtgctccccggagtggaggcggccgagcgcgccggggtgcccgccttcctggagacctccgcgccccgcaacctccccttctacgagcggctcggcttcaccgtcaccgccgacgtcgaggtgcccgaaggaccgcgcacctggtgcatgacccgcaagcccggtgcctga

SEQ ID NO: 3637 - DNA, 2898 bp, synthetic construct
  source 1..2898: mol_type = other DNA
atggccttaccagtgaccgccttgctcctgccgctggccttgctgctccacgccgccaggccggacatccagatgacacagagccctagcagcctgtctgccagcgtgggagacagagtgaccatcacatgcaagagcagccagagcctgctggactccgatggcaagacctacctgaactggtatcagcagaagcccggcaaggcccctaagctgctgatctacctggtgtccaagctggatagcggcgtgcccagcagattttctggcagcggcagcggaaccgacttcaccctgacaatatccagcctccagcctgaggacttcgccacctactactgcttccaaggcacccactttccattcaccttcggccagggcaccaaggtggaaatcaaaagactcgagacagtggccgccccatctgtattcatctttcctccatctgatgaacagcttaagtccggcactgcttctgttgtttgcctgcttaacaatttttacccgcgggaagccaaggtgcaatggaaagtggacaacgccctgcagtctggtaacagtcaggaaagcgtgactgaacaggacagcaaagactccacatactccttgagttccaccttgacgctcagtaaggcagactacgagaagcacaaggtttatgcctgtgaagtgactcaccagggcctctctagcccagtgactaagtccttcaaccgcggggagtgtaggaagcgacgggggtcaggcgccactaacttctctctgctgaaacaagccggggacgtggaggagaatccaggtcccactagtatggactggatttggcgcatccttttccttgtcggcgctgctaccggcgcgcattccttcgaagtgcagctggttgaatcaggcggaggactggttcagcctggcggatctctgagactgtcttgtgccgccagcggctacaccttcaccaactactggatgaactgggtccgacaggcccctggcaaaggactggaatgggtcggaatgatcgaccccagcgacagcgagacacactacaaccacatcttcaaggaccgcttcaccatcagcgccgacaccagcaagaataccgcctacctccagatgaactccctgagagccgaggacaccgccgtgtactactgcgccagaaacctgtatctgtggggccagggaaccctggtcacagtgtcatctacgcgtgcctctacaaagggaccctccgtgtttcctctggctccctgtagcagaagcaccagcgaatctacagccgctctgggctgcctggtcaaggactactttcctgagcctgtgaccgtgtcctggaacagcggagcactgacatctggcgtgcacacctttccagccgtgctccaaagcagcggcctgtactctctgagcagcgtggtcacagtgcctagctctagcctgggcaccaagacctacacctgtaatgtggaccacaagcctagcaacaccaaggtggacaagcgcgtggaatctaagtacggccctccttgtcctccatgtcctgctccagagtttctcggcggaccttctgtgttcctgtttcctccaaagcctaaggacaccctgatgatctccagaacacccgaagtgacctgcgtggtggtggacgtttcacaagaggaccccgaggtgcagtttaattggtacgtggacggcgtggaagtgcacaacgccaagaccaagcctagagaggaacagttcaacagcacctacagagtggtgtccgtgctgaccgtgctgcaccaggattggctgaacggcaaagagtacaagtgcaaggtgtccaacaagggcctgcctagcagcatcgagaaaaccatcagcaaggccaagggccagccaagggaaccccaggtttacacactgcctccaagccaagaggaaatgaccaagaaccaggtgtccctgacctgccttgtgaagggcttctaccccagcgacattgccgtggaatgggagtctaacggccagcctgagaacaactacaagacaacccctcctgtgctggacagcgacggctcattcttcctgtacagcagactgaccgtggacaagagcagatggcaagagggcaacgtgttcagctgctccgtgatgcacgaagccctgcataaccactacacccagaagtctctgagcctgagtccgggtaaacgcgccaagagaagcggatctggcgtgaagcagaccctgaatttcgacctgctgaagctggctggcgacgtggaatccaacccaggcccttctagaggccatatgaccgagtacaagcccacggtgcgcctcgccacccgcgacgacgtccccagggccgtacgcaccctcgccgccgcgttcgccgactaccccgccacgcgccacaccgtcgatccggaccgccacatcgagcgggtcaccgagctgcaagaactcttcctcacgcgcgtcgggctcgacatcggcaaggtgtgggtcgcggacgacggcgccgcggtggcggtctggaccacgccggagagcgtcgaagcgggggcggtgttcgccgagatcggcccgcgcatggccgagttgagcggttcccggctggccgcgcagcaacagatggaaggcctcctggcgccgcaccggcccaaggagcccgcgtggttcctggccaccgtcggcgtctcgcccgaccaccagggcaagggtctgggcagcgccgtcgtgctccccggagtggaggcggccgagcgcgccggggtgcccgccttcctggagacctccgcgccccgcaacctccccttctacgagcggctcggcttcaccgtcaccgccgacgtcgaggtgcccgaaggaccgcgcacctggtgcatgacccgcaagcccggtgcctga

SEQ ID NO: 3638 - DNA, 2895 bp, synthetic construct
  source 1..2895: mol_type = other DNA
atggccttaccagtgaccgccttgctcctgccgctggccttgctgctccacgccgccaggccggacatcgtgatgacccagacccccctgaccctgagcgtgacaatcggacagcctgccagcatctcctgcaagagcagccagagcctgctggacagcgacggcaagacctacctgaactggctgctgcagaggccaggccagagccccgagagactgatctacctggtgtccaagctggactccggcgtgcccgatagattcacaggcagcggctccggcaccgacttcaccctgaagatcagccgggtggaagccgaggacctgggcgtgtactactgttggcagggcacccacttcccttacaccttcggcggagggaccaaggtggaaatcaagctcgagacagtggccgccccatctgtattcatctttcctccatctgatgaacagcttaagtccggcactgcttctgttgtttgcctgcttaacaatttttacccgcgggaagccaaggtgcaatggaaagtggacaacgccctgcagtctggtaacagtcaggaaagcgtgactgaacaggacagcaaagactccacatactccttgagttccaccttgacgctcagtaaggcagactacgagaagcacaaggtttatgcctgtgaagtgactcaccagggcctctctagcccagtgactaagtccttcaaccgcggggagtgtaggaagcgacgggggtcaggcgccactaacttctctctgctgaaacaagccggggacgtggaggagaatccaggtcccactagtatggactggatttggcgcatccttttccttgtcggcgctgctaccggcgcgcattccttcgaagtgcagctggttgaatcaggcggaggactggttcagcctggcggatctctgagactgtcttgtgccgccagcggctacaccttcagcagctactggatgaactgggtccgacaggcccctggcaaaggactggaatgggtcggaatgatcgaccccagcgacagcgagacacactacaaccacatcttcaaggaccgcttcaccatcagcgccgacaccagcaagaataccgcctacctccagatgaactccctgagagccgaggacaccgccgtgtactactgcgccagaaacctgtatctgtggggccagggaaccctggtcacagtgtcatctacgcgtgcctctacaaagggaccctccgtgtttcctctggctccctgtagcagaagcaccagcgaatctacagccgctctgggctgcctggtcaaggactactttcctgagcctgtgaccgtgtcctggaacagcggagcactgacatctggcgtgcacacctttccagccgtgctccaaagcagcggcctgtactctctgagcagcgtggtcacagtgcctagctctagcctgggcaccaagacctacacctgtaatgtggaccacaagcctagcaacaccaaggtggacaagcgcgtggaatctaagtacggccctccttgtcctccatgtcctgctccagagtttctcggcggaccttctgtgttcctgtttcctccaaagcctaaggacaccctgatgatctccagaacacccgaagtgacctgcgtggtggtggacgtttcacaagaggaccccgaggtgcagtttaattggtacgtggacggcgtggaagtgcacaacgccaagaccaagcctagagaggaacagttcaacagcacctacagagtggtgtccgtgctgaccgtgctgcaccaggattggctgaacggcaaagagtacaagtgcaaggtgtccaacaagggcctgcctagcagcatcgagaaaaccatcagcaaggccaagggccagccaagggaaccccaggtttacacactgcctccaagccaagaggaaatgaccaagaaccaggtgtccctgacctgccttgtgaagggcttctaccccagcgacattgccgtggaatgggagtctaacggccagcctgagaacaactacaagacaacccctcctgtgctggacagcgacggctcattcttcctgtacagcagactgaccgtggacaagagcagatggcaagagggcaacgtgttcagctgctccgtgatgcacgaagccctgcataaccactacacccagaagtctctgagcctgagtccgggtaaacgcgccaagagaagcggatctggcgtgaagcagaccctgaatttcgacctgctgaagctggctggcgacgtggaatccaacccaggcccttctagaggccatatgaccgagtacaagcccacggtgcgcctcgccacccgcgacgacgtccccagggccgtacgcaccctcgccgccgcgttcgccgactaccccgccacgcgccacaccgtcgatccggaccgccacatcgagcgggtcaccgagctgcaagaactcttcctcacgcgcgtcgggctcgacatcggcaaggtgtgggtcgcggacgacggcgccgcggtggcggtctggaccacgccggagagcgtcgaagcgggggcggtgttcgccgagatcggcccgcgcatggccgagttgagcggttcccggctggccgcgcagcaacagatggaaggcctcctggcgccgcaccggcccaaggagcccgcgtggttcctggccaccgtcggcgtctcgcccgaccaccagggcaagggtctgggcagcgccgtcgtgctccccggagtggaggcggccgagcgcgccggggtgcccgccttcctggagacctccgcgccccgcaacctccccttctacgagcggctcggcttcaccgtcaccgccgacgtcgaggtgcccgaaggaccgcgcacctggtgcatgacccgcaagcccggtgcctga

SEQ ID NO: 3639 - DNA, 2895 bp, synthetic construct
  source 1..2895: mol_type = other DNA
atggccttaccagtgaccgccttgctcctgccgctggccttgctgctccacgccgccaggccggacatcgtgatgacccagacccccctgaccctgagcgtgacaatcggacagcctgccagcatctcctgcaagagcagccagagcctgctggacagcgacggcaagacctacctgaactggctgctgcagaggccaggccagagccccgagagactgatctacctggtgtccaagctggactccggcgtgcccgatagattcacaggcagcggctccggcaccgacttcaccctgaagatcagccgggtggaagccgaggacctgggcgtgtactactgttggcagggcacccacttcccttacaccttcggcggagggaccaaggtggaaatcaagctcgagacagtggccgccccatctgtattcatctttcctccatctgatgaacagcttaagtccggcactgcttctgttgtttgcctgcttaacaatttttacccgcgggaagccaaggtgcaatggaaagtggacaacgccctgcagtctggtaacagtcaggaaagcgtgactgaacaggacagcaaagactccacatactccttgagttccaccttgacgctcagtaaggcagactacgagaagcacaaggtttatgcctgtgaagtgactcaccagggcctctctagcccagtgactaagtccttcaaccgcggggagtgtaggaagcgacgggggtcaggcgccactaacttctctctgctgaaacaagccggggacgtggaggagaatccaggtcccactagtatggactggatttggcgcatccttttccttgtcggcgctgctaccggcgcgcattccttcgaagtgcagctggttgaatcaggcggaggactggttcagcctggcggatctctgagactgtcttgtgccgccagcggctacaccttcaccagctactggatgaactgggtccgacaggcccctggcaaaggactggaatgggtcggaatgatcgaccccagcgacagcgagacacactacaaccacatcttcaaggaccgcttcaccatcagcgccgacaccagcaagaataccgcctacctccagatgaactccctgagagccgaggacaccgccgtgtactactgcgccagaaacctgtatctgttcggccagggaaccctggtcacagtgtcatctacgcgtgcctctacaaagggaccctccgtgtttcctctggctccctgtagcagaagcaccagcgaatctacagccgctctgggctgcctggtcaaggactactttcctgagcctgtgaccgtgtcctggaacagcggagcactgacatctggcgtgcacacctttccagccgtgctccaaagcagcggcctgtactctctgagcagcgtggtcacagtgcctagctctagcctgggcaccaagacctacacctgtaatgtggaccacaagcctagcaacaccaaggtggacaagcgcgtggaatctaagtacggccctccttgtcctccatgtcctgctccagagtttctcggcggaccttctgtgttcctgtttcctccaaagcctaaggacaccctgatgatctccagaacacccgaagtgacctgcgtggtggtggacgtttcacaagaggaccccgaggtgcagtttaattggtacgtggacggcgtggaagtgcacaacgccaagaccaagcctagagaggaacagttcaacagcacctacagagtggtgtccgtgctgaccgtgctgcaccaggattggctgaacggcaaagagtacaagtgcaaggtgtccaacaagggcctgcctagcagcatcgagaaaaccatcagcaaggccaagggccagccaagggaaccccaggtttacacactgcctccaagccaagaggaaatgaccaagaaccaggtgtccctgacctgccttgtgaagggcttctaccccagcgacattgccgtggaatgggagtctaacggccagcctgagaacaactacaagacaacccctcctgtgctggacagcgacggctcattcttcctgtacagcagactgaccgtggacaagagcagatggcaagagggcaacgtgttcagctgctccgtgatgcacgaagccctgcataaccactacacccagaagtctctgagcctgagtccgggtaaacgcgccaagagaagcggatctggcgtgaagcagaccctgaatttcgacctgctgaagctggctggcgacgtggaatccaacccaggcccttctagaggccatatgaccgagtacaagcccacggtgcgcctcgccacccgcgacgacgtccccagggccgtacgcaccctcgccgccgcgttcgccgactaccccgccacgcgccacaccgtcgatccggaccgccacatcgagcgggtcaccgagctgcaagaactcttcctcacgcgcgtcgggctcgacatcggcaaggtgtgggtcgcggacgacggcgccgcggtggcggtctggaccacgccggagagcgtcgaagcgggggcggtgttcgccgagatcggcccgcgcatggccgagttgagcggttcccggctggccgcgcagcaacagatggaaggcctcctggcgccgcaccggcccaaggagcccgcgtggttcctggccaccgtcggcgtctcgcccgaccaccagggcaagggtctgggcagcgccgtcgtgctccccggagtggaggcggccgagcgcgccggggtgcccgccttcctggagacctccgcgccccgcaacctccccttctacgagcggctcggcttcaccgtcaccgccgacgtcgaggtgcccgaaggaccgcgcacctggtgcatgacccgcaagcccggtgcctga

SEQ ID NO: 3640 - DNA, 2895 bp, synthetic construct
  source 1..2895: mol_type = other DNA
atggccttaccagtgaccgccttgctcctgccgctggccttgctgctccacgccgccaggccggacatcgtgatgacccagacccccctgaccctgagcgtgacaatcggacagcctgccagcatctcctgcaagagcagccagagcctgctggacagcgacggcaagacctacctgaactggctgctgcagaggccaggccagagccccgagagactgatctacctggtgtccaagctggactccggcgtgcccgatagattcacaggcagcggctccggcaccgacttcaccctgaagatcagccgggtggaagccgaggacctgggcgtgtactactgttggcagggcacccacttcccttacaccttcggcggagggaccaaggtggaaatcaagctcgagacagtggccgccccatctgtattcatctttcctccatctgatgaacagcttaagtccggcactgcttctgttgtttgcctgcttaacaatttttacccgcgggaagccaaggtgcaatggaaagtggacaacgccctgcagtctggtaacagtcaggaaagcgtgactgaacaggacagcaaagactccacatactccttgagttccaccttgacgctcagtaaggcagactacgagaagcacaaggtttatgcctgtgaagtgactcaccagggcctctctagcccagtgactaagtccttcaaccgcggggagtgtaggaagcgacgggggtcaggcgccactaacttctctctgctgaaacaagccggggacgtggaggagaatccaggtcccactagtatggactggatttggcgcatccttttccttgtcggcgctgctaccggcgcgcattccttcgaagtgcagctggttgaatcaggcggaggactggttcagcctggcggatctctgagactgtcttgtgccgccagcggctacaccttcaccaactactggatgaactgggtccgacaggcccctggcaaaggactggaatgggtcggaatgatcgaccccagcgacagcgagacacactacaaccacatcttcaaggaccgcttcaccatcagcgccgacaccagcaagaataccgcctacctccagatgaactccctgagagccgaggacaccgccgtgtactactgcgccagaaacctgtatctgtggggccagggaaccctggtcacagtgtcatctacgcgtgcctctacaaagggaccctccgtgtttcctctggctccctgtagcagaagcaccagcgaatctacagccgctctgggctgcctggtcaaggactactttcctgagcctgtgaccgtgtcctggaacagcggagcactgacatctggcgtgcacacctttccagccgtgctccaaagcagcggcctgtactctctgagcagcgtggtcacagtgcctagctctagcctgggcaccaagacctacacctgtaatgtggaccacaagcctagcaacaccaaggtggacaagcgcgtggaatctaagtacggccctccttgtcctccatgtcctgctccagagtttctcggcggaccttctgtgttcctgtttcctccaaagcctaaggacaccctgatgatctccagaacacccgaagtgacctgcgtggtggtggacgtttcacaagaggaccccgaggtgcagtttaattggtacgtggacggcgtggaagtgcacaacgccaagaccaagcctagagaggaacagttcaacagcacctacagagtggtgtccgtgctgaccgtgctgcaccaggattggctgaacggcaaagagtacaagtgcaaggtgtccaacaagggcctgcctagcagcatcgagaaaaccatcagcaaggccaagggccagccaagggaaccccaggtttacacactgcctccaagccaagaggaaatgaccaagaaccaggtgtccctgacctgccttgtgaagggcttctaccccagcgacattgccgtggaatgggagtctaacggccagcctgagaacaactacaagacaacccctcctgtgctggacagcgacggctcattcttcctgtacagcagactgaccgtggacaagagcagatggcaagagggcaacgtgttcagctgctccgtgatgcacgaagccctgcataaccactacacccagaagtctctgagcctgagtccgggtaaacgcgccaagagaagcggatctggcgtgaagcagaccctgaatttcgacctgctgaagctggctggcgacgtggaatccaacccaggcccttctagaggccatatgaccgagtacaagcccacggtgcgcctcgccacccgcgacgacgtccccagggccgtacgcaccctcgccgccgcgttcgccgactaccccgccacgcgccacaccgtcgatccggaccgccacatcgagcgggtcaccgagctgcaagaactcttcctcacgcgcgtcgggctcgacatcggcaaggtgtgggtcgcggacgacggcgccgcggtggcggtctggaccacgccggagagcgtcgaagcgggggcggtgttcgccgagatcggcccgcgcatggccgagttgagcggttcccggctggccgcgcagcaacagatggaaggcctcctggcgccgcaccggcccaaggagcccgcgtggttcctggccaccgtcggcgtctcgcccgaccaccagggcaagggtctgggcagcgccgtcgtgctccccggagtggaggcggccgagcgcgccggggtgcccgccttcctggagacctccgcgccccgcaacctccccttctacgagcggctcggcttcaccgtcaccgccgacgtcgaggtgcccgaaggaccgcgcacctggtgcatgacccgcaagcccggtgcctga

SEQ ID NO: 3641 - DNA, 2916 bp, synthetic construct
  source 1..2916: mol_type = other DNA
atggccttaccagtgaccgccttgctcctgccgctggccttgctgctccacgccgccaggccggacgacttcgtgatgacccagacacctctgagcctgcctgtgacacctggcgaacctgccagcatcagctgtagaagcagccagagcatcgtgcaccacgacggcaacacctacctggaatggtatctccagaagcctggacagagccccaagctgctgatctacaaggtgtccaacagattcagcggcgtgcccgacagattttctggcagcggctctggcaccgacttcaccctgaagattagcagagtggaagccgaggacgtgggcgtgtactactgcttccaaggcagccatgttccttggacctttggcggaggcaccaaggtggaaatcaagagactcgagacagtggccgccccatctgtattcatctttcctccatctgatgaacagcttaagtccggcactgcttctgttgtttgcctgcttaacaatttttacccgcgggaagccaaggtgcaatggaaagtggacaacgccctgcagtctggtaacagtcaggaaagcgtgactgaacaggacagcaaagactccacatactccttgagttccaccttgacgctcagtaaggcagactacgagaagcacaaggtttatgcctgtgaagtgactcaccagggcctctctagcccagtgactaagtccttcaaccgcggggagtgtaggaagcgacgggggtcaggcgccactaacttctctctgctgaaacaagccggggacgtggaggagaatccaggtcccactagtatggactggatttggcgcatccttttccttgtcggcgctgctaccggcgcgcattccttcgaagaagtgcagctggtgcagtctggggccgaagtgaagaaacctggcagcagcgtgaaggtgtcctgcaaagcctctggcggcagctttagcagctacggcatcaactgggtcaagcaggcccctggacaaggactggaatggatcggcgagattttccccagaagcggcaatacctactacaacgagaagttcgagggcagagccacactgaccgccgataagagcacaagcaccgcctacatggaactgcggagcctgagaagcgaggacaccgccgtgtactattgcgccaaaggcgacctgggcgacttcgattattggggccagggcaccaccgtgaccgtttcttctacgcgtgcctctacaaagggaccctccgtgtttcctctggctccctgtagcagaagcaccagcgaatctacagccgctctgggctgcctggtcaaggactactttcctgagcctgtgaccgtgtcctggaacagcggagcactgacatctggcgtgcacacctttccagccgtgctccaaagcagcggcctgtactctctgagcagcgtggtcacagtgcctagctctagcctgggcaccaagacctacacctgtaatgtggaccacaagcctagcaacaccaaggtggacaagcgcgtggaatctaagtacggccctccttgtcctccatgtcctgctccagagtttctcggcggaccttctgtgttcctgtttcctccaaagcctaaggacaccctgatgatctccagaacacccgaagtgacctgcgtggtggtggacgtttcacaagaggaccccgaggtgcagtttaattggtacgtggacggcgtggaagtgcacaacgccaagaccaagcctagagaggaacagttcaacagcacctacagagtggtgtccgtgctgaccgtgctgcaccaggattggctgaacggcaaagagtacaagtgcaaggtgtccaacaagggcctgcctagcagcatcgagaaaaccatcagcaaggccaagggccagccaagggaaccccaggtttacacactgcctccaagccaagaggaaatgaccaagaaccaggtgtccctgacctgccttgtgaagggcttctaccccagcgacattgccgtggaatgggagtctaacggccagcctgagaacaactacaagacaacccctcctgtgctggacagcgacggctcattcttcctgtacagcagactgaccgtggacaagagcagatggcaagagggcaacgtgttcagctgctccgtgatgcacgaagccctgcataaccactacacccagaagtctctgagcctgagtccgggtaaacgcgccaagagaagcggatctggcgtgaagcagaccctgaatttcgacctgctgaagctggctggcgacgtggaatccaacccaggcccttctagaggccatatgaccgagtacaagcccacggtgcgcctcgccacccgcgacgacgtccccagggccgtacgcaccctcgccgccgcgttcgccgactaccccgccacgcgccacaccgtcgatccggaccgccacatcgagcgggtcaccgagctgcaagaactcttcctcacgcgcgtcgggctcgacatcggcaaggtgtgggtcgcggacgacggcgccgcggtggcggtctggaccacgccggagagcgtcgaagcgggggcggtgttcgccgagatcggcccgcgcatggccgagttgagcggttcccggctggccgcgcagcaacagatggaaggcctcctggcgccgcaccggcccaaggagcccgcgtggttcctggccaccgtcggcgtctcgcccgaccaccagggcaagggtctgggcagcgccgtcgtgctccccggagtggaggcggccgagcgcgccggggtgcccgccttcctggagacctccgcgccccgcaacctccccttctacgagcggctcggcttcaccgtcaccgccgacgtcgaggtgcccgaaggaccgcgcacctggtgcatgacccgcaagcccggtgcctga

SEQ ID NO: 3642 - DNA, 2919 bp, synthetic construct
  source 1..2919: mol_type = other DNA
atggccttaccagtgaccgccttgctcctgccgctggccttgctgctccacgccgccaggccggacgacgtcgtgatgacacagacacctctgagcctgcctgtgacacctggcgaacctgccagcatcagctgtagaagcagccagagcatcgtgcacagcgacggcaacacctacttcgagtggtatctccagaagcctggacagagccctcagctgctgatctacaaggtgtccaacagattcagcggcgtgcccgacagattttctggcagcggctctggcaccgacttcaccctgaagattagcagagtggaagccgaggacgtgggcgtgtactactgcttccaaggcagccatgttccttggacctttggcggaggcaccaaggtggaaatcaagagactcgagacagtggccgccccatctgtattcatctttcctccatctgatgaacagcttaagtccggcactgcttctgttgtttgcctgcttaacaatttttacccgcgggaagccaaggtgcaatggaaagtggacaacgccctgcagtctggtaacagtcaggaaagcgtgactgaacaggacagcaaagactccacatactccttgagttccaccttgacgctcagtaaggcagactacgagaagcacaaggtttatgcctgtgaagtgactcaccagggcctctctagcccagtgactaagtccttcaaccgcggggagtgtaggaagcgacgggggtcaggcgccactaacttctctctgctgaaacaagccggggacgtggaggagaatccaggtcccactagtatggactggatttggcgcatccttttccttgtcggcgctgctaccggcgcgcattccttcgaagttcagctggttcagagcggagccgaagtgaagaaacctggggcctctgtgaaggtgtcctgcaaggccagcggctacacctttaccagctacggcatcaactgggttaagcaggctccaggccagggcctcgaatggatcggcgaaatctatcccagaagcgggaacatctactacaacgagaagttcaagggcaaagccacactgaccgccgacaagagcacaagcaccgcctacatggaactgcggagcctgagatccgatgacaccgccgtgtactattgcgccagaggctccgactacgacggcgattttgcctattggggccagggcacactggtcaccgttagctctacgcgtgcctctacaaagggaccctccgtgtttcctctggctccctgtagcagaagcaccagcgaatctacagccgctctgggctgcctggtcaaggactactttcctgagcctgtgaccgtgtcctggaacagcggagcactgacatctggcgtgcacacctttccagccgtgctccaaagcagcggcctgtactctctgagcagcgtggtcacagtgcctagctctagcctgggcaccaagacctacacctgtaatgtggaccacaagcctagcaacaccaaggtggacaagcgcgtggaatctaagtacggccctccttgtcctccatgtcctgctccagagtttctcggcggaccttctgtgttcctgtttcctccaaagcctaaggacaccctgatgatctccagaacacccgaagtgacctgcgtggtggtggacgtttcacaagaggaccccgaggtgcagtttaattggtacgtggacggcgtggaagtgcacaacgccaagaccaagcctagagaggaacagttcaacagcacctacagagtggtgtccgtgctgaccgtgctgcaccaggattggctgaacggcaaagagtacaagtgcaaggtgtccaacaagggcctgcctagcagcatcgagaaaaccatcagcaaggccaagggccagccaagggaaccccaggtttacacactgcctccaagccaagaggaaatgaccaagaaccaggtgtccctgacctgccttgtgaagggcttctaccccagcgacattgccgtggaatgggagtctaacggccagcctgagaacaactacaagacaacccctcctgtgctggacagcgacggctcattcttcctgtacagcagactgaccgtggacaagagcagatggcaagagggcaacgtgttcagctgctccgtgatgcacgaagccctgcataaccactacacccagaagtctctgagcctgagtccgggtaaacgcgccaagagaagcggatctggcgtgaagcagaccctgaatttcgacctgctgaagctggctggcgacgtggaatccaacccaggcccttctagaggccatatgaccgagtacaagcccacggtgcgcctcgccacccgcgacgacgtccccagggccgtacgcaccctcgccgccgcgttcgccgactaccccgccacgcgccacaccgtcgatccggaccgccacatcgagcgggtcaccgagctgcaagaactcttcctcacgcgcgtcgggctcgacatcggcaaggtgtgggtcgcggacgacggcgccgcggtggcggtctggaccacgccggagagcgtcgaagcgggggcggtgttcgccgagatcggcccgcgcatggccgagttgagcggttcccggctggccgcgcagcaacagatggaaggcctcctggcgccgcaccggcccaaggagcccgcgtggttcctggccaccgtcggcgtctcgcccgaccaccagggcaagggtctgggcagcgccgtcgtgctccccggagtggaggcggccgagcgcgccggggtgcccgccttcctggagacctccgcgccccgcaacctccccttctacgagcggctcggcttcaccgtcaccgccgacgtcgaggtgcccgaaggaccgcgcacctggtgcatgacccgcaagcccggtgcctga

SEQ ID NO: 3643 - DNA, 2892 bp, synthetic construct
  source 1..2892: mol_type = other DNA
atggccttaccagtgaccgccttgctcctgccgctggccttgctgctccacgccgccaggccggacatcgtgctgacacagagccctccatctctggccgtgtctctgggacagagagccaccatcagctgtagagccagcgagagcgtggacagctacggcaagaccttcatgcactggcaccagcagaagccaggccagcctcctaagctgctgatctaccgggtgtccaacctggaaagcggcatccctgccagattttctggcagcggcagcagaaccgacttcaccctgaccatcaatcccgtggaagccgacgacgtggcaacctactactgccagcagagcaacgaggaccccttcacatttggcggaggcaccaagctggaaatcaagagactcgagacagtggccgccccatctgtattcatctttcctccatctgatgaacagcttaagtccggcactgcttctgttgtttgcctgcttaacaatttttacccgcgggaagccaaggtgcaatggaaagtggacaacgccctgcagtctggtaacagtcaggaaagcgtgactgaacaggacagcaaagactccacatactccttgagttccaccttgacgctcagtaaggcagactacgagaagcacaaggtttatgcctgtgaagtgactcaccagggcctctctagcccagtgactaagtccttcaaccgcggggagtgtaggaagcgacgggggtcaggcgccactaacttctctctgctgaaacaagccggggacgtggaggagaatccaggtcccactagtatggactggatttggcgcatccttttccttgtcggcgctgctaccggcgcgcattccttcgaagttcagctgcaagagtctggccctggcctggtcaagcctagccaaagcctgagcctgacctgtaccgtgaccggctacagcatcaccagcgactacgcctggaactggatcagacagttccccggcaacaaactggaatggatgggcaacatctggtacagcggctccaccacctacaatcccagcctgaagtcccggatctccatcaccagagataccagcaagaaccagttcttcctgcaactgaacagcgtgaccagcgaggacaccgccacctactattgcagccggatggatttttggggccagggcaccacactgaccgtgtcatctacgcgtgcctctacaaagggaccctccgtgtttcctctggctccctgtagcagaagcaccagcgaatctacagccgctctgggctgcctggtcaaggactactttcctgagcctgtgaccgtgtcctggaacagcggagcactgacatctggcgtgcacacctttccagccgtgctccaaagcagcggcctgtactctctgagcagcgtggtcacagtgcctagctctagcctgggcaccaagacctacacctgtaatgtggaccacaagcctagcaacaccaaggtggacaagcgcgtggaatctaagtacggccctccttgtcctccatgtcctgctccagagtttctcggcggaccttctgtgttcctgtttcctccaaagcctaaggacaccctgatgatctccagaacacccgaagtgacctgcgtggtggtggacgtttcacaagaggaccccgaggtgcagtttaattggtacgtggacggcgtggaagtgcacaacgccaagaccaagcctagagaggaacagttcaacagcacctacagagtggtgtccgtgctgaccgtgctgcaccaggattggctgaacggcaaagagtacaagtgcaaggtgtccaacaagggcctgcctagcagcatcgagaaaaccatcagcaaggccaagggccagccaagggaaccccaggtttacacactgcctccaagccaagaggaaatgaccaagaaccaggtgtccctgacctgccttgtgaagggcttctaccccagcgacattgccgtggaatgggagtctaacggccagcctgagaacaactacaagacaacccctcctgtgctggacagcgacggctcattcttcctgtacagcagactgaccgtggacaagagcagatggcaagagggcaacgtgttcagctgctccgtgatgcacgaagccctgcataaccactacacccagaagtctctgagcctgagtccgggtaaacgcgccaagagaagcggatctggcgtgaagcagaccctgaatttcgacctgctgaagctggctggcgacgtggaatccaacccaggcccttctagaggccatatgaccgagtacaagcccacggtgcgcctcgccacccgcgacgacgtccccagggccgtacgcaccctcgccgccgcgttcgccgactaccccgccacgcgccacaccgtcgatccggaccgccacatcgagcgggtcaccgagctgcaagaactcttcctcacgcgcgtcgggctcgacatcggcaaggtgtgggtcgcggacgacggcgccgcggtggcggtctggaccacgccggagagcgtcgaagcgggggcggtgttcgccgagatcggcccgcgcatggccgagttgagcggttcccggctggccgcgcagcaacagatggaaggcctcctggcgccgcaccggcccaaggagcccgcgtggttcctggccaccgtcggcgtctcgcccgaccaccagggcaagggtctgggcagcgccgtcgtgctccccggagtggaggcggccgagcgcgccggggtgcccgccttcctggagacctccgcgccccgcaacctccccttctacgagcggctcggcttcaccgtcaccgccgacgtcgaggtgcccgaaggaccgcgcacctggtgcatgacccgcaagcccggtgcctga

SEQ ID NO: 3644 - DNA, 16 bp, synthetic construct
  source 1..16: mol_type = other DNA
gggggggggggggggg

SEQ ID NO: 3645 - DNA, 16 bp, synthetic construct
  source 1..16: mol_type = other DNA
gggggggggggggggg

SEQ ID NO: 3646 - DNA, 16 bp, synthetic construct
  source 1..16: mol_type = other DNA
gggggggggggggggg

SEQ ID NO: 3647 - DNA, 16 bp, synthetic construct
  source 1..16: mol_type = other DNA
gggggggggggggggg

SEQ ID NO: 3648 - DNA, 2199 bp, synthetic construct
  source 1..2199: mol_type = other DNA
atggccttaccagtgaccgccttgctcctgccgctggccttgctgctccacgccgccaggccggacatccagttgacccagtcccccagctcactcagcgccagtgtgggggaccgggtgaccattacctgtaaagccagtcagagtgtggactatgagggggatagcttcctgaattggtatcagcagaagcctggcaaagccccaaagctgctgatctacgctgcatctaatctggagtcaggcgtgccttctaggttctccggtagtgggtctgggaccgatttcacattgaccatttcatccctccaacccgaggatttcgctacatattactgtcagcagtccaatgaggaccctctcacctttggccagggcaccaaagttgaaattaagagaggcggaggcggaagtggaggcggaggatctggcggcggaggctctgaagtccaacttgtggagtctggagggggcctggtgcagcccggcggctctctcagactgtcttgtgcggcaagcggctacaccttcagctcttactggatagaatgggtgaggcaggcacctggaaagggactggagtggattggagagattctgccaggagggggagatacaaattacaatgaaatcttcaaggggcgggccaccttttcagcggataccagcaagaatacagcttacctgcagatgaatagcctccgggcagaagataccgctgtttattattgcacgagacgggtgccaataagactggactattgggggcaagggactcttgtcaccgtcagttcaacgcgtggaggcagtggtgtcttcacactcgaagatttcgttggggactggcgacagacagccggctacaacctggaccaagtccttgaacagggaggtgtgtccagtttgtttcagaatctcggggtgtccgtaactccgatccaaaggattgtcctgagcggtgaaaatgggctgaagatcgacatccatgtcatcatcccgtatgaaggtctgagcggcgaccaaatgggccagatcgaaaaaatttttaaggtggtgtaccctgtggatgatcatcactttaaggtgatcctgcactatggcacactggtaatcgacggggttacgccgaacatgatcgactatttcggacggccgtatgaaggcatcgccgtgttcgacggcaaaaagatcactgtaacagggaccctgtggaacggcaacaaaattatcgacgagcgcctgatcaaccccgacggctccctgctgttccgagtaaccatcaacggagtgaccggctggcggctgtgcgaacgcattctggcgctcgagggaggcagctggagccaccctcagtttgaaaaagactacaaagacgatgacgataagggatcagattacaaggatgatgatgacaaggggtcagattataaagacgacgatgataaagggagcgactacaaggacgacgatgacaaggcctggtcccatccccagttcgagaaacaccatcaccaccaccatcatcacactagtggctccggcgagggcagaggaagtctactaacctgcggagatgtggaagaaaatcctggcccacatatgaccgagtacaagcccacggtgcgcctcgccacccgcgacgacgtccccagggccgtacgcaccctcgccgccgcgttcgccgactaccccgccacgcgccacaccgtcgatccggaccgccacatcgagcgggtcaccgagctgcaagaactcttcctcacgcgcgtcgggctcgacatcggcaaggtgtgggtcgcggacgacggcgccgcggtggcggtctggaccacgccggagagcgtcgaagcgggggcggtgttcgccgagatcggcccgcgcatggccgagttgagcggttcccggctggccgcgcagcaacagatggaaggcctcctggcgccgcaccggcccaaggagcccgcgtggttcctggccaccgtcggcgtctcgcccgaccaccagggcaagggtctgggcagcgccgtcgtgctccccggagtggaggcggccgagcgcgccggggtgcccgccttcctggagacctccgcgccccgcaacctccccttctacgagcggctcggcttcaccgtcaccgccgacgtcgaggtgcccgaaggaccgcgcacctggtgcatgacccgcaagcccggtgcctga

SEQ ID NO: 3649 - DNA, 2199 bp, synthetic construct
  source 1..2199: mol_type = other DNA
atggccttaccagtgaccgccttgctcctgccgctggccttgctgctccacgccgccaggccggacatccagttgacccagtcccccagctcactcagcgccagtgtgggggaccgggtgaccattacctgtaaagccagtcagagtgtggactatgacggggatagcttcctgaattggtatcagcagaagcctggcaaagccccaaagctgctgatctacgctgcatctaatctggagtcaggcgtgccttccaggttctccggtagtgggtctgggaccgatttcacattgaccatttcatccctccaacccgaggatttcgctacatattactgtcagcagtccaatgaggaccctctcacctttggccagggcaccaaagttgaaattaagagaggcggaggcggaagtggaggcggaggatctggcggcggaggctctgaagtccaacttgtggagtctggagggggcctggtgcagcccggcggctctctcagactgtcttgtgcggcaagcggctacaccttcacctcttactggatagaatgggtgaggcaggcacctggaaagggactggagtggattggagagattctgccaggagggggagatacaaattacaatgaaatcttcaaggggcgggccaccttttcagcggataccagcaagaatacagcttacctgcagatgaatagcctccgggcagaagataccgctgtttattattgcacgagacgggtgccaataagactggactattgggggcaagggactcttgtcaccgtcagttcaacgcgtggaggcagtggtgtcttcacactcgaagatttcgttggggactggcgacagacagccggctacaacctggaccaagtccttgaacagggaggtgtgtccagtttgtttcagaatctcggggtgtccgtaactccgatccaaaggattgtcctgagcggtgaaaatgggctgaagatcgacatccatgtcatcatcccgtatgaaggtctgagcggcgaccaaatgggccagatcgaaaaaatttttaaggtggtgtaccctgtggatgatcatcactttaaggtgatcctgcactatggcacactggtaatcgacggggttacgccgaacatgatcgactatttcggacggccgtatgaaggcatcgccgtgttcgacggcaaaaagatcactgtaacagggaccctgtggaacggcaacaaaattatcgacgagcgcctgatcaaccccgacggctccctgctgttccgagtaaccatcaacggagtgaccggctggcggctgtgcgaacgcattctggcgctcgagggaggcagctggagccaccctcagtttgaaaaagactacaaagacgatgacgataagggatcagattacaaggatgatgatgacaaggggtcagattataaagacgacgatgataaagggagcgactacaaggacgacgatgacaaggcctggtcccatccccagttcgagaaacaccatcaccaccaccatcatcacactagtggctccggcgagggcagaggaagtctactaacctgcggagatgtggaagaaaatcctggcccacatatgaccgagtacaagcccacggtgcgcctcgccacccgcgacgacgtccccagggccgtacgcaccctcgccgccgcgttcgccgactaccccgccacgcgccacaccgtcgatccggaccgccacatcgagcgggtcaccgagctgcaagaactcttcctcacgcgcgtcgggctcgacatcggcaaggtgtgggtcgcggacgacggcgccgcggtggcggtctggaccacgccggagagcgtcgaagcgggggcggtgttcgccgagatcggcccgcgcatggccgagttgagcggttcccggctggccgcgcagcaacagatggaaggcctcctggcgccgcaccggcccaaggagcccgcgtggttcctggccaccgtcggcgtctcgcccgaccaccagggcaagggtctgggcagcgccgtcgtgctccccggagtggaggcggccgagcgcgccggggtgcccgccttcctggagacctccgcgccccgcaacctccccttctacgagcggctcggcttcaccgtcaccgccgacgtcgaggtgcccgaaggaccgcgcacctggtgcatgacccgcaagcccggtgcctga

SEQ ID NO: 3650 - DNA, 2211 bp, synthetic construct
  source 1..2211: mol_type = other DNA
atggccttaccagtgaccgccttgctcctgccgctggccttgctgctccacgccgccaggccggacatccagatgacacagagccctagcagcctgtctgccagcgtgggagacagagtgaccatcacatgcaagagcagccagagcctgctggactccgatggcaagacctacctgaactggtatcagcagaagcccggcaaggcccctaagctgctgatctacctggtgtccaagctggatagcggcgtgcccagcagattttctggcagcggcagcggaaccgacttcaccctgacaatatccagcctccagcctgaggacttcgccacctactactgcttccaaggcacccactttccattcaccttcggccagggcaccaaggtggaaatcaaaagaggcggcggaggaagcggaggcggatctggtggcggaggatctgaagtgcagctggttgaatcaggcggaggactggttcagcctggcggatctctgagactgtcttgtgccgccagcggctacaccttcagcagctactggatgaactgggtccgacaggcccctggcaaaggactggaatgggtcggaatgatcgaccccagcgacagcgagacacactacaaccacatcttcaaggaccgcttcaccatcagcgccgacaccagcaagaataccgcctacctccagatgaactccctgagagccgaggacaccgccgtgtactactgcgccagaaacctgtatctgtggggccagggaaccctggtcacagtgtcatctacgcgtcctcgactgtgccttctaacgcgtggaggcagtggtgtcttcacactcgaagatttcgttggggactggcgacagacagccggctacaacctggaccaagtccttgaacagggaggtgtgtccagtttgtttcagaatctcggggtgtccgtaactccgatccaaaggattgtcctgagcggtgaaaatgggctgaagatcgacatccatgtcatcatcccgtatgaaggtctgagcggcgaccaaatgggccagatcgaaaaaatttttaaggtggtgtaccctgtggatgatcatcactttaaggtgatcctgcactatggcacactggtaatcgacggggttacgccgaacatgatcgactatttcggacggccgtatgaaggcatcgccgtgttcgacggcaaaaagatcactgtaacagggaccctgtggaacggcaacaaaattatcgacgagcgcctgatcaaccccgacggctccctgctgttccgagtaaccatcaacggagtgaccggctggcggctgtgcgaacgcattctggcgctcgagggaggcagctggagccaccctcagtttgaaaaagactacaaagacgatgacgataagggatcagattacaaggatgatgatgacaaggggtcagattataaagacgacgatgataaagggagcgactacaaggacgacgatgacaaggcctggtcccatccccagttcgagaaacaccatcaccaccaccatcatcacactagtggctccggcgagggcagaggaagtctactaacctgcggagatgtggaagaaaatcctggcccacatatgaccgagtacaagcccacggtgcgcctcgccacccgcgacgacgtccccagggccgtacgcaccctcgccgccgcgttcgccgactaccccgccacgcgccacaccgtcgatccggaccgccacatcgagcgggtcaccgagctgcaagaactcttcctcacgcgcgtcgggctcgacatcggcaaggtgtgggtcgcggacgacggcgccgcggtggcggtctggaccacgccggagagcgtcgaagcgggggcggtgttcgccgagatcggcccgcgcatggccgagttgagcggttcccggctggccgcgcagcaacagatggaaggcctcctggcgccgcaccggcccaaggagcccgcgtggttcctggccaccgtcggcgtctcgcccgaccaccagggcaagggtctgggcagcgccgtcgtgctccccggagtggaggcggccgagcgcgccggggtgcccgccttcctggagacctccgcgccccgcaacctccccttctacgagcggctcggcttcaccgtcaccgccgacgtcgaggtgcccgaaggaccgcgcacctggtgcatgacccgcaagcccggtgcctga

SEQ ID NO: 3651 - DNA, 1860 bp, synthetic construct
  source 1..1860: mol_type = other DNA
atggccttaccagtgaccgccttgctcctgccgctggccttgctgctccacgccgccaggccggacgccagaagcgaggacagatacagaaaccccaagggcagcgcctgctccagaatctggcaaagccccagattcattgcccggaagaggggcttcaccgtgaagatgcactgctacatgaacagcgccagcggcaacgtttcctggctgtggaagcaagagatggacgagaaccctcagcagctgaagctggaaaagggccgcatggaagagagccagaacgagtctctggccacactgaccatccagggcatcagattcgaggacaacggcatctacttttgccagcagaagtgcaacaacaccagcgaggtgtaccaaggctgtggcaccgagctgagagtgatgggctttagcacactggcccagctgaaacagcggaacaccctgaagacgcgtggaggcagtggtgtcttcacactcgaagatttcgttggggactggcgacagacagccggctacaacctggaccaagtccttgaacagggaggtgtgtccagtttgtttcagaatctcggggtgtccgtaactccgatccaaaggattgtcctgagcggtgaaaatgggctgaagatcgacatccatgtcatcatcccgtatgaaggtctgagcggcgaccaaatgggccagatcgaaaaaatttttaaggtggtgtaccctgtggatgatcatcactttaaggtgatcctgcactatggcacactggtaatcgacggggttacgccgaacatgatcgactatttcggacggccctatgaaggcatcgccgtgttcgacggcaaaaagatcactgtaacagggaccctgtggaacggcaacaaaattatcgacgagcgcctgatcaaccccgacggctccctgctgttccgagtaaccatcaacggagtgaccggctggcggctgtgcgaacgcattctggcgctcgagggaggcagctggagccaccctcagtttgaaaaagactacaaagacgatgacgataagggatcagattacaaggatgatgatgacaaggggtcagattataaagacgacgatgataaagggagcgactacaaggacgacgatgacaaggcctggtcccatccccagttcgagaaacaccatcaccaccaccatcatcacactagtggctccggcgagggcagaggaagtctactaacctgcggagatgtggaagaaaatcctggcccacatatgaccgagtacaagcccacggtgcgcctcgccacccgcgacgacgtccccagggccgtacgcaccctcgccgccgcgttcgccgactaccccgccacgcgccacaccgtcgatccggaccgccacatcgagcgggtcaccgagctgcaagaactcttcctcacgcgcgtcgggctcgacatcggcaaggtgtgggtcgcggacgacggcgccgcggtggcggtctggaccacgccggagagcgtcgaagcgggggcggtgttcgccgagatcggcccgcgcatggccgagttgagcggttcccggctggccgcgcagcaacagatggaaggcctcctggcgccgcaccggcccaaggagcccgcgtggttcctggccaccgtcggcgtctcgcccgaccaccagggcaagggtctgggcagcgccgtcgtgctccccggagtggaggcggccgagcgcgccggggtgcccgccttcctggagacctccgcgccccgcaacctccccttctacgagcggctcggcttcaccgtcaccgccgacgtcgaggtgcccgaaggaccgcgcacctggtgcatgacccgcaagcccggtgcctga

SEQ ID NO: 3652 - DNA, 16 bp, synthetic construct
  source 1..16: mol_type = other DNA
gggggggggggggggg

SEQ ID NO: 3653 - DNA, 16 bp, synthetic construct
  source 1..16: mol_type = other DNA
gggggggggggggggg

SEQ ID NO: 3654 - DNA, 16 bp, synthetic construct
  source 1..16: mol_type = other DNA
gggggggggggggggg

SEQ ID NO: 3655 - DNA, 16 bp, synthetic construct
  source 1..16: mol_type = other DNA
gggggggggggggggg

SEQ ID NO: 3656 - DNA, 16 bp, synthetic construct
  source 1..16: mol_type = other DNA
gggggggggggggggg

SEQ ID NO: 3657 - DNA, 16 bp, synthetic construct
  source 1..16: mol_type = other DNA
gggggggggggggggg

SEQ ID NO: 3658 - DNA, 16 bp, synthetic construct
  source 1..16: mol_type = other DNA
gggggggggggggggg

SEQ ID NO: 3659 - DNA, 16 bp, synthetic construct
  source 1..16: mol_type = other DNA
gggggggggggggggg

SEQ ID NO: 3660 - DNA, 1692 bp, synthetic construct
  source 1..1692: mol_type = other DNA
atgggattcacaacaaagataatcttcttatacaacctagtactggtctacgcggggtttgacgaccctcgcaaagccatagaactagtacaaaagcgatatggccgaccatgcgattgcagcggaggacaagtgtccgagcccccgtcagacagggtcagtcaagtgacttgctcaggcaagacagcttacttaatgcccgaccaaagatggaaatgtaagtcaattccaaaagacacctccccaagcgggccactccaagagtgcccctgtaattcttaccagtcctcagtacacagttcttgttatacctcataccaacaatgcagatcaggcaataagacatattatacggctactctgctaaaaacacaaactgggggcaccagtgatgtacaagtattaggatccaccaacaaacttatacaatctccctgtaatggcataaaagggcagtctatttgctggagcactacagctcctatccacgtctctgatggaggaggtccattagacaccacaagaattaaaagtgttcagagaaaactggaagaaattcataaagccctatatcctgaacttcagtatcaccctttggccatacctaaggttagagataacctcatggtcgatgcccagactttaaacattctcaatgccacttacaacttactcctaatgtccaacacgagcctagtggacgactgttggctttgtttaaaattaggtccccctactcccctcgcaatacctaacttcctattatcctacgtgactcgctcctcggataatatctcttgtttaataattcccccccttctagttcaaccgatgcagttttccaattcatcttgcctcttttccccctcctacaacagtacagaagaaatagatctaggccatgttgccttcagcaactgtacctccataaccaatgtcaccggtcccatatgcgctgtaaatggttcggtctttctctgtggcaataacatggcatacacttatctacccacgaactggacggggctttgcgtcctagcaactctcctccccgacattgacatcattcccggagatgaaccggtccccatccctgctattgatcattttatatatagacctaaacgggccatacagtttattcctttactagcagggctagggatcaccgcagccttcacaacaggagctacaggcctaggtgtctctgtgacccaatatacaaaattatctaatcagctaatttctgatgtacaaatcttatctagcaccatacaagatctgcaagatcaagtagactcattagccgaagtggttctccagaacagaagggggctagatctacttacagcagaacaaggaggaatctgtttagccctgcaagaaaaatgctgcttttatgttaacaagtcagggattgtgagagacaaaataaaaaccttacaagaagaactagaaagacgtagaaaagatctagcttccaacccactttggactgggcttcaagggctcctcccttacctcctgccctttcttggccctctacttaccctcctgctcttactcaccattgggccgtgcatttttaaccgtctaaccgcttttattaatgataagttaaacataatacacgctatggtgctaacccaacagtatcaggtgctcagaaccgatgaagaagctcaagattga

SEQ ID NO: 3661 - DNA, 1638 bp, synthetic construct
  source 1..1638: mol_type = other DNA
atgggattcacaacaaagataatcttcttatacaacctagtactggtctacgcggggtttgacgaccctcgcaaagccatagaactagtacaaaagcgatatggccgaccatgcgattgcagcggaggacaagtgtccgagcccccgtcagacagggtcagtcaagtgacttgctcaggcaagacagcttacttaatgcccgaccaaagatggaaatgtaagtcaattccaaaagacacctccccaagcgggccactccaagagtgcccctgtaattcttaccagtcctcagtacacagttcttgttatacctcataccaacaatgcagatcaggcaataagacatattatacggctactctgctaaaaacacaaactgggggcaccagtgatgtacaagtattaggatccaccaacaaacttatacaatctccctgtaatggcataaaagggcagtctatttgctggagcactacagctcctatccacgtctctgatggaggaggtccattagacaccacaagaattaaaagtgttcagagaaaactggaagaaattcataaagccctatatcctgaacttcagtatcaccctttggccatacctaaggttagagataacctcatggtcgatgcccagactttaaacattctcaatgccacttacaacttactcctaatgtccaacacgagcctagtggacgactgttggctttgtttaaaattaggtccccctactcccctcgcaatacctaacttcctattatcctacgtgactcgctcctcggataatatctcttgtttaataattcccccccttctagttcaaccgatgcagttttccaattcatcttgcctcttttccccctcctacaacagtacagaagaaatagatctaggccatgttgccttcagcaactgtacctccataaccaatgtcaccggtcccatatgcgctgtaaatggttcggtctttctctgtggcaataacatggcatacacttatctacccacgaactggacggggctttgcgtcctagcaactctcctccccgacattgacatcattcccggagatgaaccggtccccatccctgctattgatcattttatatatagacctaaacgggccatacagtttattcctttactagcagggctagggatcaccgcagccttcacaacaggagctacaggcctaggtgtctctgtgacccaatatacaaaattatctaatcagctaatttctgatgtacaaatcttatctagcaccatacaagatctgcaagatcaagtagactcattagccgaagtggttctccagaacagaagggggctagatctacttacagcagaacaaggaggaatctgtttagccctgcaagaaaaatgctgcttttatgttaacaagtcagggattgtgagagacaaaataaaaaccttacaagaagaactagaaagacgtagaaaagatctagcttccaacccactttggactgggcttcaagggctcctcccttacctcctgccctttcttggccctctacttaccctcctgctcttactcaccattgggccgtgcatttttaaccgtctaaccgcttttattaatgataagttaaacataatacacgctatg

SEQ ID NO: 3662 - DNA, 1689 bp, synthetic construct
  source 1..1689: mol_type = other DNA
atgggattcacaacaaagataatcttcttatacaacctagtactggtctacgcggggtttgacgaccctcgcaaagccatagaactagtacaaaagcgatatggccgaccatgcgattgcagcggaggacaagtgtccgagcccccgtcagacagggtcagtcaagtgacttgctcaggcaagacagcttacttaatgcccgaccaaagatggaaatgtaagtcaattccaaaagacacctccccaagcgggccactccaagagtgcccctgtaattcttaccagtcctcagtacacagttcttgttatacctcataccaacaatgcagatcaggcaataagacatattatacggctactctgctaaaaacacaaactgggggcaccagtgatgtacaagtattaggctccaccaacaaacttatacaatctccctgtaatggcataaaagggcagtctatttgctggagcactacagctcctatccacgtctctgatggaggaggtccattagacaccacaagaattaaaagtgttcagagaaaactggaagaaattcataaagccctatatcctgaacttcagtatcaccctttggccatacctaaggttagagataacctcatggtcgatgcccagactttaaacattctcaatgccacttacaacttactcctaatgtccaacacgagcctagtggacgactgttggctttgtttaaaattaggtccccctactcccctcgcaatacctaacttcctattatcctacgtgactcgctcctcggataatatctcttgtttaataattcccccccttctagttcaaccgatgcagttttccaattcatcttgcctcttttccccctcctacaacagtacagaagaaatagatctaggccatgttgccttcagcaactgtacctccataaccaatgtcaccggtcccatatgcgctgtaaatggttcggtctttctctgtggcaataacatggcatacacttatctacccacgaactggacggggctttgcgtcctagcaactctcctccccgacattgacatcattcccggagatgaaccggtccccatccctgctattgatcattttatatatagacctaaacgggccatacagtttattcctttactagcagggctagggatcaccgcagccttcacaacaggagctacaggcctaggtgtctctgtgacccaatatacaaaattatctaatcagctaatttctgatgtacaaatcttatctagcaccatacaagatctgcaagatcaagtagactcattagccgaagtggttctccagaacagaagggggctagatctacttacagcagaacaaggaggaatctgtttagccctgcaagaaaaatgctgcttttatgttaacaagtcagggattgtgagagacaaaataaaaaccttacaagaagaactagaaagacgtagaaaagatctagcttccaacccactttggactgggcttcaagggctcctcccttacctcctgccctttcttggccctctacttaccctcctgctcttactcaccattgggccgtgcatttttaaccgtctagtccagttcgttaaggatagaatatctgtcgtccaagcacttgtcctgacgcagcagtaccatcaattgaagccgttggagtacgagccatga

SEQ ID NO: 3663 - DNA, 1692 bp, synthetic construct
  source 1..1692: mol_type = other DNA
atgggattcacaacaaagataatcttcttatacaacctagtactggtctacgcggggtttgacgaccctcgcaaagccatagaactagtacaaaagcgatatggccgaccatgcgattgcagcggaggacaagtgtccgagcccccgtcagacagggtcagtcaagtgacttgctcaggcaagacagcttacttaatgcccgaccaaagatggaaatgtaagtcaattccaaaagacacctccccaagcgggccactccaagagtgcccctgtaattcttaccagtcctcagtacacagttcttgttatacctcataccaacaatgcagatcaggcaataagacatattatacggctactctgctaaaaacacaaactgggggcaccagtgatgtacaagtattaggctccaccaacaaacttatacaatctccctgtaatggcataaaagggcagtctatttgctggagcactacagctcctatccacgtctctgatggaggaggtccattagacaccacaagaattaaaagtgttcagagaaaactggaagaaattcataaagccctatatcctgaacttcagtatcaccctttggccatacctaaggttagagataacctcatggtcgatgcccagactttaaacattctcaatgccacttacaacttactcctaatgtccaacacgagcctagtggacgactgttggctttgtttaaaattaggtccccctactcccctcgcaatacctaacttcctattatcctacgtgactcgctcctcggataatatctcttgtttaataattcccccccttctagttcaaccgatgcagttttccaattcatcttgcctcttttccccctcctacaacagtacagaagaaatagatctaggccatgttgccttcagcaactgtacctccataaccaatgtcaccggtcccatatgcgctgtaaatggttcggtctttctctgtggcaataacatggcatacacttatctacccacgaactggacggggctttgcgtcctagcaactctcctccccgacattgacatcattcccggagatgaaccggtccccatccctgctattgatcattttatatatagacctaaacgggccatacagtttattcctttactagcagggctagggatcaccgcagccttcacaacaggagctacaggcctaggtgtctctgtgacccaatatacaaaattatctaatcagctaatttctgatgtacaaatcttatctagcaccatacaagatctgcaagatcaagtagactcattagccgaagtggttctccagaacagaagggggctagatctacttacagcagaacaaggaggaatctgtttagccctgcaagaaaaatgctgcttttatgttaacaagtcagggattgtgagagacaaaataaaaaccttacaagaagaactagaaagacgtagaaaagatctagcttccaacccactttggactgggcttcaagggctcctcccttacctcctgccctttcttggccctctacttaccctcctgctcttactcaccattgggccgtgcatttttaaccgtctaaccgcttttattaatgataagttaaacataatacacgctatggtgctaacccaacagtatcaggtgctcagaaccgatgaagaagctcaagattga

SEQ ID NO: 3664 - DNA, 1692 bp, synthetic construct
  source 1..1692: mol_type = other DNA
atgggctttacgaccaagatcatcttcctgtacaacctggtgctggtgtacgccggcttcgacgatcctagaaaggccatcgagctggtgcagaagagatacggcagaccctgcgattgctctggcggccaagtttctgagcctcctagcgacagagtgtcccaagtgacctgtagcggcaagaccgcctacctgatgcctgaccagagatggaagtgcaagagcatccccaaggacacaagccctagcggccctctgcaagagtgcccctgtaatagctaccagagcagcgtgcacagctcctgctacacaagctaccagcagtgcagaagcggcaacaagacctactacaccgccacactgctgaaaacccagaccggcggcacatccgatgttcaggtgctgggcagcaccaacaagctgattcagagcccctgcaacggcatcaagggccagagcatctgctggtccacaacagcccctatccacgtgtcagatggcggcggacctctggacaccaccagaatcaagagcgtgcagcggaagctggaagagatccacaaggctctgtaccccgaactccagtatcaccctctggctatccccaaagtgcgggacaacctgatggtggacgcccagacactgaatatcctgaacgccacctacaatctgctgctgatgagcaacaccagcctggtggacgattgctggctgtgcctgaaactgggacctcctacacctctggcaattcccaacttcctgctgagctacgtgaccagaagcagcgacaacatcagctgcctgattatcccacctctgctcgtgcagcccatgcagttcagcaactcctcctgcctgttcagccccagctacaacagcaccgaggaaatcgacctgggacacgtggccttctccaactgcacctccatcaccaacgtgacaggccctatctgcgccgtgaatggcagcgtgttcctgtgtggcaacaacatggcctacacctacctgcctaccaactggaccggactgtgcgtgctggctacactgctgcctgacatcgacatcatccctggcgacgagcccgtgcctattcctgccatcgaccacttcatctacagacccaagcgggctatccagttcatcccactgctggccggactgggaatcaccgccgcttttacaacaggcgctacaggactgggcgtgtccgtgacacagtacaccaagctgagcaaccagctgatctccgacgtgcagatcctgagcagcaccatccaggacctccaggatcaggtggactctctggccgaagtggtgctccagaacagaagaggactggacctgctgacagccgagcaaggcggaatttgtctggccctgcaagagaagtgctgcttctacgtgaacaagagcggcatcgtgcgcgacaagatcaagacactgcaagaggaactggaacggcggagaaaggacctggcctccaatcctctgtggaccggcctgcaaggactgctcccttacctgctgcctttcctgggaccactgctgactctgctgctcctgctgaccatcggaccctgcatcttcaacagactgaccgccttcatcaacgacaagctgaacatcatccacgctatggtgctgacacagcagtaccaggtgctgcggacagatgaggaagcccaggattga

SEQ ID NO: 3665 - DNA, 1617 bp, synthetic construct
  source 1..1617: mol_type = other DNA
atggccctcccttatcatatttttctctttactgttcttttaccctctttcactctcactgcaccccctccatgccgctgtatgaccagtagctccccttaccaagagtttctatggagaatgcagcgtcccggaaatattgatgccccatcgtataggagtctttctaagggaacccccaccttcactgcccacacccatatgccccgcaactgctatcactctgccactctttgcatgcatgcaaatactcattattggacaggaaaaatgattaatcctagttgtcctggaggacttggagtcactgtctgttggacttacttcacccaaactggtatgtctgatgggggtggagttcaagatcaggcaagagaaaaacatgtaaaagaagtaatctcccaactcacccgggtacatggcacctctagcccctacaaaggactagatctctcaaaactacatgaaaccctccgtacccatactcgcctggtaagcctatttaataccaccctcactgggctccatgaggtctcggcccaaaaccctactaactgttggatatgcctccccctgaacttcaggccatatgtttcaatccctgtacctgaacaatggaacaacttcagcacagaaataaacaccacttccgttttagtaggacctcttgtttccaatctggaaataacccatacctcaaacctcacctgtgtaaaatttagcaatactacatacacaaccaactcccaatgcatcaggtgggtaactcctcccacacaaatagtctgcctaccctcaggaatattttttgtctgtggaacctcagcctatcgttgtttgaatggctcttcagaatctatgtgcttcctctcattcttagtgccccctatgaccatctacactgaacaagatttatacagttatgtcatatctaagccccgcaacaaaagagtacccattcttccttttgttataggagcaggagtgctaggtgcactaggtactggcattggcggtatcacaacctctactcagttctactacaaactatctcaagaactaaatggggacatggaacgggtcgccgactccctggtcaccttgcaagatcaacttaactccctagcagcagtagtccttcaaaatcgaagagctttagacttgctaaccgctgaaagagggggaacctgtttatttttaggggaagaatgctgttattatgttaatcaatccggaatcgtcactgagaaagttaaagaaattcgagatcgaatacaacgtagagcagaggagctccgaaacactggaccctggggcctcctcagccaatggatgccctggattctccccttcttaggacctctagcagctataatattgctactcctctttggaccctgtatctttaacctccttgttaactttgtctcttccagaatcgaagctgtaaaactacaaatggagcccaagatgcagtccaagactaagatctaccgcagacccctggaccggcctgccagcccacgatctgatgttaatgacatcaaaggcacccctcctgaggaaatctcagctgcacaacctctactacgccccaattcagcaggaagcagttag

SEQ ID NO: 3666 - DNA, 1617 bp, synthetic construct
  source 1..1617: mol_type = other DNA
atgggactgctgctgctggtgctgatcctgacaccttctctggccgcctacagacaccctgacttcccactgctggaaaaggcccagcagctcctgcaaagcacaggcagcccctacagcaccaactgctggctgtgtaccagctccagcacagagacacccggcacagcctatcctgcctctccaagagagtggacctctatcgaggccgagctgcacatcagctacagatgggaccccaacctgaagggcctgatgaggccagccaatagcctgctgagcaccgtgaagcaggacttccccgacatcagacagaagcctccaatcttcggccccatcttcaccaacatcaacctgatgggaatcgcccctatctgcgtgatggctaagcggaagaacggcaccaacgtgggcacactgcctagcaccgtgtgcaacgtgaccttcaccgtggacagcaaccagcagacctaccagacatacacccacaaccagttccggcaccagcctcggtttcccaagcctcctaacatcacctttccacagggcaccctgctggacaagagcagcagattctgtcagggcagaccctccagctgctctacccggaacttctggttcagacccgccgactacaaccagtgcctccagatcagcaacctgagcagcacagccgaatgggtgctgctggaccagaccagaaacagcctgttctgggagaacaagaccaagggcgctaaccagagccagacaccttgtgtgcaggttctggccggcatgacaatcgccacaagctacctgggcatcagcgccgtgtctgagttcttcggcacaagcctgacaccactgttccacttccacatcagcacatgcctgaaaacccagggcgctttctacatctgcggccagtccatccaccagtgtctgccatctaactggaccggcacctgtaccatcggctacgtgacccctgacatctttatcgcccctggcaacctgtctctgcccattcctatctacggcaacagccctctgcctagagtgcggagagccatccacttcattcctctgctggccggcctgggaatcctggctggaacaggcactggaatcgccggcattacaaaggccagcctgacctacagccagctgagcaaagagatcgccaacaacatcgacacaatggctaaggccctgaccaccatgcaagagcagatcgactctctggctgccgtggtgctccagaatagacgcggactggacatgctgacagccgctcaaggcggaatttgtctggccctggatgagaagtgctgcttctgggtcaaccagagcggcaaggtgcaggacaacatccggcagctgctgaatcaggccagcagcctgagagagagagccacacaaggctggctgaactgggaaggtacctggaagtggttcagctgggtgctccctctgaccggacctctggtttctctgctcctcctgctgctgttcggcccctgtctgctgaacctgattacccagtttgtgtccagccggctccaggccatcaagctccagaccaatttgagcgccggcagacaccccagaaacatccaagagtccccattctga

SEQ ID NO: 3667 - DNA, 1620 bp, synthetic construct
  source 1..1620: mol_type = other DNA
atggagacagacacactcctgctatgggtactgctgctctgggttccaggttccactggtgacgcaccccctccatgccgctgtatgacaagcagcagcccctaccaagagttcctgtggcgaatgcagaggcccggcaacattgacgcccctagctacagaagcctgagcaagggcacccctaccttcacagcccacacacacatgccccggaactgctaccatagcgccacactgtgtatgcacgccaacacacactactggaccggcaagatgattaaccctagctgccctggcggcctgggcgtgacagtttgttggacctactttacccagaccggcatgtccgatggtggcggagttcaagaccaggccagagaaaagcacgtgaaagaagtgatctcccagctgaccagagtgcacggcacaagcagcccttacaaaggactggacctgtccaagctgcacgagacactgagaacccacacacggctggtgtccctgttcaacaccacactgaccggactgcacgaggtgtccgctcagaatcctaccaactgctggatctgcctgcctctgaacttcagaccctacgtgtcaatccccgtgcctgagcagtggaacaacttcagcaccgagatcaataccaccagcgtgctcgtgggacccctggtgtccaatctggaaatcacccacaccagcaacctgacctgcgtgaagttctccaacaccacctacaccaccaacagccagtgcatcagatgggtcacccctccaacacagatcgtgtgtctgcccagcggcatcttcttcgtgtgtggcacaagcgcctaccgctgcctgaatggcagcagcgagtctatgtgcttcctgagcttcctggtgcctcctatgaccatctacaccgagcaggacctgtacagctacgtgatctccaagcctcggaacaagcgggtgcccatcctgccttttgtgattggagctggcgtgctgggagccctcggaactggaatcggaggcatcaccacctctactcagttctactacaaactatctcaagaactaaatggggacatggaaagagtggccgacagcctggtcacactccaggaccagctcaattctctggctgccgtggtgctccagaatcggagagcactcgatctgctgacagccgagagaggcggcacctgtctgtttctgggcgaagagtgctgctactacgtgaaccagtccggaatcgtcactgagaaagttaaagaaattcgagatcgaatccagcggagagccgaggaactgagaaacacaggaccttggggcctgctgagccagtggatgccttggattctgcccttcctgggacctctggccgccatcattctgctgctgctgttcggcccctgtatctttaacctccttgttaactttgtctcttccagaatcgaagctgtaaaactacaaatggagcccaagatgcagtccaagactaagatctaccgcagacccctggaccggcctgccagcccacgatctgatgttaatgacatcaaaggcacccctcctgaggaaatctcagctgcacaacctctactacgccccaattcagcaggaagcagttga

SEQ ID NO: 3668 - DNA, 1686 bp, synthetic construct
  source 1..1686: mol_type = other DNA
atgggattcacaacaaagataatcttcttatacaacctagtactggtctacgcggggtttgacgaccctcgcaaagccatagaactagtacaaaagcgatatggccgaccatgcgattgcagcggaggacaagtgtccgagcccccgtcagacagggtcagtcaagtgacttgctcaggcaagacagcttacttaatgcccgaccaaagatggaaatgtaagtcaattccaaaagacacctccccaagcgggccactccaagagtgcccctgtaattcttaccagtcctcagtacacagttcttgttatacctcataccaacaatgcagatcaggcaataagacatattatacggctactctgctaaaaacacaaactgggggcaccagtgatgtacaagtattaggatccaccaacaaacttatacaatctccctgtaatggcataaaagggcagtctatttgctggagcactacagctcctatccacgtctctgatggaggaggtccattagacaccacaagaattaaaagtgttcagagaaaactggaagaaattcataaagccctatatcctgaacttcagtatcaccctttggccatacctaaggttagagataacctcatggtcgatgcccagactttaaacattctcaatgccacttacaacttactcctaatgtccaacacgagcctagtggacgactgttggctttgtttaaaattaggtccccctactcccctcgcaatacctaacttcctattatcctacgtgactcgctcctcggataatatctcttgtttaataattcccccccttctagttcaaccgatgcagttttccaattcatcttgcctcttttccccctcctacaacagtacagaagaaatagatctaggccatgttgccttcagcaactgtacctccataaccaatgtcaccggtcccatatgcgctgtaaatggttcggtctttctctgtggcaataacatggcatacacttatctacccacgaactggacggggctttgcgtcctagcaactctcctccccgacattgacatcattcccggagatgaaccggtccccatccctgctattgatcattttatatatagacctaaacgggccatacagtttattcctttactagcagggctagggatcaccgcagccttcacaacaggagctacaggcctaggtgtctctgtgacccaatatacaaaattatctaatcagctaatttctgatgtacaaatcttatctagcaccatacaagatctgcaagatcaagtagactcattagccgaagtggttctccagaacagaagggggctagatctacttacagcagaacaaggaggaatctgtttagccctgcaagaaaaatgctgcttttatgttaacaagtcagggattgtgagagacaaaataaaaaccttacaagaagaactagaaagacgtagaaaagatctagcttccaacccactttggactgggcttcaagggctcctcccttacctcctgccctttcttggccctctacttaccctcctgctcttactcaccattgggccgtgcatttttaaccgtctagtccagttcgttaaggatagaatatctgtcgtccaagcacttgtcctgacgcagcagtaccatcaattgaagccgttggagtacgagcca

SEQ ID NO: 3669 - DNA, 90 bp, synthetic construct
  source 1..90: mol_type = other DNA
gtccagttcgttaaggatagaatatctgtcgtccaagcacttgtcctgacgcagcagtaccatcaattgaagccgttggagtacgagcca

SEQ ID NO: 3670 - DNA, 54 bp, synthetic construct
  source 1..54: mol_type = other DNA
atgggctttacgaccaagatcatcttcctgtacaacctggtgctggtgtacgcc

SEQ ID NO: 3671 - DNA, 1635 bp, synthetic construct
  source 1..1635: mol_type = other DNA
ggcttcgacgatcctagaaaggccatcgagctggtgcagaagagatacggcagaccctgcgattgctctggcggccaagtttctgagcctcctagcgacagagtgtcccaagtgacctgtagcggcaagaccgcctacctgatgcctgaccagagatggaagtgcaagagcatccccaaggacacaagccctagcggccctctgcaagagtgcccctgtaatagctaccagagcagcgtgcacagctcctgctacacaagctaccagcagtgcagaagcggcaacaagacctactacaccgccacactgctgaaaacccagaccggcggcacatccgatgttcaggtgctgggcagcaccaacaagctgattcagagcccctgcaacggcatcaagggccagagcatctgctggtccacaacagcccctatccacgtgtcagatggcggcggacctctggacaccaccagaatcaagagcgtgcagcggaagctggaagagatccacaaggctctgtaccccgaactccagtatcaccctctggctatccccaaagtgcgggacaacctgatggtggacgcccagacactgaatatcctgaacgccacctacaatctgctgctgatgagcaacaccagcctggtggacgattgctggctgtgcctgaaactgggacctcctacacctctggcaattcccaacttcctgctgagctacgtgaccagaagcagcgacaacatcagctgcctgattatcccacctctgctcgtgcagcccatgcagttcagcaactcctcctgcctgttcagccccagctacaacagcaccgaggaaatcgacctgggacacgtggccttctccaactgcacctccatcaccaacgtgacaggccctatctgcgccgtgaatggcagcgtgttcctgtgtggcaacaacatggcctacacctacctgcctaccaactggaccggactgtgcgtgctggctacactgctgcctgacatcgacatcatccctggcgacgagcccgtgcctattcctgccatcgaccacttcatctacagacccaagcgggctatccagttcatcccactgctggccggactgggaatcaccgccgcttttacaacaggcgctacaggactgggcgtgtccgtgacacagtacaccaagctgagcaaccagctgatctccgacgtgcagatcctgagcagcaccatccaggacctccaggatcaggtggactctctggccgaagtggtgctccagaacagaagaggactggacctgctgacagccgagcaaggcggaatttgtctggccctgcaagagaagtgctgcttctacgtgaacaagagcggcatcgtgcgcgacaagatcaagacactgcaagaggaactggaacggcggagaaaggacctggcctccaatcctctgtggaccggcctgcaaggactgctcccttacctgctgcctttcctgggaccactgctgactctgctgctcctgctgaccatcggaccctgcatcttcaacagactgaccgccttcatcaacgacaagctgaacatcatccacgctatggtgctgacacagcagtaccaggtgctgcggacagatgaggaagcccaggat

SEQ ID NO: 3672 - DNA, 1455 bp, synthetic construct
  source 1..1455: mol_type = other DNA
ggcttcgacgatcctagaaaggccatcgagctggtgcagaagagatacggcagaccctgcgattgctctggcggccaagtttctgagcctcctagcgacagagtgtcccaagtgacctgtagcggcaagaccgcctacctgatgcctgaccagagatggaagtgcaagagcatccccaaggacacaagccctagcggccctctgcaagagtgcccctgtaatagctaccagagcagcgtgcacagctcctgctacacaagctaccagcagtgcagaagcggcaacaagacctactacaccgccacactgctgaaaacccagaccggcggcacatccgatgttcaggtgctgggcagcaccaacaagctgattcagagcccctgcaacggcatcaagggccagagcatctgctggtccacaacagcccctatccacgtgtcagatggcggcggacctctggacaccaccagaatcaagagcgtgcagcggaagctggaagagatccacaaggctctgtaccccgaactccagtatcaccctctggctatccccaaagtgcgggacaacctgatggtggacgcccagacactgaatatcctgaacgccacctacaatctgctgctgatgagcaacaccagcctggtggacgattgctggctgtgcctgaaactgggacctcctacacctctggcaattcccaacttcctgctgagctacgtgaccagaagcagcgacaacatcagctgcctgattatcccacctctgctcgtgcagcccatgcagttcagcaactcctcctgcctgttcagccccagctacaacagcaccgaggaaatcgacctgggacacgtggccttctccaactgcacctccatcaccaacgtgacaggccctatctgcgccgtgaatggcagcgtgttcctgtgtggcaacaacatggcctacacctacctgcctaccaactggaccggactgtgcgtgctggctacactgctgcctgacatcgacatcatccctggcgacgagcccgtgcctattcctgccatcgaccacttcatctacagacccaagcgggctatccagttcatcccactgctggccggactgggaatcaccgccgcttttacaacaggcgctacaggactgggcgtgtccgtgacacagtacaccaagctgagcaaccagctgatctccgacgtgcagatcctgagcagcaccatccaggacctccaggatcaggtggactctctggccgaagtggtgctccagaacagaagaggactggacctgctgacagccgagcaaggcggaatttgtctggccctgcaagagaagtgctgcttctacgtgaacaagagcggcatcgtgcgcgacaagatcaagacactgcaagaggaactggaacggcggagaaaggacctggcctccaatcctctgtggaccggcctgcaagga

SEQ ID NO: 3673 - DNA, 63 bp, synthetic construct
  source 1..63: mol_type = other DNA
ctgctcccttacctgctgcctttcctgggaccactgctgactctgctgctcctgctgaccatc

SEQ ID NO: 3674 - DNA, 117 bp, synthetic construct
  source 1..117: mol_type = other DNA
ggaccctgcatcttcaacagactgaccgccttcatcaacgacaagctgaacatcatccacgctatggtgctgacacagcagtaccaggtgctgcggacagatgaggaagcccaggat

SEQ ID NO: 3675 - DNA, 1572 bp, synthetic construct
  source 1..1572: mol_type = other DNA
atgggctttacgaccaagatcatcttcctgtacaacctggtgctggtgtacgccggcttcgacgatcctagaaaggccatcgagctggtgcagaagagatacggcagaccctgcgattgctctggcggccaagtttctgagcctcctagcgacagagtgtcccaagtgacctgtagcggcaagaccgcctacctgatgcctgaccagagatggaagtgcaagagcatccccaaggacacaagccctagcggccctctgcaagagtgcccctgtaatagctaccagagcagcgtgcacagctcctgctacacaagctaccagcagtgcagaagcggcaacaagacctactacaccgccacactgctgaaaacccagaccggcggcacatccgatgttcaggtgctgggcagcaccaacaagctgattcagagcccctgcaacggcatcaagggccagagcatctgctggtccacaacagcccctatccacgtgtcagatggcggcggacctctggacaccaccagaatcaagagcgtgcagcggaagctggaagagatccacaaggctctgtaccccgaactccagtatcaccctctggctatccccaaagtgcgggacaacctgatggtggacgcccagacactgaatatcctgaacgccacctacaatctgctgctgatgagcaacaccagcctggtggacgattgctggctgtgcctgaaactgggacctcctacacctctggcaattcccaacttcctgctgagctacgtgaccagaagcagcgacaacatcagctgcctgattatcccacctctgctcgtgcagcccatgcagttcagcaactcctcctgcctgttcagccccagctacaacagcaccgaggaaatcgacctgggacacgtggccttctccaactgcacctccatcaccaacgtgacaggccctatctgcgccgtgaatggcagcgtgttcctgtgtggcaacaacatggcctacacctacctgcctaccaactggaccggactgtgcgtgctggctacactgctgcctgacatcgacatcatccctggcgacgagcccgtgcctattcctgccatcgaccacttcatctacagacccaagcgggctatccagttcatcccactgctggccggactgggaatcaccgccgcttttacaacaggcgctacaggactgggcgtgtccgtgacacagtacaccaagctgagcaaccagctgatctccgacgtgcagatcctgagcagcaccatccaggacctccaggatcaggtggactctctggccgaagtggtgctccagaacagaagaggactggacctgctgacagccgagcaaggcggaatttgtctggccctgcaagagaagtgctgcttctacgtgaacaagagcggcatcgtgcgcgacaagatcaagacactgcaagaggaactggaacggcggagaaaggacctggcctccaatcctctgtggaccggcctgcaaggactgctcccttacctgctgcctttcctgggaccactgctgactctgctgctcctgctgaccatc

SEQ ID NO: 3676 - DNA, 66 bp, synthetic construct
  source 1..66: mol_type = other DNA
ggaccctgcatcttcaacagactgaccgccttcatcaacgacaagctgaacatcatccacgctatg

SEQ ID NO: 3677 - DNA, 1638 bp, synthetic construct
  source 1..1638: mol_type = other DNA
atgggctttacgaccaagatcatcttcctgtacaacctggtgctggtgtacgccggcttcgacgatcctagaaaggccatcgagctggtgcagaagagatacggcagaccctgcgattgctctggcggccaagtttctgagcctcctagcgacagagtgtcccaagtgacctgtagcggcaagaccgcctacctgatgcctgaccagagatggaagtgcaagagcatccccaaggacacaagccctagcggccctctgcaagagtgcccctgtaatagctaccagagcagcgtgcacagctcctgctacacaagctaccagcagtgcagaagcggcaacaagacctactacaccgccacactgctgaaaacccagaccggcggcacatccgatgttcaggtgctgggcagcaccaacaagctgattcagagcccctgcaacggcatcaagggccagagcatctgctggtccacaacagcccctatccacgtgtcagatggcggcggacctctggacaccaccagaatcaagagcgtgcagcggaagctggaagagatccacaaggctctgtaccccgaactccagtatcaccctctggctatccccaaagtgcgggacaacctgatggtggacgcccagacactgaatatcctgaacgccacctacaatctgctgctgatgagcaacaccagcctggtggacgattgctggctgtgcctgaaactgggacctcctacacctctggcaattcccaacttcctgctgagctacgtgaccagaagcagcgacaacatcagctgcctgattatcccacctctgctcgtgcagcccatgcagttcagcaactcctcctgcctgttcagccccagctacaacagcaccgaggaaatcgacctgggacacgtggccttctccaactgcacctccatcaccaacgtgacaggccctatctgcgccgtgaatggcagcgtgttcctgtgtggcaacaacatggcctacacctacctgcctaccaactggaccggactgtgcgtgctggctacactgctgcctgacatcgacatcatccctggcgacgagcccgtgcctattcctgccatcgaccacttcatctacagacccaagcgggctatccagttcatcccactgctggccggactgggaatcaccgccgcttttacaacaggcgctacaggactgggcgtgtccgtgacacagtacaccaagctgagcaaccagctgatctccgacgtgcagatcctgagcagcaccatccaggacctccaggatcaggtggactctctggccgaagtggtgctccagaacagaagaggactggacctgctgacagccgagcaaggcggaatttgtctggccctgcaagagaagtgctgcttctacgtgaacaagagcggcatcgtgcgcgacaagatcaagacactgcaagaggaactggaacggcggagaaaggacctggcctccaatcctctgtggaccggcctgcaaggactgctcccttacctgctgcctttcctgggaccactgctgactctgctgctcctgctgaccatcggaccctgcatcttcaacagactgaccgccttcatcaacgacaagctgaacatcatccacgctatg

SEQ ID NO: 3678 - DNA, 51 bp, synthetic construct
  source 1..51: mol_type = other DNA
gtgctaacccaacagtatcaggtgctcagaaccgatgaagaagctcaagat

SEQ ID NO: 3679 - DNA, 51 bp, synthetic construct
  source 1..51: mol_type = other DNA
gtgctgacacagcagtaccaggtgctgcggacagatgaggaagcccaggat

SEQ ID NO: 3680 - DNA, 1641 bp, synthetic construct
  source 1..1641: mol_type = other DNA
atgggctttacgaccaagatcatcttcctgtacaacctggtgctggtgtacgccggcttcgacgatcctagaaaggccatcgagctggtgcagaagagatacggcagaccctgcgattgctctggcggccaagtttctgagcctcctagcgacagagtgtcccaagtgacctgtagcggcaagaccgcctacctgatgcctgaccagagatggaagtgcaagagcatccccaaggacacaagccctagcggccctctgcaagagtgcccctgtaatagctaccagagcagcgtgcacagctcctgctacacaagctaccagcagtgcagaagcggcaacaagacctactacaccgccacactgctgaaaacccagaccggcggcacatccgatgttcaggtgctgggcagcaccaacaagctgattcagagcccctgcaacggcatcaagggccagagcatctgctggtccacaacagcccctatccacgtgtcagatggcggcggacctctggacaccaccagaatcaagagcgtgcagcggaagctggaagagatccacaaggctctgtaccccgaactccagtatcaccctctggctatccccaaagtgcgggacaacctgatggtggacgcccagacactgaatatcctgaacgccacctacaatctgctgctgatgagcaacaccagcctggtggacgattgctggctgtgcctgaaactgggacctcctacacctctggcaattcccaacttcctgctgagctacgtgaccagaagcagcgacaacatcagctgcctgattatcccacctctgctcgtgcagcccatgcagttcagcaactcctcctgcctgttcagccccagctacaacagcaccgaggaaatcgacctgggacacgtggccttctccaactgcacctccatcaccaacgtgacaggccctatctgcgccgtgaatggcagcgtgttcctgtgtggcaacaacatggcctacacctacctgcctaccaactggaccggactgtgcgtgctggctacactgctgcctgacatcgacatcatccctggcgacgagcccgtgcctattcctgccatcgaccacttcatctacagacccaagcgggctatccagttcatcccactgctggccggactgggaatcaccgccgcttttacaacaggcgctacaggactgggcgtgtccgtgacacagtacaccaagctgagcaaccagctgatctccgacgtgcagatcctgagcagcaccatccaggacctccaggatcaggtggactctctggccgaagtggtgctccagaacagaagaggactggacctgctgacagccgagcaaggcggaatttgtctggccctgcaagagaagtgctgcttctacgtgaacaagagcggcatcgtgcgcgacaagatcaagacactgcaagaggaactggaacggcggagaaaggacctggcctccaatcctctgtggaccggcctgcaaggactgctcccttacctgctgcctttcctgggaccactgctgactctgctgctcctgctgaccatcggaccctgcatcttcaacagactgaccgccttcatcaacgacaagctgaacatcatccacgctatggtg

SEQ ID NO: 3681 - DNA, 1644 bp, synthetic construct
  source 1..1644: mol_type = other DNA
atgggctttacgaccaagatcatcttcctgtacaacctggtgctggtgtacgccggcttcgacgatcctagaaaggccatcgagctggtgcagaagagatacggcagaccctgcgattgctctggcggccaagtttctgagcctcctagcgacagagtgtcccaagtgacctgtagcggcaagaccgcctacctgatgcctgaccagagatggaagtgcaagagcatccccaaggacacaagccctagcggccctctgcaagagtgcccctgtaatagctaccagagcagcgtgcacagctcctgctacacaagctaccagcagtgcagaagcggcaacaagacctactacaccgccacactgctgaaaacccagaccggcggcacatccgatgttcaggtgctgggcagcaccaacaagctgattcagagcccctgcaacggcatcaagggccagagcatctgctggtccacaacagcccctatccacgtgtcagatggcggcggacctctggacaccaccagaatcaagagcgtgcagcggaagctggaagagatccacaaggctctgtaccccgaactccagtatcaccctctggctatccccaaagtgcgggacaacctgatggtggacgcccagacactgaatatcctgaacgccacctacaatctgctgctgatgagcaacaccagcctggtggacgattgctggctgtgcctgaaactgggacctcctacacctctggcaattcccaacttcctgctgagctacgtgaccagaagcagcgacaacatcagctgcctgattatcccacctctgctcgtgcagcccatgcagttcagcaactcctcctgcctgttcagccccagctacaacagcaccgaggaaatcgacctgggacacgtggccttctccaactgcacctccatcaccaacgtgacaggccctatctgcgccgtgaatggcagcgtgttcctgtgtggcaacaacatggcctacacctacctgcctaccaactggaccggactgtgcgtgctggctacactgctgcctgacatcgacatcatccctggcgacgagcccgtgcctattcctgccatcgaccacttcatctacagacccaagcgggctatccagttcatcccactgctggccggactgggaatcaccgccgcttttacaacaggcgctacaggactgggcgtgtccgtgacacagtacaccaagctgagcaaccagctgatctccgacgtgcagatcctgagcagcaccatccaggacctccaggatcaggtggactctctggccgaagtggtgctccagaacagaagaggactggacctgctgacagccgagcaaggcggaatttgtctggccctgcaagagaagtgctgcttctacgtgaacaagagcggcatcgtgcgcgacaagatcaagacactgcaagaggaactggaacggcggagaaaggacctggcctccaatcctctgtggaccggcctgcaaggactgctcccttacctgctgcctttcctgggaccactgctgactctgctgctcctgctgaccatcggaccctgcatcttcaacagactgaccgccttcatcaacgacaagctgaacatcatccacgctatggtgctg

SEQ ID NO: 3682 - DNA, 1647 bp, synthetic construct
  source 1..1647: mol_type = other DNA
atgggctttacgaccaagatcatcttcctgtacaacctggtgctggtgtacgccggcttcgacgatcctagaaaggccatcgagctggtgcagaagagatacggcagaccctgcgattgctctggcggccaagtttctgagcctcctagcgacagagtgtcccaagtgacctgtagcggcaagaccgcctacctgatgcctgaccagagatggaagtgcaagagcatccccaaggacacaagccctagcggccctctgcaagagtgcccctgtaatagctaccagagcagcgtgcacagctcctgctacacaagctaccagcagtgcagaagcggcaacaagacctactacaccgccacactgctgaaaacccagaccggcggcacatccgatgttcaggtgctgggcagcaccaacaagctgattcagagcccctgcaacggcatcaagggccagagcatctgctggtccacaacagcccctatccacgtgtcagatggcggcggacctctggacaccaccagaatcaagagcgtgcagcggaagctggaagagatccacaaggctctgtaccccgaactccagtatcaccctctggctatccccaaagtgcgggacaacctgatggtggacgcccagacactgaatatcctgaacgccacctacaatctgctgctgatgagcaacaccagcctggtggacgattgctggctgtgcctgaaactgggacctcctacacctctggcaattcccaacttcctgctgagctacgtgaccagaagcagcgacaacatcagctgcctgattatcccacctctgctcgtgcagcccatgcagttcagcaactcctcctgcctgttcagccccagctacaacagcaccgaggaaatcgacctgggacacgtggccttctccaactgcacctccatcaccaacgtgacaggccctatctgcgccgtgaatggcagcgtgttcctgtgtggcaacaacatggcctacacctacctgcctaccaactggaccggactgtgcgtgctggctacactgctgcctgacatcgacatcatccctggcgacgagcccgtgcctattcctgccatcgaccacttcatctacagacccaagcgggctatccagttcatcccactgctggccggactgggaatcaccgccgcttttacaacaggcgctacaggactgggcgtgtccgtgacacagtacaccaagctgagcaaccagctgatctccgacgtgcagatcctgagcagcaccatccaggacctccaggatcaggtggactctctggccgaagtggtgctccagaacagaagaggactggacctgctgacagccgagcaaggcggaatttgtctggccctgcaagagaagtgctgcttctacgtgaacaagagcggcatcgtgcgcgacaagatcaagacactgcaagaggaactggaacggcggagaaaggacctggcctccaatcctctgtggaccggcctgcaaggactgctcccttacctgctgcctttcctgggaccactgctgactctgctgctcctgctgaccatcggaccctgcatcttcaacagactgaccgccttcatcaacgacaagctgaacatcatccacgctatggtgctgaca

SEQ ID NO: 3683 - DNA, 1650 bp, synthetic construct
  source 1..1650: mol_type = other DNA
atgggctttacgaccaagatcatcttcctgtacaacctggtgctggtgtacgccggcttcgacgatcctagaaaggccatcgagctggtgcagaagagatacggcagaccctgcgattgctctggcggccaagtttctgagcctcctagcgacagagtgtcccaagtgacctgtagcggcaagaccgcctacctgatgcctgaccagagatggaagtgcaagagcatccccaaggacacaagccctagcggccctctgcaagagtgcccctgtaatagctaccagagcagcgtgcacagctcctgctacacaagctaccagcagtgcagaagcggcaacaagacctactacaccgccacactgctgaaaacccagaccggcggcacatccgatgttcaggtgctgggcagcaccaacaagctgattcagagcccctgcaacggcatcaagggccagagcatctgctggtccacaacagcccctatccacgtgtcagatggcggcggacctctggacaccaccagaatcaagagcgtgcagcggaagctggaagagatccacaaggctctgtaccccgaactccagtatcaccctctggctatccccaaagtgcgggacaacctgatggtggacgcccagacactgaatatcctgaacgccacctacaatctgctgctgatgagcaacaccagcctggtggacgattgctggctgtgcctgaaactgggacctcctacacctctggcaattcccaacttcctgctgagctacgtgaccagaagcagcgacaacatcagctgcctgattatcccacctctgctcgtgcagcccatgcagttcagcaactcctcctgcctgttcagccccagctacaacagcaccgaggaaatcgacctgggacacgtggccttctccaactgcacctccatcaccaacgtgacaggccctatctgcgccgtgaatggcagcgtgttcctgtgtggcaacaacatggcctacacctacctgcctaccaactggaccggactgtgcgtgctggctacactgctgcctgacatcgacatcatccctggcgacgagcccgtgcctattcctgccatcgaccacttcatctacagacccaagcgggctatccagttcatcccactgctggccggactgggaatcaccgccgcttttacaacaggcgctacaggactgggcgtgtccgtgacacagtacaccaagctgagcaaccagctgatctccgacgtgcagatcctgagcagcaccatccaggacctccaggatcaggtggactctctggccgaagtggtgctccagaacagaagaggactggacctgctgacagccgagcaaggcggaatttgtctggccctgcaagagaagtgctgcttctacgtgaacaagagcggcatcgtgcgcgacaagatcaagacactgcaagaggaactggaacggcggagaaaggacctggcctccaatcctctgtggaccggcctgcaaggactgctcccttacctgctgcctttcctgggaccactgctgactctgctgctcctgctgaccatcggaccctgcatcttcaacagactgaccgccttcatcaacgacaagctgaacatcatccacgctatggtgctgacacag

SEQ ID NO: 3684 - DNA, 1653 bp, synthetic construct
  source 1..1653: mol_type = other DNA
atgggctttacgaccaagatcatcttcctgtacaacctggtgctggtgtacgccggcttcgacgatcctagaaaggccatcgagctggtgcagaagagatacggcagaccctgcgattgctctggcggccaagtttctgagcctcctagcgacagagtgtcccaagtgacctgtagcggcaagaccgcctacctgatgcctgaccagagatggaagtgcaagagcatccccaaggacacaagccctagcggccctctgcaagagtgcccctgtaatagctaccagagcagcgtgcacagctcctgctacacaagctaccagcagtgcagaagcggcaacaagacctactacaccgccacactgctgaaaacccagaccggcggcacatccgatgttcaggtgctgggcagcaccaacaagctgattcagagcccctgcaacggcatcaagggccagagcatctgctggtccacaacagcccctatccacgtgtcagatggcggcggacctctggacaccaccagaatcaagagcgtgcagcggaagctggaagagatccacaaggctctgtaccccgaactccagtatcaccctctggctatccccaaagtgcgggacaacctgatggtggacgcccagacactgaatatcctgaacgccacctacaatctgctgctgatgagcaacaccagcctggtggacgattgctggctgtgcctgaaactgggacctcctacacctctggcaattcccaacttcctgctgagctacgtgaccagaagcagcgacaacatcagctgcctgattatcccacctctgctcgtgcagcccatgcagttcagcaactcctcctgcctgttcagccccagctacaacagcaccgaggaaatcgacctgggacacgtggccttctccaactgcacctccatcaccaacgtgacaggccctatctgcgccgtgaatggcagcgtgttcctgtgtggcaacaacatggcctacacctacctgcctaccaactggaccggactgtgcgtgctggctacactgctgcctgacatcgacatcatccctggcgacgagcccgtgcctattcctgccatcgaccacttcatctacagacccaagcgggctatccagttcatcccactgctggccggactgggaatcaccgccgcttttacaacaggcgctacaggactgggcgtgtccgtgacacagtacaccaagctgagcaaccagctgatctccgacgtgcagatcctgagcagcaccatccaggacctccaggatcaggtggactctctggccgaagtggtgctccagaacagaagaggactggacctgctgacagccgagcaaggcggaatttgtctggccctgcaagagaagtgctgcttctacgtgaacaagagcggcatcgtgcgcgacaagatcaagacactgcaagaggaactggaacggcggagaaaggacctggcctccaatcctctgtggaccggcctgcaaggactgctcccttacctgctgcctttcctgggaccactgctgactctgctgctcctgctgaccatcggaccctgcatcttcaacagactgaccgccttcatcaacgacaagctgaacatcatccacgctatggtgctgacacagcag

SEQ ID NO: 3685 - DNA, 1656 bp, synthetic construct
  source 1..1656: mol_type = other DNA
atgggctttacgaccaagatcatcttcctgtacaacctggtgctggtgtacgccggcttcgacgatcctagaaaggccatcgagctggtgcagaagagatacggcagaccctgcgattgctctggcggccaagtttctgagcctcctagcgacagagtgtcccaagtgacctgtagcggcaagaccgcctacctgatgcctgaccagagatggaagtgcaagagcatccccaaggacacaagccctagcggccctctgcaagagtgcccctgtaatagctaccagagcagcgtgcacagctcctgctacacaagctaccagcagtgcagaagcggcaacaagacctactacaccgccacactgctgaaaacccagaccggcggcacatccgatgttcaggtgctgggcagcaccaacaagctgattcagagcccctgcaacggcatcaagggccagagcatctgctggtccacaacagcccctatccacgtgtcagatggcggcggacctctggacaccaccagaatcaagagcgtgcagcggaagctggaagagatccacaaggctctgtaccccgaactccagtatcaccctctggctatccccaaagtgcgggacaacctgatggtggacgcccagacactgaatatcctgaacgccacctacaatctgctgctgatgagcaacaccagcctggtggacgattgctggctgtgcctgaaactgggacctcctacacctctggcaattcccaacttcctgctgagctacgtgaccagaagcagcgacaacatcagctgcctgattatcccacctctgctcgtgcagcccatgcagttcagcaactcctcctgcctgttcagccccagctacaacagcaccgaggaaatcgacctgggacacgtggccttctccaactgcacctccatcaccaacgtgacaggccctatctgcgccgtgaatggcagcgtgttcctgtgtggcaacaacatggcctacacctacctgcctaccaactggaccggactgtgcgtgctggctacactgctgcctgacatcgacatcatccctggcgacgagcccgtgcctattcctgccatcgaccacttcatctacagacccaagcgggctatccagttcatcccactgctggccggactgggaatcaccgccgcttttacaacaggcgctacaggactgggcgtgtccgtgacacagtacaccaagctgagcaaccagctgatctccgacgtgcagatcctgagcagcaccatccaggacctccaggatcaggtggactctctggccgaagtggtgctccagaacagaagaggactggacctgctgacagccgagcaaggcggaatttgtctggccctgcaagagaagtgctgcttctacgtgaacaagagcggcatcgtgcgcgacaagatcaagacactgcaagaggaactggaacggcggagaaaggacctggcctccaatcctctgtggaccggcctgcaaggactgctcccttacctgctgcctttcctgggaccactgctgactctgctgctcctgctgaccatcggaccctgcatcttcaacagactgaccgccttcatcaacgacaagctgaacatcatccacgctatggtgctgacacagcagtac

SEQ ID NO: 3686 - DNA, 1659 bp, synthetic construct
  source 1..1659: mol_type = other DNA
atgggctttacgaccaagatcatcttcctgtacaacctggtgctggtgtacgccggcttcgacgatcctagaaaggccatcgagctggtgcagaagagatacggcagaccctgcgattgctctggcggccaagtttctgagcctcctagcgacagagtgtcccaagtgacctgtagcggcaagaccgcctacctgatgcctgaccagagatggaagtgcaagagcatccccaaggacacaagccctagcggccctctgcaagagtgcccctgtaatagctaccagagcagcgtgcacagctcctgctacacaagctaccagcagtgcagaagcggcaacaagacctactacaccgccacactgctgaaaacccagaccggcggcacatccgatgttcaggtgctgggcagcaccaacaagctgattcagagcccctgcaacggcatcaagggccagagcatctgctggtccacaacagcccctatccacgtgtcagatggcggcggacctctggacaccaccagaatcaagagcgtgcagcggaagctggaagagatccacaaggctctgtaccccgaactccagtatcaccctctggctatccccaaagtgcgggacaacctgatggtggacgcccagacactgaatatcctgaacgccacctacaatctgctgctgatgagcaacaccagcctggtggacgattgctggctgtgcctgaaactgggacctcctacacctctggcaattcccaacttcctgctgagctacgtgaccagaagcagcgacaacatcagctgcctgattatcccacctctgctcgtgcagcccatgcagttcagcaactcctcctgcctgttcagccccagctacaacagcaccgaggaaatcgacctgggacacgtggccttctccaactgcacctccatcaccaacgtgacaggccctatctgcgccgtgaatggcagcgtgttcctgtgtggcaacaacatggcctacacctacctgcctaccaactggaccggactgtgcgtgctggctacactgctgcctgacatcgacatcatccctggcgacgagcccgtgcctattcctgccatcgaccacttcatctacagacccaagcgggctatccagttcatcccactgctggccggactgggaatcaccgccgcttttacaacaggcgctacaggactgggcgtgtccgtgacacagtacaccaagctgagcaaccagctgatctccgacgtgcagatcctgagcagcaccatccaggacctccaggatcaggtggactctctggccgaagtggtgctccagaacagaagaggactggacctgctgacagccgagcaaggcggaatttgtctggccctgcaagagaagtgctgcttctacgtgaacaagagcggcatcgtgcgcgacaagatcaagacactgcaagaggaactggaacggcggagaaaggacctggcctccaatcctctgtggaccggcctgcaaggactgctcccttacctgctgcctttcctgggaccactgctgactctgctgctcctgctgaccatcggaccctgcatcttcaacagactgaccgccttcatcaacgacaagctgaacatcatccacgctatggtgctgacacagcagtaccag

SEQ ID NO: 3687 - DNA, 1662 bp, synthetic construct
  source 1..1662: mol_type = other DNA
atgggctttacgaccaagatcatcttcctgtacaacctggtgctggtgtacgccggcttcgacgatcctagaaaggccatcgagctggtgcagaagagatacggcagaccctgcgattgctctggcggccaagtttctgagcctcctagcgacagagtgtcccaagtgacctgtagcggcaagaccgcctacctgatgcctgaccagagatggaagtgcaagagcatccccaaggacacaagccctagcggccctctgcaagagtgcccctgtaatagctaccagagcagcgtgcacagctcctgctacacaagctaccagcagtgcagaagcggcaacaagacctactacaccgccacactgctgaaaacccagaccggcggcacatccgatgttcaggtgctgggcagcaccaacaagctgattcagagcccctgcaacggcatcaagggccagagcatctgctggtccacaacagcccctatccacgtgtcagatggcggcggacctctggacaccaccagaatcaagagcgtgcagcggaagctggaagagatccacaaggctctgtaccccgaactccagtatcaccctctggctatccccaaagtgcgggacaacctgatggtggacgcccagacactgaatatcctgaacgccacctacaatctgctgctgatgagcaacaccagcctggtggacgattgctggctgtgcctgaaactgggacctcctacacctctggcaattcccaacttcctgctgagctacgtgaccagaagcagcgacaacatcagctgcctgattatcccacctctgctcgtgcagcccatgcagttcagcaactcctcctgcctgttcagccccagctacaacagcaccgaggaaatcgacctgggacacgtggccttctccaactgcacctccatcaccaacgtgacaggccctatctgcgccgtgaatggcagcgtgttcctgtgtggcaacaacatggcctacacctacctgcctaccaactggaccggactgtgcgtgctggctacactgctgcctgacatcgacatcatccctggcgacgagcccgtgcctattcctgccatcgaccacttcatctacagacccaagcgggctatccagttcatcccactgctggccggactgggaatcaccgccgcttttacaacaggcgctacaggactgggcgtgtccgtgacacagtacaccaagctgagcaaccagctgatctccgacgtgcagatcctgagcagcaccatccaggacctccaggatcaggtggactctctggccgaagtggtgctccagaacagaagaggactggacctgctgacagccgagcaaggcggaatttgtctggccctgcaagagaagtgctgcttctacgtgaacaagagcggcatcgtgcgcgacaagatcaagacactgcaagaggaactggaacggcggagaaaggacctggcctccaatcctctgtggaccggcctgcaaggactgctcccttacctgctgcctttcctgggaccactgctgactctgctgctcctgctgaccatcggaccctgcatcttcaacagactgaccgccttcatcaacgacaagctgaacatcatccacgctatggtgctgacacagcagtaccaggtg

SEQ ID NO: 3688 - DNA, 1665 bp, synthetic construct
  source 1..1665: mol_type = other DNA
atgggctttacgaccaagatcatcttcctgtacaacctggtgctggtgtacgccggcttcgacgatcctagaaaggccatcgagctggtgcagaagagatacggcagaccctgcgattgctctggcggccaagtttctgagcctcctagcgacagagtgtcccaagtgacctgtagcggcaagaccgcctacctgatgcctgaccagagatggaagtgcaagagcatccccaaggacacaagccctagcggccctctgcaagagtgcccctgtaatagctaccagagcagcgtgcacagctcctgctacacaagctaccagcagtgcagaagcggcaacaagacctactacaccgccacactgctgaaaacccagaccggcggcacatccgatgttcaggtgctgggcagcaccaacaagctgattcagagcccctgcaacggcatcaagggccagagcatctgctggtccacaacagcccctatccacgtgtcagatggcggcggacctctggacaccaccagaatcaagagcgtgcagcggaagctggaagagatccacaaggctctgtaccccgaactccagtatcaccctctggctatccccaaagtgcgggacaacctgatggtggacgcccagacactgaatatcctgaacgccacctacaatctgctgctgatgagcaacaccagcctggtggacgattgctggctgtgcctgaaactgggacctcctacacctctggcaattcccaacttcctgctgagctacgtgaccagaagcagcgacaacatcagctgcctgattatcccacctctgctcgtgcagcccatgcagttcagcaactcctcctgcctgttcagccccagctacaacagcaccgaggaaatcgacctgggacacgtggccttctccaactgcacctccatcaccaacgtgacaggccctatctgcgccgtgaatggcagcgtgttcctgtgtggcaacaacatggcctacacctacctgcctaccaactggaccggactgtgcgtgctggctacactgctgcctgacatcgacatcatccctggcgacgagcccgtgcctattcctgccatcgaccacttcatctacagacccaagcgggctatccagttcatcccactgctggccggactgggaatcaccgccgcttttacaacaggcgctacaggactgggcgtgtccgtgacacagtacaccaagctgagcaaccagctgatctccgacgtgcagatcctgagcagcaccatccaggacctccaggatcaggtggactctctggccgaagtggtgctccagaacagaagaggactggacctgctgacagccgagcaaggcggaatttgtctggccctgcaagagaagtgctgcttctacgtgaacaagagcggcatcgtgcgcgacaagatcaagacactgcaagaggaactggaacggcggagaaaggacctggcctccaatcctctgtggaccggcctgcaaggactgctcccttacctgctgcctttcctgggaccactgctgactctgctgctcctgctgaccatcggaccctgcatcttcaacagactgaccgccttcatcaacgacaagctgaacatcatccacgctatggtgctgacacagcagtaccaggtgctg

SEQ ID NO: 3689 - DNA, 1668 bp, synthetic construct
  source 1..1668: mol_type = other DNA
atgggctttacgaccaagatcatcttcctgtacaacctggtgctggtgtacgccggcttcgacgatcctagaaaggccatcgagctggtgcagaagagatacggcagaccctgcgattgctctggcggccaagtttctgagcctcctagcgacagagtgtcccaagtgacctgtagcggcaagaccgcctacctgatgcctgaccagagatggaagtgcaagagcatccccaaggacacaagccctagcggccctctgcaagagtgcccctgtaatagctaccagagcagcgtgcacagctcctgctacacaagctaccagcagtgcagaagcggcaacaagacctactacaccgccacactgctgaaaacccagaccggcggcacatccgatgttcaggtgctgggcagcaccaacaagctgattcagagcccctgcaacggcatcaagggccagagcatctgctggtccacaacagcccctatccacgtgtcagatggcggcggacctctggacaccaccagaatcaagagcgtgcagcggaagctggaagagatccacaaggctctgtaccccgaactccagtatcaccctctggctatccccaaagtgcgggacaacctgatggtggacgcccagacactgaatatcctgaacgccacctacaatctgctgctgatgagcaacaccagcctggtggacgattgctggctgtgcctgaaactgggacctcctacacctctggcaattcccaacttcctgctgagctacgtgaccagaagcagcgacaacatcagctgcctgattatcccacctctgctcgtgcagcccatgcagttcagcaactcctcctgcctgttcagccccagctacaacagcaccgaggaaatcgacctgggacacgtggccttctccaactgcacctccatcaccaacgtgacaggccctatctgcgccgtgaatggcagcgtgttcctgtgtggcaacaacatggcctacacctacctgcctaccaactggaccggactgtgcgtgctggctacactgctgcctgacatcgacatcatccctggcgacgagcccgtgcctattcctgccatcgaccacttcatctacagacccaagcgggctatccagttcatcccactgctggccggactgggaatcaccgccgcttttacaacaggcgctacaggactgggcgtgtccgtgacacagtacaccaagctgagcaaccagctgatctccgacgtgcagatcctgagcagcaccatccaggacctccaggatcaggtggactctctggccgaagtggtgctccagaacagaagaggactggacctgctgacagccgagcaaggcggaatttgtctggccctgcaagagaagtgctgcttctacgtgaacaagagcggcatcgtgcgcgacaagatcaagacactgcaagaggaactggaacggcggagaaaggacctggcctccaatcctctgtggaccggcctgcaaggactgctcccttacctgctgcctttcctgggaccactgctgactctgctgctcctgctgaccatcggaccctgcatcttcaacagactgaccgccttcatcaacgacaagctgaacatcatccacgctatggtgctgacacagcagtaccaggtgctgcgg

SEQ ID NO: 3690 - DNA, 1671 bp, synthetic construct
  source 1..1671: mol_type = other DNA
atgggctttacgaccaagatcatcttcctgtacaacctggtgctggtgtacgccggcttcgacgatcctagaaaggccatcgagctggtgcagaagagatacggcagaccctgcgattgctctggcggccaagtttctgagcctcctagcgacagagtgtcccaagtgacctgtagcggcaagaccgcctacctgatgcctgaccagagatggaagtgcaagagcatccccaaggacacaagccctagcggccctctgcaagagtgcccctgtaatagctaccagagcagcgtgcacagctcctgctacacaagctaccagcagtgcagaagcggcaacaagacctactacaccgccacactgctgaaaacccagaccggcggcacatccgatgttcaggtgctgggcagcaccaacaagctgattcagagcccctgcaacggcatcaagggccagagcatctgctggtccacaacagcccctatccacgtgtcagatggcggcggacctctggacaccaccagaatcaagagcgtgcagcggaagctggaagagatccacaaggctctgtaccccgaactccagtatcaccctctggctatccccaaagtgcgggacaacctgatggtggacgcccagacactgaatatcctgaacgccacctacaatctgctgctgatgagcaacaccagcctggtggacgattgctggctgtgcctgaaactgggacctcctacacctctggcaattcccaacttcctgctgagctacgtgaccagaagcagcgacaacatcagctgcctgattatcccacctctgctcgtgcagcccatgcagttcagcaactcctcctgcctgttcagccccagctacaacagcaccgaggaaatcgacctgggacacgtggccttctccaactgcacctccatcaccaacgtgacaggccctatctgcgccgtgaatggcagcgtgttcctgtgtggcaacaacatggcctacacctacctgcctaccaactggaccggactgtgcgtgctggctacactgctgcctgacatcgacatcatccctggcgacgagcccgtgcctattcctgccatcgaccacttcatctacagacccaagcgggctatccagttcatcccactgctggccggactgggaatcaccgccgcttttacaacaggcgctacaggactgggcgtgtccgtgacacagtacaccaagctgagcaaccagctgatctccgacgtgcagatcctgagcagcaccatccaggacctccaggatcaggtggactctctggccgaagtggtgctccagaacagaagaggactggacctgctgacagccgagcaaggcggaatttgtctggccctgcaagagaagtgctgcttctacgtgaacaagagcggcatcgtgcgcgacaagatcaagacactgcaagaggaactggaacggcggagaaaggacctggcctccaatcctctgtggaccggcctgcaaggactgctcccttacctgctgcctttcctgggaccactgctgactctgctgctcctgctgaccatcggaccctgcatcttcaacagactgaccgccttcatcaacgacaagctgaacatcatccacgctatggtgctgacacagcagtaccaggtgctgcggaca

SEQ ID NO: 3691 - DNA, 1674 bp, synthetic construct
  source 1..1674: mol_type = other DNA
atgggctttacgaccaagatcatcttcctgtacaacctggtgctggtgtacgccggcttcgacgatcctagaaaggccatcgagctggtgcagaagagatacggcagaccctgcgattgctctggcggccaagtttctgagcctcctagcgacagagtgtcccaagtgacctgtagcggcaagaccgcctacctgatgcctgaccagagatggaagtgcaagagcatccccaaggacacaagccctagcggccctctgcaagagtgcccctgtaatagctaccagagcagcgtgcacagctcctgctacacaagctaccagcagtgcagaagcggcaacaagacctactacaccgccacactgctgaaaacccagaccggcggcacatccgatgttcaggtgctgggcagcaccaacaagctgattcagagcccctgcaacggcatcaagggccagagcatctgctggtccacaacagcccctatccacgtgtcagatggcggcggacctctggacaccaccagaatcaagagcgtgcagcggaagctggaagagatccacaaggctctgtaccccgaactccagtatcaccctctggctatccccaaagtgcgggacaacctgatggtggacgcccagacactgaatatcctgaacgccacctacaatctgctgctgatgagcaacaccagcctggtggacgattgctggctgtgcctgaaactgggacctcctacacctctggcaattcccaacttcctgctgagctacgtgaccagaagcagcgacaacatcagctgcctgattatcccacctctgctcgtgcagcccatgcagttcagcaactcctcctgcctgttcagccccagctacaacagcaccgaggaaatcgacctgggacacgtggccttctccaactgcacctccatcaccaacgtgacaggccctatctgcgccgtgaatggcagcgtgttcctgtgtggcaacaacatggcctacacctacctgcctaccaactggaccggactgtgcgtgctggctacactgctgcctgacatcgacatcatccctggcgacgagcccgtgcctattcctgccatcgaccacttcatctacagacccaagcgggctatccagttcatcccactgctggccggactgggaatcaccgccgcttttacaacaggcgctacaggactgggcgtgtccgtgacacagtacaccaagctgagcaaccagctgatctccgacgtgcagatcctgagcagcaccatccaggacctccaggatcaggtggactctctggccgaagtggtgctccagaacagaagaggactggacctgctgacagccgagcaaggcggaatttgtctggccctgcaagagaagtgctgcttctacgtgaacaagagcggcatcgtgcgcgacaagatcaagacactgcaagaggaactggaacggcggagaaaggacctggcctccaatcctctgtggaccggcctgcaaggactgctcccttacctgctgcctttcctgggaccactgctgactctgctgctcctgctgaccatcggaccctgcatcttcaacagactgaccgccttcatcaacgacaagctgaacatcatccacgctatggtgctgacacagcagtaccaggtgctgcggacagat

SEQ ID NO: 3692 - DNA, 1677 bp, synthetic construct
  source 1..1677: mol_type = other DNA
atgggctttacgaccaagatcatcttcctgtacaacctggtgctggtgtacgccggcttcgacgatcctagaaaggccatcgagctggtgcagaagagatacggcagaccctgcgattgctctggcggccaagtttctgagcctcctagcgacagagtgtcccaagtgacctgtagcggcaagaccgcctacctgatgcctgaccagagatggaagtgcaagagcatccccaaggacacaagccctagcggccctctgcaagagtgcccctgtaatagctaccagagcagcgtgcacagctcctgctacacaagctaccagcagtgcagaagcggcaacaagacctactacaccgccacactgctgaaaacccagaccggcggcacatccgatgttcaggtgctgggcagcaccaacaagctgattcagagcccctgcaacggcatcaagggccagagcatctgctggtccacaacagcccctatccacgtgtcagatggcggcggacctctggacaccaccagaatcaagagcgtgcagcggaagctggaagagatccacaaggctctgtaccccgaactccagtatcaccctctggctatccccaaagtgcgggacaacctgatggtggacgcccagacactgaatatcctgaacgccacctacaatctgctgctgatgagcaacaccagcctggtggacgattgctggctgtgcctgaaactgggacctcctacacctctggcaattcccaacttcctgctgagctacgtgaccagaagcagcgacaacatcagctgcctgattatcccacctctgctcgtgcagcccatgcagttcagcaactcctcctgcctgttcagccccagctacaacagcaccgaggaaatcgacctgggacacgtggccttctccaactgcacctccatcaccaacgtgacaggccctatctgcgccgtgaatggcagcgtgttcctgtgtggcaacaacatggcctacacctacctgcctaccaactggaccggactgtgcgtgctggctacactgctgcctgacatcgacatcatccctggcgacgagcccgtgcctattcctgccatcgaccacttcatctacagacccaagcgggctatccagttcatcccactgctggccggactgggaatcaccgccgcttttacaacaggcgctacaggactgggcgtgtccgtgacacagtacaccaagctgagcaaccagctgatctccgacgtgcagatcctgagcagcaccatccaggacctccaggatcaggtggactctctggccgaagtggtgctccagaacagaagaggactggacctgctgacagccgagcaaggcggaatttgtctggccctgcaagagaagtgctgcttctacgtgaacaagagcggcatcgtgcgcgacaagatcaagacactgcaagaggaactggaacggcggagaaaggacctggcctccaatcctctgtggaccggcctgcaaggactgctcccttacctgctgcctttcctgggaccactgctgactctgctgctcctgctgaccatcggaccctgcatcttcaacagactgaccgccttcatcaacgacaagctgaacatcatccacgctatggtgctgacacagcagtaccaggtgctgcggacagatgag

SEQ ID NO: 3693 - DNA, 1680 bp, synthetic construct
  source 1..1680: mol_type = other DNA
atgggctttacgaccaagatcatcttcctgtacaacctggtgctggtgtacgccggcttcgacgatcctagaaaggccatcgagctggtgcagaagagatacggcagaccctgcgattgctctggcggccaagtttctgagcctcctagcgacagagtgtcccaagtgacctgtagcggcaagaccgcctacctgatgcctgaccagagatggaagtgcaagagcatccccaaggacacaagccctagcggccctctgcaagagtgcccctgtaatagctaccagagcagcgtgcacagctcctgctacacaagctaccagcagtgcagaagcggcaacaagacctactacaccgccacactgctgaaaacccagaccggcggcacatccgatgttcaggtgctgggcagcaccaacaagctgattcagagcccctgcaacggcatcaagggccagagcatctgctggtccacaacagcccctatccacgtgtcagatggcggcggacctctggacaccaccagaatcaagagcgtgcagcggaagctggaagagatccacaaggctctgtaccccgaactccagtatcaccctctggctatccccaaagtgcgggacaacctgatggtggacgcccagacactgaatatcctgaacgccacctacaatctgctgctgatgagcaacaccagcctggtggacgattgctggctgtgcctgaaactgggacctcctacacctctggcaattcccaacttcctgctgagctacgtgaccagaagcagcgacaacatcagctgcctgattatcccacctctgctcgtgcagcccatgcagttcagcaactcctcctgcctgttcagccccagctacaacagcaccgaggaaatcgacctgggacacgtggccttctccaactgcacctccatcaccaacgtgacaggccctatctgcgccgtgaatggcagcgtgttcctgtgtggcaacaacatggcctacacctacctgcctaccaactggaccggactgtgcgtgctggctacactgctgcctgacatcgacatcatccctggcgacgagcccgtgcctattcctgccatcgaccacttcatctacagacccaagcgggctatccagttcatcccactgctggccggactgggaatcaccgccgcttttacaacaggcgctacaggactgggcgtgtccgtgacacagtacaccaagctgagcaaccagctgatctccgacgtgcagatcctgagcagcaccatccaggacctccaggatcaggtggactctctggccgaagtggtgctccagaacagaagaggactggacctgctgacagccgagcaaggcggaatttgtctggccctgcaagagaagtgctgcttctacgtgaacaagagcggcatcgtgcgcgacaagatcaagacactgcaagaggaactggaacggcggagaaaggacctggcctccaatcctctgtggaccggcctgcaaggactgctcccttacctgctgcctttcctgggaccactgctgactctgctgctcctgctgaccatcggaccctgcatcttcaacagactgaccgccttcatcaacgacaagctgaacatcatccacgctatggtgctgacacagcagtaccaggtgctgcggacagatgaggaa

SEQ ID NO: 3694 - DNA, 1683 bp, synthetic construct
  source 1..1683: mol_type = other DNA
atgggctttacgaccaagatcatcttcctgtacaacctggtgctggtgtacgccggcttcgacgatcctagaaaggccatcgagctggtgcagaagagatacggcagaccctgcgattgctctggcggccaagtttctgagcctcctagcgacagagtgtcccaagtgacctgtagcggcaagaccgcctacctgatgcctgaccagagatggaagtgcaagagcatccccaaggacacaagccctagcggccctctgcaagagtgcccctgtaatagctaccagagcagcgtgcacagctcctgctacacaagctaccagcagtgcagaagcggcaacaagacctactacaccgccacactgctgaaaacccagaccggcggcacatccgatgttcaggtgctgggcagcaccaacaagctgattcagagcccctgcaacggcatcaagggccagagcatctgctggtccacaacagcccctatccacgtgtcagatggcggcggacctctggacaccaccagaatcaagagcgtgcagcggaagctggaagagatccacaaggctctgtaccccgaactccagtatcaccctctggctatccccaaagtgcgggacaacctgatggtggacgcccagacactgaatatcctgaacgccacctacaatctgctgctgatgagcaacaccagcctggtggacgattgctggctgtgcctgaaactgggacctcctacacctctggcaattcccaacttcctgctgagctacgtgaccagaagcagcgacaacatcagctgcctgattatcccacctctgctcgtgcagcccatgcagttcagcaactcctcctgcctgttcagccccagctacaacagcaccgaggaaatcgacctgggacacgtggccttctccaactgcacctccatcaccaacgtgacaggccctatctgcgccgtgaatggcagcgtgttcctgtgtggcaacaacatggcctacacctacctgcctaccaactggaccggactgtgcgtgctggctacactgctgcctgacatcgacatcatccctggcgacgagcccgtgcctattcctgccatcgaccacttcatctacagacccaagcgggctatccagttcatcccactgctggccggactgggaatcaccgccgcttttacaacaggcgctacaggactgggcgtgtccgtgacacagtacaccaagctgagcaaccagctgatctccgacgtgcagatcctgagcagcaccatccaggacctccaggatcaggtggactctctggccgaagtggtgctccagaacagaagaggactggacctgctgacagccgagcaaggcggaatttgtctggccctgcaagagaagtgctgcttctacgtgaacaagagcggcatcgtgcgcgacaagatcaagacactgcaagaggaactggaacggcggagaaaggacctggcctccaatcctctgtggaccggcctgcaaggactgctcccttacctgctgcctttcctgggaccactgctgactctgctgctcctgctgaccatcggaccctgcatcttcaacagactgaccgccttcatcaacgacaagctgaacatcatccacgctatggtgctgacacagcagtaccaggtgctgcggacagatgaggaagcc

SEQ ID NO: 3695 - DNA, 1686 bp, synthetic construct
  source 1..1686: mol_type = other DNA
atgggctttacgaccaagatcatcttcctgtacaacctggtgctggtgtacgccggcttcgacgatcctagaaaggccatcgagctggtgcagaagagatacggcagaccctgcgattgctctggcggccaagtttctgagcctcctagcgacagagtgtcccaagtgacctgtagcggcaagaccgcctacctgatgcctgaccagagatggaagtgcaagagcatccccaaggacacaagccctagcggccctctgcaagagtgcccctgtaatagctaccagagcagcgtgcacagctcctgctacacaagctaccagcagtgcagaagcggcaacaagacctactacaccgccacactgctgaaaacccagaccggcggcacatccgatgttcaggtgctgggcagcaccaacaagctgattcagagcccctgcaacggcatcaagggccagagcatctgctggtccacaacagcccctatccacgtgtcagatggcggcggacctctggacaccaccagaatcaagagcgtgcagcggaagctggaagagatccacaaggctctgtaccccgaactccagtatcaccctctggctatccccaaagtgcgggacaacctgatggtggacgcccagacactgaatatcctgaacgccacctacaatctgctgctgatgagcaacaccagcctggtggacgattgctggctgtgcctgaaactgggacctcctacacctctggcaattcccaacttcctgctgagctacgtgaccagaagcagcgacaacatcagctgcctgattatcccacctctgctcgtgcagcccatgcagttcagcaactcctcctgcctgttcagccccagctacaacagcaccgaggaaatcgacctgggacacgtggccttctccaactgcacctccatcaccaacgtgacaggccctatctgcgccgtgaatggcagcgtgttcctgtgtggcaacaacatggcctacacctacctgcctaccaactggaccggactgtgcgtgctggctacactgctgcctgacatcgacatcatccctggcgacgagcccgtgcctattcctgccatcgaccacttcatctacagacccaagcgggctatccagttcatcccactgctggccggactgggaatcaccgccgcttttacaacaggcgctacaggactgggcgtgtccgtgacacagtacaccaagctgagcaaccagctgatctccgacgtgcagatcctgagcagcaccatccaggacctccaggatcaggtggactctctggccgaagtggtgctccagaacagaagaggactggacctgctgacagccgagcaaggcggaatttgtctggccctgcaagagaagtgctgcttctacgtgaacaagagcggcatcgtgcgcgacaagatcaagacactgcaagaggaactggaacggcggagaaaggacctggcctccaatcctctgtggaccggcctgcaaggactgctcccttacctgctgcctttcctgggaccactgctgactctgctgctcctgctgaccatcggaccctgcatcttcaacagactgaccgccttcatcaacgacaagctgaacatcatccacgctatggtgctgacacagcagtaccaggtgctgcggacagatgaggaagcccag

SEQ ID NO: 3696 - DNA, 1644 bp, synthetic construct
  source 1..1644: mol_type = other DNA
atgggctttacgaccaagatcatcttcctgtacaacctggtgctggtgtacgccggcttcgacgatcctagaaaggccatcgagctggtgcagaagagatacggcagaccctgcgattgctctggcggccaagtttctgagcctcctagcgacagagtgtcccaagtgacctgtagcggcaagaccgcctacctgatgcctgaccagagatggaagtgcaagagcatccccaaggacacaagccctagcggccctctgcaagagtgcccctgtaatagctaccagagcagcgtgcacagctcctgctacacaagctaccagcagtgcagaagcggcaacaagacctactacaccgccacactgctgaaaacccagaccggcggcacatccgatgttcaggtgctgggcagcaccaacaagctgattcagagcccctgcaacggcatcaagggccagagcatctgctggtccacaacagcccctatccacgtgtcagatggcggcggacctctggacaccaccagaatcaagagcgtgcagcggaagctggaagagatccacaaggctctgtaccccgaactccagtatcaccctctggctatccccaaagtgcgggacaacctgatggtggacgcccagacactgaatatcctgaacgccacctacaatctgctgctgatgagcaacaccagcctggtggacgattgctggctgtgcctgaaactgggacctcctacacctctggcaattcccaacttcctgctgagctacgtgaccagaagcagcgacaacatcagctgcctgattatcccacctctgctcgtgcagcccatgcagttcagcaactcctcctgcctgttcagccccagctacaacagcaccgaggaaatcgacctgggacacgtggccttctccaactgcacctccatcaccaacgtgacaggccctatctgcgccgtgaatggcagcgtgttcctgtgtggcaacaacatggcctacacctacctgcctaccaactggaccggactgtgcgtgctggctacactgctgcctgacatcgacatcatccctggcgacgagcccgtgcctattcctgccatcgaccacttcatctacagacccaagcgggctatccagttcatcccactgctggccggactgggaatcaccgccgcttttacaacaggcgctacaggactgggcgtgtccgtgacacagtacaccaagctgagcaaccagctgatctccgacgtgcagatcctgagcagcaccatccaggacctccaggatcaggtggactctctggccgaagtggtgctccagaacagaagaggactggacctgctgacagccgagcaaggcggaatttgtctggccctgcaagagaagtgctgcttctacgtgaacaagagcggcatcgtgcgcgacaagatcaagacactgcaagaggaactggaacggcggagaaaggacctggcctccaatcctctgtggaccggcctgcaaggactgctcccttacctgctgcctttcctgggaccactgctgactctgctgctcctgctgaccatcggaccctgcatcttcaacagactgaccgccttcatcaacgacaagctgaacatcatccacgctatgtggtaa

SEQ ID NO: 3697 - DNA, 1644 bp, synthetic construct
  source 1..1644: mol_type = other DNA
atgggctttacgaccaagatcatcttcctgtacaacctggtgctggtgtacgccggcttcgacgatcctagaaaggccatcgagctggtgcagaagagatacggcagaccctgcgattgctctggcggccaagtttctgagcctcctagcgacagagtgtcccaagtgacctgtagcggcaagaccgcctacctgatgcctgaccagagatggaagtgcaagagcatccccaaggacacaagccctagcggccctctgcaagagtgcccctgtaatagctaccagagcagcgtgcacagctcctgctacacaagctaccagcagtgcagaagcggcaacaagacctactacaccgccacactgctgaaaacccagaccggcggcacatccgatgttcaggtgctgggcagcaccaacaagctgattcagagcccctgcaacggcatcaagggccagagcatctgctggtccacaacagcccctatccacgtgtcagatggcggcggacctctggacaccaccagaatcaagagcgtgcagcggaagctggaagagatccacaaggctctgtaccccgaactccagtatcaccctctggctatccccaaagtgcgggacaacctgatggtggacgcccagacactgaatatcctgaacgccacctacaatctgctgctgatgagcaacaccagcctggtggacgattgctggctgtgcctgaaactgggacctcctacacctctggcaattcccaacttcctgctgagctacgtgaccagaagcagcgacaacatcagctgcctgattatcccacctctgctcgtgcagcccatgcagttcagcaactcctcctgcctgttcagccccagctacaacagcaccgaggaaatcgacctgggacacgtggccttctccaactgcacctccatcaccaacgtgacaggccctatctgcgccgtgaatggcagcgtgttcctgtgtggcaacaacatggcctacacctacctgcctaccaactggaccggactgtgcgtgctggctacactgctgcctgacatcgacatcatccctggcgacgagcccgtgcctattcctgccatcgaccacttcatctacagacccaagcgggctatccagttcatcccactgctggccggactgggaatcaccgccgcttttacaacaggcgctacaggactgggcgtgtccgtgacacagtacaccaagctgagcaaccagctgatctccgacgtgcagatcctgagcagcaccatccaggacctccaggatcaggtggactctctggccgaagtggtgctccagaacagaagaggactggacctgctgacagccgagcaaggcggaatttgtctggccctgcaagagaagtgctgcttctacgtgaacaagagcggcatcgtgcgcgacaagatcaagacactgcaagaggaactggaacggcggagaaaggacctggcctccaatcctctgtggaccggcctgcaaggactgctcccttacctgctgcctttcctgggaccactgctgactctgctgctcctgctgaccatcggaccctgcatcttcaacagactgaccgccttcatcaacgacaagctgaacatcatccacgctatgagataa

SEQ ID NO: 3698 - DNA, 1644 bp, synthetic construct
  source 1..1644: mol_type = other DNA
atgggctttacgaccaagatcatcttcctgtacaacctggtgctggtgtacgccggcttcgacgatcctagaaaggccatcgagctggtgcagaagagatacggcagaccctgcgattgctctggcggccaagtttctgagcctcctagcgacagagtgtcccaagtgacctgtagcggcaagaccgcctacctgatgcctgaccagagatggaagtgcaagagcatccccaaggacacaagccctagcggccctctgcaagagtgcccctgtaatagctaccagagcagcgtgcacagctcctgctacacaagctaccagcagtgcagaagcggcaacaagacctactacaccgccacactgctgaaaacccagaccggcggcacatccgatgttcaggtgctgggcagcaccaacaagctgattcagagcccctgcaacggcatcaagggccagagcatctgctggtccacaacagcccctatccacgtgtcagatggcggcggacctctggacaccaccagaatcaagagcgtgcagcggaagctggaagagatccacaaggctctgtaccccgaactccagtatcaccctctggctatccccaaagtgcgggacaacctgatggtggacgcccagacactgaatatcctgaacgccacctacaatctgctgctgatgagcaacaccagcctggtggacgattgctggctgtgcctgaaactgggacctcctacacctctggcaattcccaacttcctgctgagctacgtgaccagaagcagcgacaacatcagctgcctgattatcccacctctgctcgtgcagcccatgcagttcagcaactcctcctgcctgttcagccccagctacaacagcaccgaggaaatcgacctgggacacgtggccttctccaactgcacctccatcaccaacgtgacaggccctatctgcgccgtgaatggcagcgtgttcctgtgtggcaacaacatggcctacacctacctgcctaccaactggaccggactgtgcgtgctggctacactgctgcctgacatcgacatcatccctggcgacgagcccgtgcctattcctgccatcgaccacttcatctacagacccaagcgggctatccagttcatcccactgctggccggactgggaatcaccgccgcttttacaacaggcgctacaggactgggcgtgtccgtgacacagtacaccaagctgagcaaccagctgatctccgacgtgcagatcctgagcagcaccatccaggacctccaggatcaggtggactctctggccgaagtggtgctccagaacagaagaggactggacctgctgacagccgagcaaggcggaatttgtctggccctgcaagagaagtgctgcttctacgtgaacaagagcggcatcgtgcgcgacaagatcaagacactgcaagaggaactggaacggcggagaaaggacctggcctccaatcctctgtggaccggcctgcaaggactgctcccttacctgctgcctttcctgggaccactgctgactctgctgctcctgctgaccatcggaccctgcatcttcaacagactgaccgccttcatcaacgacaagctgaacatcatccacgctatggattaa

SEQ ID NO: 3699 - DNA, 1644 bp, synthetic construct
  source 1..1644: mol_type = other DNA
atgggctttacgaccaagatcatcttcctgtacaacctggtgctggtgtacgccggcttcgacgatcctagaaaggccatcgagctggtgcagaagagatacggcagaccctgcgattgctctggcggccaagtttctgagcctcctagcgacagagtgtcccaagtgacctgtagcggcaagaccgcctacctgatgcctgaccagagatggaagtgcaagagcatccccaaggacacaagccctagcggccctctgcaagagtgcccctgtaatagctaccagagcagcgtgcacagctcctgctacacaagctaccagcagtgcagaagcggcaacaagacctactacaccgccacactgctgaaaacccagaccggcggcacatccgatgttcaggtgctgggcagcaccaacaagctgattcagagcccctgcaacggcatcaagggccagagcatctgctggtccacaacagcccctatccacgtgtcagatggcggcggacctctggacaccaccagaatcaagagcgtgcagcggaagctggaagagatccacaaggctctgtaccccgaactccagtatcaccctctggctatccccaaagtgcgggacaacctgatggtggacgcccagacactgaatatcctgaacgccacctacaatctgctgctgatgagcaacaccagcctggtggacgattgctggctgtgcctgaaactgggacctcctacacctctggcaattcccaacttcctgctgagctacgtgaccagaagcagcgacaacatcagctgcctgattatcccacctctgctcgtgcagcccatgcagttcagcaactcctcctgcctgttcagccccagctacaacagcaccgaggaaatcgacctgggacacgtggccttctccaactgcacctccatcaccaacgtgacaggccctatctgcgccgtgaatggcagcgtgttcctgtgtggcaacaacatggcctacacctacctgcctaccaactggaccggactgtgcgtgctggctacactgctgcctgacatcgacatcatccctggcgacgagcccgtgcctattcctgccatcgaccacttcatctacagacccaagcgggctatccagttcatcccactgctggccggactgggaatcaccgccgcttttacaacaggcgctacaggactgggcgtgtccgtgacacagtacaccaagctgagcaaccagctgatctccgacgtgcagatcctgagcagcaccatccaggacctccaggatcaggtggactctctggccgaagtggtgctccagaacagaagaggactggacctgctgacagccgagcaaggcggaatttgtctggccctgcaagagaagtgctgcttctacgtgaacaagagcggcatcgtgcgcgacaagatcaagacactgcaagaggaactggaacggcggagaaaggacctggcctccaatcctctgtggaccggcctgcaaggactgctcccttacctgctgcctttcctgggaccactgctgactctgctgctcctgctgaccatcggaccctgcatcttcaacagactgaccgccttcatcaacgacaagctgaacatcatccacgctatgtactaa

SEQ ID NO: 3700 - DNA, 1644 bp, synthetic construct
  source 1..1644: mol_type = other DNA
atgggctttacgaccaagatcatcttcctgtacaacctggtgctggtgtacgccggcttcgacgatcctagaaaggccatcgagctggtgcagaagagatacggcagaccctgcgattgctctggcggccaagtttctgagcctcctagcgacagagtgtcccaagtgacctgtagcggcaagaccgcctacctgatgcctgaccagagatggaagtgcaagagcatccccaaggacacaagccctagcggccctctgcaagagtgcccctgtaatagctaccagagcagcgtgcacagctcctgctacacaagctaccagcagtgcagaagcggcaacaagacctactacaccgccacactgctgaaaacccagaccggcggcacatccgatgttcaggtgctgggcagcaccaacaagctgattcagagcccctgcaacggcatcaagggccagagcatctgctggtccacaacagcccctatccacgtgtcagatggcggcggacctctggacaccaccagaatcaagagcgtgcagcggaagctggaagagatccacaaggctctgtaccccgaactccagtatcaccctctggctatccccaaagtgcgggacaacctgatggtggacgcccagacactgaatatcctgaacgccacctacaatctgctgctgatgagcaacaccagcctggtggacgattgctggctgtgcctgaaactgggacctcctacacctctggcaattcccaacttcctgctgagctacgtgaccagaagcagcgacaacatcagctgcctgattatcccacctctgctcgtgcagcccatgcagttcagcaactcctcctgcctgttcagccccagctacaacagcaccgaggaaatcgacctgggacacgtggccttctccaactgcacctccatcaccaacgtgacaggccctatctgcgccgtgaatggcagcgtgttcctgtgtggcaacaacatggcctacacctacctgcctaccaactggaccggactgtgcgtgctggctacactgctgcctgacatcgacatcatccctggcgacgagcccgtgcctattcctgccatcgaccacttcatctacagacccaagcgggctatccagttcatcccactgctggccggactgggaatcaccgccgcttttacaacaggcgctacaggactgggcgtgtccgtgacacagtacaccaagctgagcaaccagctgatctccgacgtgcagatcctgagcagcaccatccaggacctccaggatcaggtggactctctggccgaagtggtgctccagaacagaagaggactggacctgctgacagccgagcaaggcggaatttgtctggccctgcaagagaagtgctgcttctacgtgaacaagagcggcatcgtgcgcgacaagatcaagacactgcaagaggaactggaacggcggagaaaggacctggcctccaatcctctgtggaccggcctgcaaggactgctcccttacctgctgcctttcctgggaccactgctgactctgctgctcctgctgaccatcggaccctgcatcttcaacagactgaccgccttcatcaacgacaagctgaacatcatccacgctatgcagtaa

SEQ ID NO: 3701 - DNA, 1644 bp, synthetic construct
  source 1..1644: mol_type = other DNA
atgggctttacgaccaagatcatcttcctgtacaacctggtgctggtgtacgccggcttcgacgatcctagaaaggccatcgagctggtgcagaagagatacggcagaccctgcgattgctctggcggccaagtttctgagcctcctagcgacagagtgtcccaagtgacctgtagcggcaagaccgcctacctgatgcctgaccagagatggaagtgcaagagcatccccaaggacacaagccctagcggccctctgcaagagtgcccctgtaatagctaccagagcagcgtgcacagctcctgctacacaagctaccagcagtgcagaagcggcaacaagacctactacaccgccacactgctgaaaacccagaccggcggcacatccgatgttcaggtgctgggcagcaccaacaagctgattcagagcccctgcaacggcatcaagggccagagcatctgctggtccacaacagcccctatccacgtgtcagatggcggcggacctctggacaccaccagaatcaagagcgtgcagcggaagctggaagagatccacaaggctctgtaccccgaactccagtatcaccctctggctatccccaaagtgcgggacaacctgatggtggacgcccagacactgaatatcctgaacgccacctacaatctgctgctgatgagcaacaccagcctggtggacgattgctggctgtgcctgaaactgggacctcctacacctctggcaattcccaacttcctgctgagctacgtgaccagaagcagcgacaacatcagctgcctgattatcccacctctgctcgtgcagcccatgcagttcagcaactcctcctgcctgttcagccccagctacaacagcaccgaggaaatcgacctgggacacgtggccttctccaactgcacctccatcaccaacgtgacaggccctatctgcgccgtgaatggcagcgtgttcctgtgtggcaacaacatggcctacacctacctgcctaccaactggaccggactgtgcgtgctggctacactgctgcctgacatcgacatcatccctggcgacgagcccgtgcctattcctgccatcgaccacttcatctacagacccaagcgggctatccagttcatcccactgctggccggactgggaatcaccgccgcttttacaacaggcgctacaggactgggcgtgtccgtgacacagtacaccaagctgagcaaccagctgatctccgacgtgcagatcctgagcagcaccatccaggacctccaggatcaggtggactctctggccgaagtggtgctccagaacagaagaggactggacctgctgacagccgagcaaggcggaatttgtctggccctgcaagagaagtgctgcttctacgtgaacaagagcggcatcgtgcgcgacaagatcaagacactgcaagaggaactggaacggcggagaaaggacctggcctccaatcctctgtggaccggcctgcaaggactgctcccttacctgctgcctttcctgggaccactgctgactctgctgctcctgctgaccatcggaccctgcatcttcaacagactgaccgccttcatcaacgacaagctgaacatcatccacgctatgcactaa

SEQ ID NO: 3702 - DNA, 1647 bp, synthetic construct
  source 1..1647: mol_type = other DNA
atgggctttacgaccaagatcatcttcctgtacaacctggtgctggtgtacgccggcttcgacgatcctagaaaggccatcgagctggtgcagaagagatacggcagaccctgcgattgctctggcggccaagtttctgagcctcctagcgacagagtgtcccaagtgacctgtagcggcaagaccgcctacctgatgcctgaccagagatggaagtgcaagagcatccccaaggacacaagccctagcggccctctgcaagagtgcccctgtaatagctaccagagcagcgtgcacagctcctgctacacaagctaccagcagtgcagaagcggcaacaagacctactacaccgccacactgctgaaaacccagaccggcggcacatccgatgttcaggtgctgggcagcaccaacaagctgattcagagcccctgcaacggcatcaagggccagagcatctgctggtccacaacagcccctatccacgtgtcagatggcggcggacctctggacaccaccagaatcaagagcgtgcagcggaagctggaagagatccacaaggctctgtaccccgaactccagtatcaccctctggctatccccaaagtgcgggacaacctgatggtggacgcccagacactgaatatcctgaacgccacctacaatctgctgctgatgagcaacaccagcctggtggacgattgctggctgtgcctgaaactgggacctcctacacctctggcaattcccaacttcctgctgagctacgtgaccagaagcagcgacaacatcagctgcctgattatcccacctctgctcgtgcagcccatgcagttcagcaactcctcctgcctgttcagccccagctacaacagcaccgaggaaatcgacctgggacacgtggccttctccaactgcacctccatcaccaacgtgacaggccctatctgcgccgtgaatggcagcgtgttcctgtgtggcaacaacatggcctacacctacctgcctaccaactggaccggactgtgcgtgctggctacactgctgcctgacatcgacatcatccctggcgacgagcccgtgcctattcctgccatcgaccacttcatctacagacccaagcgggctatccagttcatcccactgctggccggactgggaatcaccgccgcttttacaacaggcgctacaggactgggcgtgtccgtgacacagtacaccaagctgagcaaccagctgatctccgacgtgcagatcctgagcagcaccatccaggacctccaggatcaggtggactctctggccgaagtggtgctccagaacagaagaggactggacctgctgacagccgagcaaggcggaatttgtctggccctgcaagagaagtgctgcttctacgtgaacaagagcggcatcgtgcgcgacaagatcaagacactgcaagaggaactggaacggcggagaaaggacctggcctccaatcctctgtggaccggcctgcaaggactgctcccttacctgctgcctttcctgggaccactgctgactctgctgctcctgctgaccatcggaccctgcatcttcaacagactgaccgccttcatcaacgacaagctgaacatcatccacgctatgggatcctaa

SEQ ID NO: 3703 - DNA, 1653 bp, synthetic construct
  source 1..1653: mol_type = other DNA
atgggctttacgaccaagatcatcttcctgtacaacctggtgctggtgtacgccggcttcgacgatcctagaaaggccatcgagctggtgcagaagagatacggcagaccctgcgattgctctggcggccaagtttctgagcctcctagcgacagagtgtcccaagtgacctgtagcggcaagaccgcctacctgatgcctgaccagagatggaagtgcaagagcatccccaaggacacaagccctagcggccctctgcaagagtgcccctgtaatagctaccagagcagcgtgcacagctcctgctacacaagctaccagcagtgcagaagcggcaacaagacctactacaccgccacactgctgaaaacccagaccggcggcacatccgatgttcaggtgctgggcagcaccaacaagctgattcagagcccctgcaacggcatcaagggccagagcatctgctggtccacaacagcccctatccacgtgtcagatggcggcggacctctggacaccaccagaatcaagagcgtgcagcggaagctggaagagatccacaaggctctgtaccccgaactccagtatcaccctctggctatccccaaagtgcgggacaacctgatggtggacgcccagacactgaatatcctgaacgccacctacaatctgctgctgatgagcaacaccagcctggtggacgattgctggctgtgcctgaaactgggacctcctacacctctggcaattcccaacttcctgctgagctacgtgaccagaagcagcgacaacatcagctgcctgattatcccacctctgctcgtgcagcccatgcagttcagcaactcctcctgcctgttcagccccagctacaacagcaccgaggaaatcgacctgggacacgtggccttctccaactgcacctccatcaccaacgtgacaggccctatctgcgccgtgaatggcagcgtgttcctgtgtggcaacaacatggcctacacctacctgcctaccaactggaccggactgtgcgtgctggctacactgctgcctgacatcgacatcatccctggcgacgagcccgtgcctattcctgccatcgaccacttcatctacagacccaagcgggctatccagttcatcccactgctggccggactgggaatcaccgccgcttttacaacaggcgctacaggactgggcgtgtccgtgacacagtacaccaagctgagcaaccagctgatctccgacgtgcagatcctgagcagcaccatccaggacctccaggatcaggtggactctctggccgaagtggtgctccagaacagaagaggactggacctgctgacagccgagcaaggcggaatttgtctggccctgcaagagaagtgctgcttctacgtgaacaagagcggcatcgtgcgcgacaagatcaagacactgcaagaggaactggaacggcggagaaaggacctggcctccaatcctctgtggaccggcctgcaaggactgctcccttacctgctgcctttcctgggaccactgctgactctgctgctcctgctgaccatcggaccctgcatcttcaacagactgaccgccttcatcaacgacaagctgaacatcatccacgctatgggatccactagctaa

SEQ ID NO: 3704 - DNA, 1671 bp, synthetic construct
  source 1..1671: mol_type = other DNA
atgggctttacgaccaagatcatcttcctgtacaacctggtgctggtgtacgccggcttcgacgatcctagaaaggccatcgagctggtgcagaagagatacggcagaccctgcgattgctctggcggccaagtttctgagcctcctagcgacagagtgtcccaagtgacctgtagcggcaagaccgcctacctgatgcctgaccagagatggaagtgcaagagcatccccaaggacacaagccctagcggccctctgcaagagtgcccctgtaatagctaccagagcagcgtgcacagctcctgctacacaagctaccagcagtgcagaagcggcaacaagacctactacaccgccacactgctgaaaacccagaccggcggcacatccgatgttcaggtgctgggcagcaccaacaagctgattcagagcccctgcaacggcatcaagggccagagcatctgctggtccacaacagcccctatccacgtgtcagatggcggcggacctctggacaccaccagaatcaagagcgtgcagcggaagctggaagagatccacaaggctctgtaccccgaactccagtatcaccctctggctatccccaaagtgcgggacaacctgatggtggacgcccagacactgaatatcctgaacgccacctacaatctgctgctgatgagcaacaccagcctggtggacgattgctggctgtgcctgaaactgggacctcctacacctctggcaattcccaacttcctgctgagctacgtgaccagaagcagcgacaacatcagctgcctgattatcccacctctgctcgtgcagcccatgcagttcagcaactcctcctgcctgttcagccccagctacaacagcaccgaggaaatcgacctgggacacgtggccttctccaactgcacctccatcaccaacgtgacaggccctatctgcgccgtgaatggcagcgtgttcctgtgtggcaacaacatggcctacacctacctgcctaccaactggaccggactgtgcgtgctggctacactgctgcctgacatcgacatcatccctggcgacgagcccgtgcctattcctgccatcgaccacttcatctacagacccaagcgggctatccagttcatcccactgctggccggactgggaatcaccgccgcttttacaacaggcgctacaggactgggcgtgtccgtgacacagtacaccaagctgagcaaccagctgatctccgacgtgcagatcctgagcagcaccatccaggacctccaggatcaggtggactctctggccgaagtggtgctccagaacagaagaggactggacctgctgacagccgagcaaggcggaatttgtctggccctgcaagagaagtgctgcttctacgtgaacaagagcggcatcgtgcgcgacaagatcaagacactgcaagaggaactggaacggcggagaaaggacctggcctccaatcctctgtggaccggcctgcaaggactgctcccttacctgctgcctttcctgggaccactgctgactctgctgctcctgctgaccatcggaccctgcatcttcaacagactgaccgccttcatcaacgacaagctgaacatcatccacgctatgggatccactagtccagtgtggtggaattcttaa

SEQ ID NO: 3705 - DNA, 1689 bp, synthetic construct
  source 1..1689: mol_type = other DNA
atgggctttacgaccaagatcatcttcctgtacaacctggtgctggtgtacgccggcttcgacgatcctagaaaggccatcgagctggtgcagaagagatacggcagaccctgcgattgctctggcggccaagtttctgagcctcctagcgacagagtgtcccaagtgacctgtagcggcaagaccgcctacctgatgcctgaccagagatggaagtgcaagagcatccccaaggacacaagccctagcggccctctgcaagagtgcccctgtaatagctaccagagcagcgtgcacagctcctgctacacaagctaccagcagtgcagaagcggcaacaagacctactacaccgccacactgctgaaaacccagaccggcggcacatccgatgttcaggtgctgggcagcaccaacaagctgattcagagcccctgcaacggcatcaagggccagagcatctgctggtccacaacagcccctatccacgtgtcagatggcggcggacctctggacaccaccagaatcaagagcgtgcagcggaagctggaagagatccacaaggctctgtaccccgaactccagtatcaccctctggctatccccaaagtgcgggacaacctgatggtggacgcccagacactgaatatcctgaacgccacctacaatctgctgctgatgagcaacaccagcctggtggacgattgctggctgtgcctgaaactgggacctcctacacctctggcaattcccaacttcctgctgagctacgtgaccagaagcagcgacaacatcagctgcctgattatcccacctctgctcgtgcagcccatgcagttcagcaactcctcctgcctgttcagccccagctacaacagcaccgaggaaatcgacctgggacacgtggccttctccaactgcacctccatcaccaacgtgacaggccctatctgcgccgtgaatggcagcgtgttcctgtgtggcaacaacatggcctacacctacctgcctaccaactggaccggactgtgcgtgctggctacactgctgcctgacatcgacatcatccctggcgacgagcccgtgcctattcctgccatcgaccacttcatctacagacccaagcgggctatccagttcatcccactgctggccggactgggaatcaccgccgcttttacaacaggcgctacaggactgggcgtgtccgtgacacagtacaccaagctgagcaaccagctgatctccgacgtgcagatcctgagcagcaccatccaggacctccaggatcaggtggactctctggccgaagtggtgctccagaacagaagaggactggacctgctgacagccgagcaaggcggaatttgtctggccctgcaagagaagtgctgcttctacgtgaacaagagcggcatcgtgcgcgacaagatcaagacactgcaagaggaactggaacggcggagaaaggacctggcctccaatcctctgtggaccggcctgcaaggactgctcccttacctgctgcctttcctgggaccactgctgactctgctgctcctgctgaccatcggaccctgcatcttcaacagactgaccgccttcatcaacgacaagctgaacatcatccacgctatgggatccactagtccagtgtggtggaattctgcagatatccagcacagttaa

SEQ ID NO: 3706 - DNA, 1731 bp, synthetic construct
  source 1..1731: mol_type = other DNA
atgggctttacgaccaagatcatcttcctgtacaacctggtgctggtgtacgccggcttcgacgatcctagaaaggccatcgagctggtgcagaagagatacggcagaccctgcgattgctctggcggccaagtttctgagcctcctagcgacagagtgtcccaagtgacctgtagcggcaagaccgcctacctgatgcctgaccagagatggaagtgcaagagcatccccaaggacacaagccctagcggccctctgcaagagtgcccctgtaatagctaccagagcagcgtgcacagctcctgctacacaagctaccagcagtgcagaagcggcaacaagacctactacaccgccacactgctgaaaacccagaccggcggcacatccgatgttcaggtgctgggcagcaccaacaagctgattcagagcccctgcaacggcatcaagggccagagcatctgctggtccacaacagcccctatccacgtgtcagatggcggcggacctctggacaccaccagaatcaagagcgtgcagcggaagctggaagagatccacaaggctctgtaccccgaactccagtatcaccctctggctatccccaaagtgcgggacaacctgatggtggacgcccagacactgaatatcctgaacgccacctacaatctgctgctgatgagcaacaccagcctggtggacgattgctggctgtgcctgaaactgggacctcctacacctctggcaattcccaacttcctgctgagctacgtgaccagaagcagcgacaacatcagctgcctgattatcccacctctgctcgtgcagcccatgcagttcagcaactcctcctgcctgttcagccccagctacaacagcaccgaggaaatcgacctgggacacgtggccttctccaactgcacctccatcaccaacgtgacaggccctatctgcgccgtgaatggcagcgtgttcctgtgtggcaacaacatggcctacacctacctgcctaccaactggaccggactgtgcgtgctggctacactgctgcctgacatcgacatcatccctggcgacgagcccgtgcctattcctgccatcgaccacttcatctacagacccaagcgggctatccagttcatcccactgctggccggactgggaatcaccgccgcttttacaacaggcgctacaggactgggcgtgtccgtgacacagtacaccaagctgagcaaccagctgatctccgacgtgcagatcctgagcagcaccatccaggacctccaggatcaggtggactctctggccgaagtggtgctccagaacagaagaggactggacctgctgacagccgagcaaggcggaatttgtctggccctgcaagagaagtgctgcttctacgtgaacaagagcggcatcgtgcgcgacaagatcaagacactgcaagaggaactggaacggcggagaaaggacctggcctccaatcctctgtggaccggcctgcaaggactgctcccttacctgctgcctttcctgggaccactgctgactctgctgctcctgctgaccatcggaccctgcatcttcaacagactgaccgccttcatcaacgacaagctgaacatcatccacgctatgggatccactagtccagtgtggtggaattctgcagatatccagcacagtggcggccgctcgagtctagagggcccgaacaaaaactcatcttaa

SEQ ID NO: 3707 - DNA, 1692 bp, synthetic construct; identical to SEQ ID NO: 3664
  source 1..1692: mol_type = other DNA

SEQ ID NO: 3708 - DNA, 1743 bp, synthetic construct
  source 1..1743: mol_type = other DNA
atgggctttacgaccaagatcatcttcctgtacaacctggtgctggtgtacgccggcttcgacgatcctagaaaggccatcgagctggtgcagaagagatacggcagaccctgcgattgctctggcggccaagtttctgagcctcctagcgacagagtgtcccaagtgacctgtagcggcaagaccgcctacctgatgcctgaccagagatggaagtgcaagagcatccccaaggacacaagccctagcggccctctgcaagagtgcccctgtaatagctaccagagcagcgtgcacagctcctgctacacaagctaccagcagtgcagaagcggcaacaagacctactacaccgccacactgctgaaaacccagaccggcggcacatccgatgttcaggtgctgggcagcaccaacaagctgattcagagcccctgcaacggcatcaagggccagagcatctgctggtccacaacagcccctatccacgtgtcagatggcggcggacctctggacaccaccagaatcaagagcgtgcagcggaagctggaagagatccacaaggctctgtaccccgaactccagtatcaccctctggctatccccaaagtgcgggacaacctgatggtggacgcccagacactgaatatcctgaacgccacctacaatctgctgctgatgagcaacaccagcctggtggacgattgctggctgtgcctgaaactgggacctcctacacctctggcaattcccaacttcctgctgagctacgtgaccagaagcagcgacaacatcagctgcctgattatcccacctctgctcgtgcagcccatgcagttcagcaactcctcctgcctgttcagccccagctacaacagcaccgaggaaatcgacctgggacacgtggccttctccaactgcacctccatcaccaacgtgacaggccctatctgcgccgtgaatggcagcgtgttcctgtgtggcaacaacatggcctacacctacctgcctaccaactggaccggactgtgcgtgctggctacactgctgcctgacatcgacatcatccctggcgacgagcccgtgcctattcctgccatcgaccacttcatctacagacccaagcgggctatccagttcatcccactgctggccggactgggaatcaccgccgcttttacaacaggcgctacaggactgggcgtgtccgtgacacagtacaccaagctgagcaaccagctgatctccgacgtgcagatcctgagcagcaccatccaggacctccaggatcaggtggactctctggccgaagtggtgctccagaacagaagaggactggacctgctgacagccgagcaaggcggaatttgtctggccctgcaagagaagtgctgcttctacgtgaacaagagcggcatcgtgcgcgacaagatcaagacactgcaagaggaactggaacggcggagaaaggacctggcctccaatcctctgtggaccggcctgcaaggactgctcccttacctgctgcctttcctgggaccactgctgactctgctgctcctgctgaccatcggaccctgcatcttcaacagactgaccgccttcatcaacgacaagctgaacatcatccacgctatgggatccactagtccagtgtggtggaattctgcagatatccagcacagtggcggccgctcgagtctagagggcccgaacaaaaactcatctcagaagaggatctga

SEQ ID NO: 3709 - DNA, 2571 bp, synthetic construct
  source 1..2571: mol_type = other DNA
atgggctttacgaccaagatcatcttcctgtacaacctggtgctggtgtacgccggcttcgacgatcctagaaaggccatcgagctggtgcagaagagatacggcagaccctgcgattgctctggcggccaagtttctgagcctcctagcgacagagtgtcccaagtgacctgtagcggcaagaccgcctacctgatgcctgaccagagatggaagtgcaagagcatccccaaggacacaagccctagcggccctctgcaagagtgcccctgtaatagctaccagagcagcgtgcacagctcctgctacacaagctaccagcagtgcagaagcggcaacaagacctactacaccgccacactgctgaaaacccagaccggcggcacatccgatgttcaggtgctgggcagcaccaacaagctgattcagagcccctgcaacggcatcaagggccagagcatctgctggtccacaacagcccctatccacgtgtcagatggcggcggacctctggacaccaccagaatcaagagcgtgcagcggaagctggaagagatccacaaggctctgtaccccgaactccagtatcaccctctggctatccccaaagtgcgggacaacctgatggtggacgcccagacactgaatatcctgaacgccacctacaatctgctgctgatgagcaacaccagcctggtggacgattgctggctgtgcctgaaactgggacctcctacacctctggcaattcccaacttcctgctgagctacgtgaccagaagcagcgacaacatcagctgcctgattatcccacctctgctcgtgcagcccatgcagttcagcaactcctcctgcctgttcagccccagctacaacagcaccgaggaaatcgacctgggacacgtggccttctccaactgcacctccatcaccaacgtgacaggccctatctgcgccgtgaatggcagcgtgttcctgtgtggcaacaacatggcctacacctacctgcctaccaactggaccggactgtgcgtgctggctacactgctgcctgacatcgacatcatccctggcgacgagcccgtgcctattcctgccatcgaccacttcatctacagacccaagcgggctatccagttcatcccactgctggccggactgggaatcaccgccgcttttacaacaggcgctacaggactgggcgtgtccgtgacacagtacaccaagctgagcaaccagctgatctccgacgtgcagatcctgagcagcaccatccaggacctccaggatcaggtggactctctggccgaagtggtgctccagaacagaagaggactggacctgctgacagccgagcaaggcggaatttgtctggccctgcaagagaagtgctgcttctacgtgaacaagagcggcatcgtgcgcgacaagatcaagacactgcaagaggaactggaacggcggagaaaggacctggcctccaatcctctgtggaccggcctgcaaggactgctcccttacctgctgcctttcctgggaccactgctgactctgctgctcctgctgaccatcggaccctgcatcttcaacagactgaccgccttcatcaacgacaagctgaacatcatccacgctatgggatccagggccaagcgatctggatctggagcaacaaacttctcactactcaaacaagcaggtgacgtggaggagaatcccgggcctactagtatggactggatttggcgcatccttttccttgtcggcgctgctaccggcgcgcattccttcgaaatgaagcccaccgagaacaacgaagacttcaacatcgtggccgtggccagcaacttcgcgaccacggatctcgatgctgaccgcgggaagttgcccggcaagaagctgccgctggaggtgctcaaagagatggaagccaatgcccggaaagctggctgcaccaggggctgtctgatctgcctgtcccacatcaagtgcacgcccaagatgaagaagttcatcccaggacgctgccacacctacgaaggcgacaaagagtccgcacagggcggcataggcgaggcgatcgtcgacattcctgagattcctgggttcaaggacttggagcccatggagcagttcatcgcacaggtcgatctgtgtgtggactgcacaactggctgcctcaaagggcttgccaacgtgcagtgttctgacctgctcaagaagtggctgccgcaacgctgtgcgacctttgccagcaagatccagggccaggtggacaagatcaagggggccggtggtgacctcgagcagaaactgatctcggaagaggatctggcgaagcccaccacgacgccagcgccgcgaccaccaacaccggcgcccaccatcgcgtcgcagcccctgtccctgcgcccagaggcgtgccggccagcggcggggggcgcagtgcacacgagggggctggacttcgcctgtgacatctacatctgggcgcccttggccgggacttgtggggtccttctcctgtcactggttatcaccctttactgcaaacggggcagaaagaaatag

SEQ ID NO: 3710 - DNA, 1641 bp, synthetic construct
  source 1..1641: mol_type = other DNA
atgggctttacgaccaagatcatcttcctgtacaacctggtgctggtgtacgccggcttcgacgatcctagaaaggccatcgagctggtgcagaagagatacggcagaccctgcgattgctctggcggccaagtttctgagcctcctagcgacagagtgtcccaagtgacctgtagcggcaagaccgcctacctgatgcctgaccagagatggaagtgcaagagcatccccaaggacacaagccctagcggccctctgcaagagtgcccctgtaatagctaccagagcagcgtgcacagctcctgctacacaagctaccagcagtgcagaagcggcaacaagacctactacaccgccacactgctgaaaacccagaccggcggcacatccgatgttcaggtgctgggcagcaccaacaagctgattcagagcccctgcaacggcatcaagggccagagcatctgctggtccacaacagcccctatccacgtgtcagatggcggcggacctctggacaccaccagaatcaagagcgtgcagcggaagctggaagagatccacaaggctctgtaccccgaactccagtatcaccctctggctatccccaaagtgcgggacaacctgatggtggacgcccagacactgaatatcctgaacgccacctacaatctgctgctgatgagcaacaccagcctggtggacgattgctggctgtgcctgaaactgggacctcctacacctctggcaattcccaacttcctgctgagctacgtgaccagaagcagcgacaacatcagctgcctgattatcccacctctgctcgtgcagcccatgcagttcagcaactcctcctgcctgttcagccccagctacaacagcaccgaggaaatcgacctgggacacgtggccttctccaactgcacctccatcaccaacgtgacaggccctatctgcgccgtgaatggcagcgtgttcctgtgtggcaacaacatggcctacacctacctgcctaccaactggaccggactgtgcgtgctggctacactgctgcctgacatcgacatcatccctggcgacgagcccgtgcctattcctgccatcgaccacttcatctacagacccaagcgggctatccagttcatcccactgctggccggactgggaatcaccgccgcttttacaacaggcgctacaggactgggcgtgtccgtgacacagtacaccaagctgagcaaccagctgatctccgacgtgcagatcctgagcagcaccatccaggacctccaggatcaggtggactctctggccgaagtggtgctccagaacagaagaggactggacctgctgacagccgagcaaggcggaatttgtctggccctgcaagagaagtgctgcttctacgtgaacaagagcggcatcgtgcgcgacaagatcaagacactgcaagaggaactggaacggcggagaaaggacctggcctccaatcctctgtggaccggcctgcaaggactgctcccttacctgctgcctttcctgggaccactgctgactctgctgctcctgctgaccatcggaccctgcatcttcaacagactgaccgccttcatcaacgacaagctgaacatcatccacgctatgtaa

SEQ ID NO: 3711 - DNA, 1641 bp, synthetic construct; identical to SEQ ID NO: 3710
  source 1..1641: mol_type = other DNA

SEQ ID NO: 3712 - DNA, 1641 bp, synthetic construct; identical to SEQ ID NO: 3710
  source 1..1641: mol_type = other DNA

SEQ ID NO: 3713 - DNA, 1641 bp, synthetic construct; identical to SEQ ID NO: 3710
  source 1..1641: mol_type = other DNA

SEQ ID NO: 3714 - DNA, 1641 bp, synthetic construct; identical to SEQ ID NO: 3710
  source 1..1641: mol_type = other DNA

SEQ ID NO: 3715 - DNA, 1692 bp, synthetic construct
  source 1..1692: mol_type = other DNA
atgggctttacgaccaagatcatcttcctgtacaacctggtgctggtgtacgccggcttcgacgatcctagaaaggccatcgagctggtgcagaagagatacggcagaccctgcgattgctctggcggccaagtttctgagcctcctagcgacagagtgtcccaagtgacctgtagcggcaagaccgcctacctgatgcctgaccagagatggaagtgcaagagcatccccaaggacacaagccctagcggccctctgcaagagtgcccctgtaatagctaccagagcagcgtgcacagctcctgctacacaagctaccagcagtgcagaagcggcaacaagacctactacaccgccacactgctgaaaacccagaccggcggcacatccgatgttcaggtgctgggcagcaccaacaagctgattcagagcccctgcaacggcatcaagggccagagcatctgctggtccacaacagcccctatccacgtgtcagatggcggcggacctctggacaccaccagaatcaagagcgtgcagcggaagctggaagagatccacaaggctctgtaccccgaactccagtatcaccctctggctatccccaaagtgcgggacaacctgatggtggacgcccagacactgaatatcctgaacgccacctacaatctgctgctgatgagcaacaccagcctggtggacgattgctggctgtgcctgaaactgggacctcctacacctctggcaattcccaacttcctgctgagctacgtgaccagaagcagcgacaacatcagctgcctgattatcccacctctgctcgtgcagcccatgcagttcagcaactcctcctgcctgttcagccccagctacaacagcaccgaggaaatcgacctgggacacgtggccttctccaactgcacctccatcaccaacgtgacaggccctatctgcgccgtgaatggcagcgtgttcctgtgtggcaacaacatggcctacacctacctgcctaccaactggaccggactgtgcgtgctggctacactgctgcctgacatcgacatcatccctggcgacgagcccgtgcctattcctgccatcgaccacttcatctacagacccaagcgggctatccagttcatcccactgctggccggactgggaatcaccgccgcttttacaacaggcgctacaggactgggcgtgtccgtgacacagtacaccaagctgagcaaccagctgatctccgacgtgcagatcctgagcagcaccatccaggacctccaggatcaggtggactctctggccgaagtggtgctccagaacagaagaggactggacctgctgacagccgagcaaggcggaatttgtctggccctgcaagagaagtgctgcttctacgtgaacaagagcggcatcgtgcgcgacaagatcaagacactgcaagaggaactggaacggcggagaaaggacctggcctccaatcctctgtggaccggcctgcaaggactgctcccttacctgctgcctttcctgggaccactgctgactctgctgctcctgctgaccatcggaccctgcatcttcaacagactgaccgccttcatcaacgacaagctgaacatcatccacgctatggtgctgacacagcagtcccaggtggcccggacagatgaggaagcccaggattga

SEQ ID NO: 3716 - DNA, 1692 bp, synthetic construct
  source 1..1692: mol_type = other DNA
atgggctttacgaccaagatcatcttcctgtacaacctggtgctggtgtacgccggcttcgacgatcctagaaaggccatcgagctggtgcagaagagatacggcagaccctgcgattgctctggcggccaagtttctgagcctcctagcgacagagtgtcccaagtgacctgtagcggcaagaccgcctacctgatgcctgaccagagatggaagtgcaagagcatccccaaggacacaagccctagcggccctctgcaagagtgcccctgtaatagctaccagagcagcgtgcacagctcctgctacacaagctaccagcagtgcagaagcggcaacaagacctactacaccgccacactgctgaaaacccagaccggcggcacatccgatgttcaggtgctgggcagcaccaacaagctgattcagagcccctgcaacggcatcaagggccagagcatctgctggtccacaacagcccctatccacgtgtcagatggcggcggacctctggacaccaccagaatcaagagcgtgcagcggaagctggaagagatccacaaggctctgtaccccgaactccagtatcaccctctggctatccccaaagtgcgggacaacctgatggtggacgcccagacactgaatatcctgaacgccacctacaatctgctgctgatgagcaacaccagcctggtggacgattgctggctgtgcctgaaactgggacctcctacacctctggcaattcccaacttcctgctgagctacgtgaccagaagcagcgacaacatcagctgcctgattatcccacctctgctcgtgcagcccatgcagttcagcaactcctcctgcctgttcagccccagctacaacagcaccgaggaaatcgacctgggacacgtggccttctccaactgcacctccatcaccaacgtgacaggccctatctgcgccgtgaatggcagcgtgttcctgtgtggcaacaacatggcctacacctacctgcctaccaactggaccggactgtgcgtgctggctacactgctgcctgacatcgacatcatccctggcgacgagcccgtgcctattcctgccatcgaccacttcatctacagacccaagcgggctatccagttcatcccactgctggccggactgggaatcaccgccgcttttacaacaggcgctacaggactgggcgtgtccgtgacacagtacaccaagctgagcaaccagctgatctccgacgtgcagatcctgagcagcaccatccaggacctccaggatcaggtggactctctggccgaagtggtgctccagaacagaagaggactggacctgctgacagccgagcaaggcggaatttgtctggccctgcaagagaagtgctgcttctacgtgaacaagagcggcatcgtgcgcgacaagatcaagacactgcaagaggaactggaacggcggagaaaggacctggcctccaatcctctgtggaccggcctgcaaggactgctcccttacctgctgcctttcctgggaccactgctgactctgctgctcctgctgaccatcggaccctgcatcttcaacagactgaccgccttcatcaacgacaagcttaacatcatccacgctatggtgctgacacagcagtaccaggtgctgcggacagatgaggaagcccaggattga

SEQ ID NO: 3717 - DNA, 1743 bp, synthetic construct
  source 1..1743: mol_type = other DNA
atgggctttacgaccaagatcatcttcctgtacaacctggtgctggtgtacgccggcttcgacgatcctagaaaggccatcgagctggtgcagaagagatacggcagaccctgcgattgctctggcggccaagtttctgagcctcctagcgacagagtgtcccaagtgacctgtagcggcaagaccgcctacctgatgcctgaccagagatggaagtgcaagagcatccccaaggacacaagccctagcggccctctgcaagagtgcccctgtaatagctaccagagcagcgtgcacagctcctgctacacaagctaccagcagtgcagaagcggcaacaagacctactacaccgccacactgctgaaaacccagaccggcggcacatccgatgttcaggtgctgggcagcaccaacaagctgattcagagcccctgcaacggcatcaagggccagagcatctgctggtccacaacagcccctatccacgtgtcagatggcggcggacctctggacaccaccagaatcaagagcgtgcagcggaagctggaagagatccacaaggctctgtaccccgaactccagtatcaccctctggctatccccaaagtgcgggacaacctgatggtggacgcccagacactgaatatcctgaacgccacctacaatctgctgctgatgagcaacaccagcctggtggacgattgctggctgtgcctgaaactgggacctcctacacctctggcaattcccaacttcctgctgagctacgtgaccagaagcagcgacaacatcagctgcctgattatcccacctctgctcgtgcagcccatgcagttcagcaactcctcctgcctgttcagccccagctacaacagcaccgaggaaatcgacctgggacacgtggccttctccaactgcacctccatcaccaacgtgacaggccctatctgcgccgtgaatggcagcgtgttcctgtgtggcaacaacatggcctacacctacctgcctaccaactggaccggactgtgcgtgctggctacactgctgcctgacatcgacatcatccctggcgacgagcccgtgcctattcctgccatcgaccacttcatctacagacccaagcgggctatccagttcatcccactgctggccggactgggaatcaccgccgcttttacaacaggcgctacaggactgggcgtgtccgtgacacagtacaccaagctgagcaaccagctgatctccgacgtgcagatcctgagcagcaccatccaggacctccaggatcaggtggactctctggccgaagtggtgctccagaacagaagaggactggacctgctgacagccgagcaaggcggaatttgtctggccctgcaagagaagtgctgcttctacgtgaacaagagcggcatcgtgcgcgacaagatcaagacactgcaagaggaactggaacggcggagaaaggacctggcctccaatcctctgtggaccggcctgcaaggactgctcccttacctgctgcctttcctgggaccactgctgactctgctgctcctgctgaccatcggaccctgcatcttcaacagactgaccgccttcatcaacgacaagcttaacatcatccacgctatgggatccactagtccagtgtggtggaattctgcagatatccagcacagtggcggccgctcgagtctagagggcccgaacaaaaactcatctcagaagaggatctga

SEQ ID NO: 3718 - DNA, 1692 bp, synthetic construct
  source 1..1692: mol_type = other DNA
atgggctttacgaccaagatcatcttcctgtacaacctggtgctggtgtacgccggcttcgacgatcctagaaaggccatcgagctggtgcagaagagatacggcagaccctgcgattgctctggcggccaagtttctgagcctcctagcgacagagtgtcccaagtgacctgtagcggcaagaccgcctacctgatgcctgaccagagatggaagtgcaagagcatccccaaggacacaagccctagcggccctctgcaagagtgcccctgtaatagctaccagagcagcgtgcacagctcctgctacacaagctaccagcagtgcagaagcggcaacaagacctactacaccgccacactgctgaaaacccagaccggcggcacatccgatgttcaggtgctgggcagcaccaacaagctgattcagagcccctgcaacggcatcaagggccagagcatctgctggtccacaacagcccctatccacgtgtcagatggcggcggacctctggacaccaccagaatcaagagcgtgcagcggaagctggaagagatccacaaggctctgtaccccgaactccagtatcaccctctggctatccccaaagtgcgggacaacctgatggtggacgcccagacactgaatatcctgaacgccacctacaatctgctgctgatgagcaacaccagcctggtggacgattgctggctgtgcctgaaactgggacctcctacacctctggcaattcccaacttcctgctgagctacgtgaccagaagcagcgacaacatcagctgcctgattatcccacctctgctcgtgcagcccatgcagttcagcaactcctcctgcctgttcagccccagctacaacagcaccgaggaaatcgacctgggacacgtggccttctccaactgcacctccatcaccaacgtgacaggccctatctgcgccgtgaatggcagcgtgttcctgtgtggcaacaacatggcctacacctacctgcctaccaactggaccggactgtgcgtgctggctacactgctgcctgacatcgacatcatccctggcgacgagcccgtgcctattcctgccatcgaccacttcatctacagacccaagcgggctatccagttcatcccactgctggccggactgggaatcaccgccgcttttacaacaggcgctacaggactgggcgtgtccgtgacacagtacaccaagcttagcaaccagctgatctccgacgtgcagatcctgagcagcaccatccaggacctccaggatcaggtggactctctggccgaagtggtgctccagaacagaagaggactggacctgctgacagccgagcaaggcggaatttgtctggccctgcaagagaagtgctgcttctacgtgaacaagagcggcatcgtgcgcgacaagatcaagacactgcaagaggaactggaacggcggagaaaggacctggcctccaatcctctgtggaccggcctgcaaggactgctcccttacctgctgcctttcctgggaccactgctgactctgctgctcctgctgaccatcggaccctgcatcttcaacagactgaccgccttcatcaacgacaagctgaacatcatccacgctatggtgctgacacagcagtaccaggtgctgcggacagatgaggaagcccaggattga

SEQ ID NO: 3719 - DNA, 1743 bp, synthetic construct
  source 1..1743: mol_type = other DNA
atgggctttacgaccaagatcatcttcctgtacaacctggtgctggtgtacgccggcttcgacgatcctagaaaggccatcgagctggtgcagaagagatacggcagaccctgcgattgctctggcggccaagtttctgagcctcctagcgacagagtgtcccaagtgacctgtagcggcaagaccgcctacctgatgcctgaccagagatggaagtgcaagagcatccccaaggacacaagccctagcggccctctgcaagagtgcccctgtaatagctaccagagcagcgtgcacagctcctgctacacaagctaccagcagtgcagaagcggcaacaagacctactacaccgccacactgctgaaaacccagaccggcggcacatccgatgttcaggtgctgggcagcaccaacaagctgattcagagcccctgcaacggcatcaagggccagagcatctgctggtccacaacagcccctatccacgtgtcagatggcggcggacctctggacaccaccagaatcaagagcgtgcagcggaagctggaagagatccacaaggctctgtaccccgaactccagtatcaccctctggctatccccaaagtgcgggacaacctgatggtggacgcccagacactgaatatcctgaacgccacctacaatctgctgctgatgagcaacaccagcctggtggacgattgctggctgtgcctgaaactgggacctcctacacctctggcaattcccaacttcctgctgagctacgtgaccagaagcagcgacaacatcagctgcctgattatcccacctctgctcgtgcagcccatgcagttcagcaactcctcctgcctgttcagccccagctacaacagcaccgaggaaatcgacctgggacacgtggccttctccaactgcacctccatcaccaacgtgacaggccctatctgcgccgtgaatggcagcgtgttcctgtgtggcaacaacatggcctacacctacctgcctaccaactggaccggactgtgcgtgctggctacactgctgcctgacatcgacatcatccctggcgacgagcccgtgcctattcctgccatcgaccacttcatctacagacccaagcgggctatccagttcatcccactgctggccggactgggaatcaccgccgcttttacaacaggcgctacaggactgggcgtgtccgtgacacagtacaccaagcttagcaaccagctgatctccgacgtgcagatcctgagcagcaccatccaggacctccaggatcaggtggactctctggccgaagtggtgctccagaacagaagaggactggacctgctgacagccgagcaaggcggaatttgtctggccctgcaagagaagtgctgcttctacgtgaacaagagcggcatcgtgcgcgacaagatcaagacactgcaagaggaactggaacggcggagaaaggacctggcctccaatcctctgtggaccggcctgcaaggactgctcccttacctgctgcctttcctgggaccactgctgactctgctgctcctgctgaccatcggaccctgcatcttcaacagactgaccgccttcatcaacgacaagctgaacatcatccacgctatgggatccactagtccagtgtggtggaattctgcagatatccagcacagtggcggccgctcgagtctagagggcccgaacaaaaactcatctcagaagaggatctga

SEQ ID NO: 3720 - DNA, 1692 bp, synthetic construct
  source 1..1692: mol_type = other DNA
atgggctttacgaccaagatcatcttcctgtacaacctggtgctggtgtacgccggcttcgacgatcctagaaaggccatcgagctggtgcagaagagatacggcagaccctgcgattgctctggcggccaagtttctgagcctcctagcgacagagtgtcccaagtgacctgtagcggcaagaccgcctacctgatgcctgaccagagatggaagtgcaagagcatccccaaggacacaagccctagcggccctctgcaagagtgcccctgtaatagctaccagagcagcgtgcacagctcctgctacacaagctaccagcagtgcagaagcggcaacaagacctactacaccgccacactgctgaaaacccagaccggcggcacatccgatgttcaggtgctgggcagcaccaacaagctgattcagagcccctgcaacggcatcaagggccagagcatctgctggtccacaacagcccctatccacgtgtcagatggcggcggacctctggacaccaccagaatcaagagcgtgcagcggaagctggaagagatccacaaggctctgtaccccgaactccagtatcaccctctggctatccccaaagtgcgggacaacctgatggtggacgcccagacactgaatatcctgaacgccacctacaatctgctgctgatgagcaacaccagcctggtggacgattgctggctgtgcctgaaactgggacctcctacacctctggcaattcccaacttcctgctgagctacgtgaccagaagcagcgacaacatcagctgcctgattatcccacctctgctcgtgcagcccatgcagttcagcaactcctcctgcctgttcagccccagctacaacagcaccgaggaaatcgacctgggacacgtggccttctccaactgcacctccatcaccaacgtgacaggccctatctgcgccgtgaatggcagcgtgttcctgtgtggcaacaacatggcctacacctacctgcctaccaactggaccggactgtgcgtgctggctacactgctgcctgacatcgacatcatccctggcgacgagcccgtgcctattcctgccatcgaccacttcatctacagacccaagcgggctatccagttcatcccactgctggccggactgggaatcaccgccgcttttacaacaggcgctacaggactgggcgtgtccgtgacacagtacaccaagctgagcaaccagctgatctccgacgtgcagatcctgagcagcaccatccaggacctccaggatcaggtggactctctggccgaagtggtgctccagaacagaagaggactggacctgctgacagccgagcaaggcggaatttgtctggccctgcaagagaagtgctgcttctacgtgaacaagagcggcatcgtgcgcgacaagcttaagacactgcaagaggaactggaacggcggagaaaggacctggcctccaatcctctgtggaccggcctgcaaggactgctcccttacctgctgcctttcctgggaccactgctgactctgctgctcctgctgaccatcggaccctgcatcttcaacagactgaccgccttcatcaacgacaagctgaacatcatccacgctatggtgctgacacagcagtaccaggtgctgcggacagatgaggaagcccaggattga

SEQ ID NO: 3721 - DNA, 1638 bp, synthetic construct
  source 1..1638: mol_type = other DNA
atgggctttacgaccaagatcatcttcctgtacaacctggtgctggtgtacgccggcttcgacgatcctagaaaggccatcgagctggtgcagaagagatacggcagaccctgcgattgctctggcggccaagtttctgagcctcctagcgacagagtgtcccaagtgacctgtagcggcaagaccgcctacctgatgcctgaccagagatggaagtgcaagagcatccccaaggacacaagccctagcggccctctgcaagagtgcccctgtaatagctaccagagcagcgtgcacagctcctgctacacaagctaccagcagtgcagaagcggcaacaagacctactacaccgccacactgctgaaaacccagaccggcggcacatccgatgttcaggtgctgggcagcaccaacaagctgattcagagcccctgcaacggcatcaagggccagagcatctgctggtccacaacagcccctatccacgtgtcagatggcggcggacctctggacaccaccagaatcaagagcgtgcagcggaagctggaagagatccacaaggctctgtaccccgaactccagtatcaccctctggctatccccaaagtgcgggacaacctgatggtggacgcccagacactgaatatcctgaacgccacctacaatctgctgctgatgagcaacaccagcctggtggacgattgctggctgtgcctgaaactgggacctcctacacctctggcaattcccaacttcctgctgagctacgtgaccagaagcagcgacaacatcagctgcctgattatcccacctctgctcgtgcagcccatgcagttcagcaactcctcctgcctgttcagccccagctacaacagcaccgaggaaatcgacctgggacacgtggccttctccaactgcacctccatcaccaacgtgacaggccctatctgcgccgtgaatggcagcgtgttcctgtgtggcaacaacatggcctacacctacctgcctaccaactggaccggactgtgcgtgctggctacactgctgcctgacatcgacatcatccctggcgacgagcccgtgcctattcctgccatcgaccacttcatctacagacccaagcgggctatccagttcatcccactgctggccggactgggaatcaccgccgcttttacaacaggcgctacaggactgggcgtgtccgtgacacagtacaccaagctttctcaagaactaaatggggacatggaacgggtcgccgactccctggtcaccttgcaagatcaacttaactccctagcagcagtagtccttcaaaatcgaagagctttagacttgctaaccgctgaaagagggggaacctgtttatttttaggggaagaatgctgttattatgttaatcaatccggaatcgtcactgagaaagttaaagaaattcgagatcgaatacaacgtagagcagaggagctccgaaacactggaccctggggcctcctcagccaatggatgccctggattctccccttcttaggacctctagcagctataatattgctactcctctttggaccctgtatctttaacctccttgttaactttgtctcttccagaatcgaagctgtaaaactataa

SEQ ID NO: 3722 - DNA, 1659 bp, synthetic construct
  source 1..1659: mol_type = other DNA
atgggctttacgaccaagatcatcttcctgtacaacctggtgctggtgtacgccggcttcgacgatcctagaaaggccatcgagctggtgcagaagagatacggcagaccctgcgattgctctggcggccaagtttctgagcctcctagcgacagagtgtcccaagtgacctgtagcggcaagaccgcctacctgatgcctgaccagagatggaagtgcaagagcatccccaaggacacaagccctagcggccctctgcaagagtgcccctgtaatagctaccagagcagcgtgcacagctcctgctacacaagctaccagcagtgcagaagcggcaacaagacctactacaccgccacactgctgaaaacccagaccggcggcacatccgatgttcaggtgctgggcagcaccaacaagctgattcagagcccctgcaacggcatcaagggccagagcatctgctggtccacaacagcccctatccacgtgtcagatggcggcggacctctggacaccaccagaatcaagagcgtgcagcggaagctggaagagatccacaaggctctgtaccccgaactccagtatcaccctctggctatccccaaagtgcgggacaacctgatggtggacgcccagacactgaatatcctgaacgccacctacaatctgctgctgatgagcaacaccagcctggtggacgattgctggctgtgcctgaaactgggacctcctacacctctggcaattcccaacttcctgctgagctacgtgaccagaagcagcgacaacatcagctgcctgattatcccacctctgctcgtgcagcccatgcagttcagcaactcctcctgcctgttcagccccagctacaacagcaccgaggaaatcgacctgggacacgtggccttctccaactgcacctccatcaccaacgtgacaggccctatctgcgccgtgaatggcagcgtgttcctgtgtggcaacaacatggcctacacctacctgcctaccaactggaccggactgtgcgtgctggctacactgctgcctgacatcgacatcatccctggcgacgagcccgtgcctattcctgccatcgaccacttcatctacagacccaagcgggctatccagttcatcccactgctggccggactgggaatcaccgccgcttttacaacaggcgctacaggactgggcgtgtccgtgacacagtacaccaagctgagcaaccagctgatctccgacgtgcagatcctgagcagcaccatccaggacctccaggatcaggtggactctctggccgaagtggtgctccagaacagaagaggactggacctgctgacagccgagcaaggcggaatttgtctggccctgcaagagaagtgctgcttctacgtgaacaagagcggcatcgtgcgcgacaagcttaagacactgcaagaggaactggaacggcggagaaaggacctggcctccaatcctctgtggaccggcctgcaaggactgctcccttacctgctgcctttcctgggaccactgctgactctgctgctcctgctgaccatcggaccctgcatcttcaacagactgaccgccttcatcaacgacaagctgaacatcatccacgctatggtgctgacacagcagtactaa

SEQ ID NO: 3723 - DNA, 1686 bp, synthetic construct; identical to SEQ ID NO: 3668
  source 1..1686: mol_type = other DNA

SEQ ID NO: 3724 - DNA, 90 bp, synthetic construct; identical to SEQ ID NO: 3669
  source 1..90: mol_type = other DNA

SEQ ID NO: 3725 - DNA, 1644 bp, synthetic construct
  source 1..1644: mol_type = other DNA
atgggctttacgaccaagatcatcttcctgtacaacctggtgctggtgtacgccggcttcgacgatcctagaaaggccatcgagctggtgcagaagagatacggcagaccctgcgattgctctggcggccaagtttctgagcctcctagcgacagagtgtcccaagtgacctgtagcggcaagaccgcctacctgatgcctgaccagagatggaagtgcaagagcatccccaaggacacaagccctagcggccctctgcaagagtgcccctgtaatagctaccagagcagcgtgcacagctcctgctacacaagctaccagcagtgcagaagcggcaacaagacctactacaccgccacactgctgaaaacccagaccggcggcacatccgatgttcaggtgctgggcagcaccaacaagctgattcagagcccctgcaacggcatcaagggccagagcatctgctggtccacaacagcccctatccacgtgtcagatggcggcggacctctggacaccaccagaatcaagagcgtgcagcggaagctggaagagatccacaaggctctgtaccccgaactccagtatcaccctctggctatccccaaagtgcgggacaacctgatggtggacgcccagacactgaatatcctgaacgccacctacaatctgctgctgatgagcaacaccagcctggtggacgattgctggctgtgcctgaaactgggacctcctacacctctggcaattcccaacttcctgctgagctacgtgaccagaagcagcgacaacatcagctgcctgattatcccacctctgctcgtgcagcccatgcagttcagcaactcctcctgcctgttcagccccagctacaacagcaccgaggaaatcgacctgggacacgtggccttctccaactgcacctccatcaccaacgtgacaggccctatctgcgccgtgaatggcagcgtgttcctgtgtggcaacaacatggcctacacctacctgcctaccaactggaccggactgtgcgtgctggctacactgctgcctgacatcgacatcatccctggcgacgagcccgtgcctattcctgccatcgaccacttcatctacagacccaagcgggctatccagttcatcccactgctggccggactgggaatcaccgccgcttttacaacaggcgctacaggactgggcgtgtccgtgacacagtacaccaagctgagcaaccagctgatctccgacgtgcagatcctgagcagcaccatccaggacctccaggatcaggtggactctctggccgaagtggtgctccagaacagaagaggactggacctgctgacagccgagcaaggcggaatttgtctggccctgcaagagaagtgctgcttctacgtgaacaagagcggcatcgtgcgcgacaagatcaagacactgcaagaggaactggaacggcggagaaaggacctggcctccaatcctctgtggaccggcctgcaaggactgctcccttacctgctgcctttcctgggaccactgctgactctgctgctcctgctgaccatcggaccctgcatcttcaacagactgaccgccttcatcaacgacaagctgaacatcatccacgctatgccataa

SEQ ID NO: 3726 - DNA, 1740 bp, synthetic construct
  source 1..1740: mol_type = other DNA
atgggctttacgaccaagatcatcttcctgtacaacctggtgctggtgtacgccggcttcgacgatcctagaaaggccatcgagctggtgcagaagagatacggcagaccctgcgattgctctggcggccaagtttctgagcctcctagcgacagagtgtcccaagtgacctgtagcggcaagaccgcctacctgatgcctgaccagagatggaagtgcaagagcatccccaaggacacaagccctagcggccctctgcaagagtgcccctgtaatagctaccagagcagcgtgcacagctcctgctacacaagctaccagcagtgcagaagcggcaacaagacctactacaccgccacactgctgaaaacccagaccggcggcacatccgatgttcaggtgctgggcagcaccaacaagctgattcagagcccctgcaacggcatcaagggccagagcatctgctggtccacaacagcccctatccacgtgtcagatggcggcggacctctggacaccaccagaatcaagagcgtgcagcggaagctggaagagatccacaaggctctgtaccccgaactccagtatcaccctctggctatccccaaagtgcgggacaacctgatggtggacgcccagacactgaatatcctgaacgccacctacaatctgctgctgatgagcaacaccagcctggtggacgattgctggctgtgcctgaaactgggacctcctacacctctggcaattcccaacttcctgctgagctacgtgaccagaagcagcgacaacatcagctgcctgattatcccacctctgctcgtgcagcccatgcagttcagcaactcctcctgcctgttcagccccagctacaacagcaccgaggaaatcgacctgggacacgtggccttctccaactgcacctccatcaccaacgtgacaggccctatctgcgccgtgaatggcagcgtgttcctgtgtggcaacaacatggcctacacctacctgcctaccaactggaccggactgtgcgtgctggctacactgctgcctgacatcgacatcatccctggcgacgagcccgtgcctattcctgccatcgaccacttcatctacagacccaagcgggctatccagttcatcccactgctggccggactgggaatcaccgccgcttttacaacaggcgctacaggactgggcgtgtccgtgacacagtacaccaagctgagcaaccagctgatctccgacgtgcagatcctgagcagcaccatccaggacctccaggatcaggtggactctctggccgaagtggtgctccagaacagaagaggactggacctgctgacagccgagcaaggcggaatttgtctggccctgcaagagaagtgctgcttctacgtgaacaagagcggcatcgtgcgcgacaagatcaagacactgcaagaggaactggaacggcggagaaaggacctggcctccaatcctctgtggaccggcctgcaaggactgctcccttacctgctgcctttcctgggaccactgctgactctgctgctcctgctgaccatcggaccctgcatcttcaacagactgaccgccttcatcaacgacaagctgaacatcatccacgctggatccactagtccagtgtggtggaattctgcagatatccagcacagtggcggccgctcgagtctagagggcccgaacaaaaactcatctcagaagaggatctga

SEQ ID NO: 3727 - DNA, 1737 bp, synthetic construct
  source 1..1737: mol_type = other DNA
atgggctttacgaccaagatcatcttcctgtacaacctggtgctggtgtacgccggcttcgacgatcctagaaaggccatcgagctggtgcagaagagatacggcagaccctgcgattgctctggcggccaagtttctgagcctcctagcgacagagtgtcccaagtgacctgtagcggcaagaccgcctacctgatgcctgaccagagatggaagtgcaagagcatccccaaggacacaagccctagcggccctctgcaagagtgcccctgtaatagctaccagagcagcgtgcacagctcctgctacacaagctaccagcagtgcagaagcggcaacaagacctactacaccgccacactgctgaaaacccagaccggcggcacatccgatgttcaggtgctgggcagcaccaacaagctgattcagagcccctgcaacggcatcaagggccagagcatctgctggtccacaacagcccctatccacgtgtcagatggcggcggacctctggacaccaccagaatcaagagcgtgcagcggaagctggaagagatccacaaggctctgtaccccgaactccagtatcaccctctggctatccccaaagtgcgggacaacctgatggtggacgcccagacactgaatatcctgaacgccacctacaatctgctgctgatgagcaacaccagcctggtggacgattgctggctgtgcctgaaactgggacctcctacacctctggcaattcccaacttcctgctgagctacgtgaccagaagcagcgacaacatcagctgcctgattatcccacctctgctcgtgcagcccatgcagttcagcaactcctcctgcctgttcagccccagctacaacagcaccgaggaaatcgacctgggacacgtggccttctccaactgcacctccatcaccaacgtgacaggccctatctgcgccgtgaatggcagcgtgttcctgtgtggcaacaacatggcctacacctacctgcctaccaactggaccggactgtgcgtgctggctacactgctgcctgacatcgacatcatccctggcgacgagcccgtgcctattcctgccatcgaccacttcatctacagacccaagcgggctatccagttcatcccactgctggccggactgggaatcaccgccgcttttacaacaggcgctacaggactgggcgtgtccgtgacacagtacaccaagctgagcaaccagctgatctccgacgtgcagatcctgagcagcaccatccaggacctccaggatcaggtggactctctggccgaagtggtgctccagaacagaagaggactggacctgctgacagccgagcaaggcggaatttgtctggccctgcaagagaagtgctgcttctacgtgaacaagagcggcatcgtgcgcgacaagatcaagacactgcaagaggaactggaacggcggagaaaggacctggcctccaatcctctgtggaccggcctgcaaggactgctcccttacctgctgcctttcctgggaccactgctgactctgctgctcctgctgaccatcggaccctgcatcttcaacagactgaccgccttcatcaacgacaagctgaacatcatccacggatccactagtccagtgtggtggaattctgcagatatccagcacagtggcggccgctcgagtctagagggcccgaacaaaaactcatctcagaagaggatctga

SEQ ID NO: 3728 - DNA, 1734 bp, synthetic construct
  source 1..1734: mol_type = other DNA
atgggctttacgaccaagatcatcttcctgtacaacctggtgctggtgtacgccggcttcgacgatcctagaaaggccatcgagctggtgcagaagagatacggcagaccctgcgattgctctggcggccaagtttctgagcctcctagcgacagagtgtcccaagtgacctgtagcggcaagaccgcctacctgatgcctgaccagagatggaagtgcaagagcatccccaaggacacaagccctagcggccctctgcaagagtgcccctgtaatagctaccagagcagcgtgcacagctcctgctacacaagctaccagcagtgcagaagcggcaacaagacctactacaccgccacactgctgaaaacccagaccggcggcacatccgatgttcaggtgctgggcagcaccaacaagctgattcagagcccctgcaacggcatcaagggccagagcatctgctggtccacaacagcccctatccacgtgtcagatggcggcggacctctggacaccaccagaatcaagagcgtgcagcggaagctggaagagatccacaaggctctgtaccccgaactccagtatcaccctctggctatccccaaagtgcgggacaacctgatggtggacgcccagacactgaatatcctgaacgccacctacaatctgctgctgatgagcaacaccagcctggtggacgattgctggctgtgcctgaaactgggacctcctacacctctggcaattcccaacttcctgctgagctacgtgaccagaagcagcgacaacatcagctgcctgattatcccacctctgctcgtgcagcccatgcagttcagcaactcctcctgcctgttcagccccagctacaacagcaccgaggaaatcgacctgggacacgtggccttctccaactgcacctccatcaccaacgtgacaggccctatctgcgccgtgaatggcagcgtgttcctgtgtggcaacaacatggcctacacctacctgcctaccaactggaccggactgtgcgtgctggctacactgctgcctgacatcgacatcatccctggcgacgagcccgtgcctattcctgccatcgaccacttcatctacagacccaagcgggctatccagttcatcccactgctggccggactgggaatcaccgccgcttttacaacaggcgctacaggactgggcgtgtccgtgacacagtacaccaagctgagcaaccagctgatctccgacgtgcagatcctgagcagcaccatccaggacctccaggatcaggtggactctctggccgaagtggtgctccagaacagaagaggactggacctgctgacagccgagcaaggcggaatttgtctggccctgcaagagaagtgctgcttctacgtgaacaagagcggcatcgtgcgcgacaagatcaagacactgcaagaggaactggaacggcggagaaaggacctggcctccaatcctctgtggaccggcctgcaaggactgctcccttacctgctgcctttcctgggaccactgctgactctgctgctcctgctgaccatcggaccctgcatcttcaacagactgaccgccttcatcaacgacaagctgaacatcatcggatccactagtccagtgtggtggaattctgcagatatccagcacagtggcggccgctcgagtctagagggcccgaacaaaaactcatctcagaagaggatctga

SEQ ID NO: 3729 - DNA, 1731 bp, synthetic construct
  source 1..1731: mol_type = other DNA
atgggctttacgaccaagatcatcttcctgtacaacctggtgctggtgtacgccggcttcgacgatcctagaaaggccatcgagctggtgcagaagagatacggcagaccctgcgattgctctggcggccaagtttctgagcctcctagcgacagagtgtcccaagtgacctgtagcggcaagaccgcctacctgatgcctgaccagagatggaagtgcaagagcatccccaaggacacaagccctagcggccctctgcaagagtgcccctgtaatagctaccagagcagcgtgcacagctcctgctacacaagctaccagcagtgcagaagcggcaacaagacctactacaccgccacactgctgaaaacccagaccggcggcacatccgatgttcaggtgctgggcagcaccaacaagctgattcagagcccctgcaacggcatcaagggccagagcatctgctggtccacaacagcccctatccacgtgtcagatggcggcggacctctggacaccaccagaatcaagagcgtgcagcggaagctggaagagatccacaaggctctgtaccccgaactccagtatcaccctctggctatccccaaagtgcgggacaacctgatggtggacgcccagacactgaatatcctgaacgccacctacaatctgctgctgatgagcaacaccagcctggtggacgattgctggctgtgcctgaaactgggacctcctacacctctggcaattcccaacttcctgctgagctacgtgaccagaagcagcgacaacatcagctgcctgattatcccacctctgctcgtgcagcccatgcagttcagcaactcctcctgcctgttcagccccagctacaacagcaccgaggaaatcgacctgggacacgtggccttctccaactgcacctccatcaccaacgtgacaggccctatctgcgccgtgaatggcagcgtgttcctgtgtggcaacaacatggcctacacctacctgcctaccaactggaccggactgtgcgtgctggctacactgctgcctgacatcgacatcatccctggcgacgagcccgtgcctattcctgccatcgaccacttcatctacagacccaagcgggctatccagttcatcccactgctggccggactgggaatcaccgccgcttttacaacaggcgctacaggactgggcgtgtccgtgacacagtacaccaagctgagcaaccagctgatctccgacgtgcagatcctgagcagcaccatccaggacctccaggatcaggtggactctctggccgaagtggtgctccagaacagaagaggactggacctgctgacagccgagcaaggcggaatttgtctggccctgcaagagaagtgctgcttctacgtgaacaagagcggcatcgtgcgcgacaagatcaagacactgcaagaggaactggaacggcggagaaaggacctggcctccaatcctctgtggaccggcctgcaaggactgctcccttacctgctgcctttcctgggaccactgctgactctgctgctcctgctgaccatcggaccctgcatcttcaacagactgaccgccttcatcaacgacaagctgaacatcggatccactagtccagtgtggtggaattctgcagatatccagcacagtggcggccgctcgagtctagagggcccgaacaaaaactcatctcagaagaggatctga

SEQ ID NO: 3730 - DNA, 1728 bp, synthetic construct
  source 1..1728: mol_type = other DNA
atgggctttacgaccaagatcatcttcctgtacaacctggtgctggtgtacgccggcttcgacgatcctagaaaggccatcgagctggtgcagaagagatacggcagaccctgcgattgctctggcggccaagtttctgagcctcctagcgacagagtgtcccaagtgacctgtagcggcaagaccgcctacctgatgcctgaccagagatggaagtgcaagagcatccccaaggacacaagccctagcggccctctgcaagagtgcccctgtaatagctaccagagcagcgtgcacagctcctgctacacaagctaccagcagtgcagaagcggcaacaagacctactacaccgccacactgctgaaaacccagaccggcggcacatccgatgttcaggtgctgggcagcaccaacaagctgattcagagcccctgcaacggcatcaagggccagagcatctgctggtccacaacagcccctatccacgtgtcagatggcggcggacctctggacaccaccagaatcaagagcgtgcagcggaagctggaagagatccacaaggctctgtaccccgaactccagtatcaccctctggctatccccaaagtgcgggacaacctgatggtggacgcccagacactgaatatcctgaacgccacctacaatctgctgctgatgagcaacaccagcctggtggacgattgctggctgtgcctgaaactgggacctcctacacctctggcaattcccaacttcctgctgagctacgtgaccagaagcagcgacaacatcagctgcctgattatcccacctctgctcgtgcagcccatgcagttcagcaactcctcctgcctgttcagccccagctacaacagcaccgaggaaatcgacctgggacacgtggccttctccaactgcacctccatcaccaacgtgacaggccctatctgcgccgtgaatggcagcgtgttcctgtgtggcaacaacatggcctacacctacctgcctaccaactggaccggactgtgcgtgctggctacactgctgcctgacatcgacatcatccctggcgacgagcccgtgcctattcctgccatcgaccacttcatctacagacccaagcgggctatccagttcatcccactgctggccggactgggaatcaccgccgcttttacaacaggcgctacaggactgggcgtgtccgtgacacagtacaccaagctgagcaaccagctgatctccgacgtgcagatcctgagcagcaccatccaggacctccaggatcaggtggactctctggccgaagtggtgctccagaacagaagaggactggacctgctgacagccgagcaaggcggaatttgtctggccctgcaagagaagtgctgcttctacgtgaacaagagcggcatcgtgcgcgacaagatcaagacactgcaagaggaactggaacggcggagaaaggacctggcctccaatcctctgtggaccggcctgcaaggactgctcccttacctgctgcctttcctgggaccactgctgactctgctgctcctgctgaccatcggaccctgcatcttcaacagactgaccgccttcatcaacgacaagctgaacggatccactagtccagtgtggtggaattctgcagatatccagcacagtggcggccgctcgagtctagagggcccgaacaaaaactcatctcagaagaggatctga

SEQ ID NO: 3731 - DNA, 1725 bp, synthetic construct
  source 1..1725: mol_type = other DNA
atgggctttacgaccaagatcatcttcctgtacaacctggtgctggtgtacgccggcttcgacgatcctagaaaggccatcgagctggtgcagaagagatacggcagaccctgcgattgctctggcggccaagtttctgagcctcctagcgacagagtgtcccaagtgacctgtagcggcaagaccgcctacctgatgcctgaccagagatggaagtgcaagagcatccccaaggacacaagccctagcggccctctgcaagagtgcccctgtaatagctaccagagcagcgtgcacagctcctgctacacaagctaccagcagtgcagaagcggcaacaagacctactacaccgccacactgctgaaaacccagaccggcggcacatccgatgttcaggtgctgggcagcaccaacaagctgattcagagcccctgcaacggcatcaagggccagagcatctgctggtccacaacagcccctatccacgtgtcagatggcggcggacctctggacaccaccagaatcaagagcgtgcagcggaagctggaagagatccacaaggctctgtaccccgaactccagtatcaccctctggctatccccaaagtgcgggacaacctgatggtggacgcccagacactgaatatcctgaacgccacctacaatctgctgctgatgagcaacaccagcctggtggacgattgctggctgtgcctgaaactgggacctcctacacctctggcaattcccaacttcctgctgagctacgtgaccagaagcagcgacaacatcagctgcctgattatcccacctctgctcgtgcagcccatgcagttcagcaactcctcctgcctgttcagccccagctacaacagcaccgaggaaatcgacctgggacacgtggccttctccaactgcacctccatcaccaacgtgacaggccctatctgcgccgtgaatggcagcgtgttcctgtgtggcaacaacatggcctacacctacctgcctaccaactggaccggactgtgcgtgctggctacactgctgcctgacatcgacatcatccctggcgacgagcccgtgcctattcctgccatcgaccacttcatctacagacccaagcgggctatccagttcatcccactgctggccggactgggaatcaccgccgcttttacaacaggcgctacaggactgggcgtgtccgtgacacagtacaccaagctgagcaaccagctgatctccgacgtgcagatcctgagcagcaccatccaggacctccaggatcaggtggactctctggccgaagtggtgctccagaacagaagaggactggacctgctgacagccgagcaaggcggaatttgtctggccctgcaagagaagtgctgcttctacgtgaacaagagcggcatcgtgcgcgacaagatcaagacactgcaagaggaactggaacggcggagaaaggacctggcctccaatcctctgtggaccggcctgcaaggactgctcccttacctgctgcctttcctgggaccactgctgactctgctgctcctgctgaccatcggaccctgcatcttcaacagactgaccgccttcatcaacgacaagctgggatccactagtccagtgtggtggaattctgcagatatccagcacagtggcggccgctcgagtctagagggcccgaacaaaaactcatctcagaagaggatctga

SEQ ID NO: 3732 - DNA, 1722 bp, synthetic construct
  source 1..1722: mol_type = other DNA
atgggctttacgaccaagatcatcttcctgtacaacctggtgctggtgtacgccggcttcgacgatcctagaaaggccatcgagctggtgcagaagagatacggcagaccctgcgattgctctggcggccaagtttctgagcctcctagcgacagagtgtcccaagtgacctgtagcggcaagaccgcctacctgatgcctgaccagagatggaagtgcaagagcatccccaaggacacaagccctagcggccctctgcaagagtgcccctgtaatagctaccagagcagcgtgcacagctcctgctacacaagctaccagcagtgcagaagcggcaacaagacctactacaccgccacactgctgaaaacccagaccggcggcacatccgatgttcaggtgctgggcagcaccaacaagctgattcagagcccctgcaacggcatcaagggccagagcatctgctggtccacaacagcccctatccacgtgtcagatggcggcggacctctggacaccaccagaatcaagagcgtgcagcggaagctggaagagatccacaaggctctgtaccccgaactccagtatcaccctctggctatccccaaagtgcgggacaacctgatggtggacgcccagacactgaatatcctgaacgccacctacaatctgctgctgatgagcaacaccagcctggtggacgattgctggctgtgcctgaaactgggacctcctacacctctggcaattcccaacttcctgctgagctacgtgaccagaagcagcgacaacatcagctgcctgattatcccacctctgctcgtgcagcccatgcagttcagcaactcctcctgcctgttcagccccagctacaacagcaccgaggaaatcgacctgggacacgtggccttctccaactgcacctccatcaccaacgtgacaggccctatctgcgccgtgaatggcagcgtgttcctgtgtggcaacaacatggcctacacctacctgcctaccaactggaccggactgtgcgtgctggctacactgctgcctgacatcgacatcatccctggcgacgagcccgtgcctattcctgccatcgaccacttcatctacagacccaagcgggctatccagttcatcccactgctggccggactgggaatcaccgccgcttttacaacaggcgctacaggactgggcgtgtccgtgacacagtacaccaagctgagcaaccagctgatctccgacgtgcagatcctgagcagcaccatccaggacctccaggatcaggtggactctctggccgaagtggtgctccagaacagaagaggactggacctgctgacagccgagcaaggcggaatttgtctggccctgcaagagaagtgctgcttctacgtgaacaagagcggcatcgtgcgcgacaagatcaagacactgcaagaggaactggaacggcggagaaaggacctggcctccaatcctctgtggaccggcctgcaaggactgctcccttacctgctgcctttcctgggaccactgctgactctgctgctcctgctgaccatcggaccctgcatcttcaacagactgaccgccttcatcaacgacaagggatccactagtccagtgtggtggaattctgcagatatccagcacagtggcggccgctcgagtctagagggcccgaacaaaaactcatctcagaagaggatctga

SEQ ID NO: 3733 - DNA, 1617 bp, synthetic construct; identical to SEQ ID NO: 3665
  source 1..1617: mol_type = other DNA

SEQ ID NO: 3734 - DNA, 60 bp, synthetic construct
  source 1..60: mol_type = other DNA
atggccctcccttatcatatttttctctttactgttcttttaccctctttcactctcact

SEQ ID NO: 3735 - DNA, 1269 bp, synthetic construct
  source 1..1269: mol_type = other DNA
gcaccccctccatgccgctgtatgaccagtagctccccttaccaagagtttctatggagaatgcagcgtcccggaaatattgatgccccatcgtataggagtctttctaagggaacccccaccttcactgcccacacccatatgccccgcaactgctatcactctgccactctttgcatgcatgcaaatactcattattggacaggaaaaatgattaatcctagttgtcctggaggacttggagtcactgtctgttggacttacttcacccaaactggtatgtctgatgggggtggagttcaagatcaggcaagagaaaaacatgtaaaagaagtaatctcccaactcacccgggtacatggcacctctagcccctacaaaggactagatctctcaaaactacatgaaaccctccgtacccatactcgcctggtaagcctatttaataccaccctcactgggctccatgaggtctcggcccaaaaccctactaactgttggatatgcctccccctgaacttcaggccatatgtttcaatccctgtacctgaacaatggaacaacttcagcacagaaataaacaccacttccgttttagtaggacctcttgtttccaatctggaaataacccatacctcaaacctcacctgtgtaaaatttagcaatactacatacacaaccaactcccaatgcatcaggtgggtaactcctcccacacaaatagtctgcctaccctcaggaatattttttgtctgtggaacctcagcctatcgttgtttgaatggctcttcagaatctatgtgcttcctctcattcttagtgccccctatgaccatctacactgaacaagatttatacagttatgtcatatctaagccccgcaacaaaagagtacccattcttccttttgttataggagcaggagtgctaggtgcactaggtactggcattggcggtatcacaacctctactcagttctactacaaactatctcaagaactaaatggggacatggaacgggtcgccgactccctggtcaccttgcaagatcaacttaactccctagcagcagtagtccttcaaaatcgaagagctttagacttgctaaccgctgaaagagggggaacctgtttatttttaggggaagaatgctgttattatgttaatcaatccggaatcgtcactgagaaagttaaagaaattcgagatcgaatacaacgtagagcagaggagctccgaaacactggaccctggggcctcctcagccaa

SEQ ID NO: 3736 - DNA, 63 bp, synthetic construct
  source 1..63: mol_type = other DNA
tggatgccctggattctccccttcttaggacctctagcagctataatattgctactcctcttt

SEQ ID NO: 3737 - DNA, 222 bp, synthetic construct
  source 1..222: mol_type = other DNA
ggaccctgtatctttaacctccttgttaactttgtctcttccagaatcgaagctgtaaaactacaaatggagcccaagatgcagtccaagactaagatctaccgcagacccctggaccggcctgccagcccacgatctgatgttaatgacatcaaaggcacccctcctgaggaaatctcagctgcacaacctctactacgccccaattcagcaggaagcagt

SEQ ID NO: 3738 - DNA, 1392 bp, synthetic construct
  source 1..1392: mol_type = other DNA
atggccctcccttatcatatttttctctttactgttcttttaccctctttcactctcactgcaccccctccatgccgctgtatgaccagtagctccccttaccaagagtttctatggagaatgcagcgtcccggaaatattgatgccccatcgtataggagtctttctaagggaacccccaccttcactgcccacacccatatgccccgcaactgctatcactctgccactctttgcatgcatgcaaatactcattattggacaggaaaaatgattaatcctagttgtcctggaggacttggagtcactgtctgttggacttacttcacccaaactggtatgtctgatgggggtggagttcaagatcaggcaagagaaaaacatgtaaaagaagtaatctcccaactcacccgggtacatggcacctctagcccctacaaaggactagatctctcaaaactacatgaaaccctccgtacccatactcgcctggtaagcctatttaataccaccctcactgggctccatgaggtctcggcccaaaaccctactaactgttggatatgcctccccctgaacttcaggccatatgtttcaatccctgtacctgaacaatggaacaacttcagcacagaaataaacaccacttccgttttagtaggacctcttgtttccaatctggaaataacccatacctcaaacctcacctgtgtaaaatttagcaatactacatacacaaccaactcccaatgcatcaggtgggtaactcctcccacacaaatagtctgcctaccctcaggaatattttttgtctgtggaacctcagcctatcgttgtttgaatggctcttcagaatctatgtgcttcctctcattcttagtgccccctatgaccatctacactgaacaagatttatacagttatgtcatatctaagccccgcaacaaaagagtacccattcttccttttgttataggagcaggagtgctaggtgcactaggtactggcattggcggtatcacaacctctactcagttctactacaaactatctcaagaactaaatggggacatggaacgggtcgccgactccctggtcaccttgcaagatcaacttaactccctagcagcagtagtccttcaaaatcgaagagctttagacttgctaaccgctgaaagagggggaacctgtttatttttaggggaagaatgctgttattatgttaatcaatccggaatcgtcactgagaaagttaaagaaattcgagatcgaatacaacgtagagcagaggagctccgaaacactggaccctggggcctcctcagccaatggatgccctggattctccccttcttaggacctctagcagctataatattgctactcctcttt

SEQ ID NO: 3739 - DNA, 1620 bp, synthetic construct; identical to SEQ ID NO: 3667
  source 1..1620: mol_type = other DNA

SEQ ID NO: 3740 - DNA, 63 bp, synthetic construct
  source 1..63: mol_type = other DNA
atggagacagacacactcctgctatgggtactgctgctctgggttccaggttccactggtgac

SEQ ID NO: 3741 - DNA, 1269 bp, synthetic construct
  source 1..1269: mol_type = other DNA
gcaccccctccatgccgctgtatgacaagcagcagcccctaccaagagttcctgtggcgaatgcagaggcccggcaacattgacgcccctagctacagaagcctgagcaagggcacccctaccttcacagcccacacacacatgccccggaactgctaccatagcgccacactgtgtatgcacgccaacacacactactggaccggcaagatgattaaccctagctgccctggcggcctgggcgtgacagtttgttggacctactttacccagaccggcatgtccgatggtggcggagttcaagaccaggccagagaaaagcacgtgaaagaagtgatctcccagctgaccagagtgcacggcacaagcagcccttacaaaggactggacctgtccaagctgcacgagacactgagaacccacacacggctggtgtccctgttcaacaccacactgaccggactgcacgaggtgtccgctcagaatcctaccaactgctggatctgcctgcctctgaacttcagaccctacgtgtcaatccccgtgcctgagcagtggaacaacttcagcaccgagatcaataccaccagcgtgctcgtgggacccctggtgtccaatctggaaatcacccacaccagcaacctgacctgcgtgaagttctccaacaccacctacaccaccaacagccagtgcatcagatgggtcacccctccaacacagatcgtgtgtctgcccagcggcatcttcttcgtgtgtggcacaagcgcctaccgctgcctgaatggcagcagcgagtctatgtgcttcctgagcttcctggtgcctcctatgaccatctacaccgagcaggacctgtacagctacgtgatctccaagcctcggaacaagcgggtgcccatcctgccttttgtgattggagctggcgtgctgggagccctcggaactggaatcggaggcatcaccacctctactcagttctactacaaactatctcaagaactaaatggggacatggaaagagtggccgacagcctggtcacactccaggaccagctcaattctctggctgccgtggtgctccagaatcggagagcactcgatctgctgacagccgagagaggcggcacctgtctgtttctgggcgaagagtgctgctactacgtgaaccagtccggaatcgtcactgagaaagttaaagaaattcgagatcgaatccagcggagagccgaggaactgagaaacacaggaccttggggcctgctgagccag

SEQ ID NO: 3742 - DNA, 63 bp, synthetic construct
  source 1..63: mol_type = other DNA
tggatgccttggattctgcccttcctgggacctctggccgccatcattctgctgctgctgttc

SEQ ID NO: 3743 - DNA, 222 bp, synthetic construct
  source 1..222: mol_type = other DNA
ggcccctgtatctttaacctccttgttaactttgtctcttccagaatcgaagctgtaaaactacaaatggagcccaagatgcagtccaagactaagatctaccgcagacccctggaccggcctgccagcccacgatctgatgttaatgacatcaaaggcacccctcctgaggaaatctcagctgcacaacctctactacgccccaattcagcaggaagcagt

SEQ ID NO: 3744 - DNA, 1560 bp, synthetic construct
  source 1..1560: mol_type = other DNA
atggccctcccttatcatatttttctctttactgttcttttaccctctttcactctcactgcaccccctccatgccgctgtatgaccagtagctccccttaccaagagtttctatggagaatgcagcgtcccggaaatattgatgccccatcgtataggagtctttctaagggaacccccaccttcactgcccacacccatatgccccgcaactgctatcactctgccactctttgcatgcatgcaaatactcattattggacaggaaaaatgattaatcctagttgtcctggaggacttggagtcactgtctgttggacttacttcacccaaactggtatgtctgatgggggtggagttcaagatcaggcaagagaaaaacatgtaaaagaagtaatctcccaactcacccgggtacatggcacctctagcccctacaaaggactagatctctcaaaactacatgaaaccctccgtacccatactcgcctggtaagcctatttaataccaccctcactgggctccatgaggtctcggcccaaaaccctactaactgttggatatgcctccccctgaacttcaggccatatgtttcaatccctgtacctgaacaatggaacaacttcagcacagaaataaacaccacttccgttttagtaggacctcttgtttccaatctggaaataacccatacctcaaacctcacctgtgtaaaatttagcaatactacatacacaaccaactcccaatgcatcaggtgggtaactcctcccacacaaatagtctgcctaccctcaggaatattttttgtctgtggaacctcagcctatcgttgtttgaatggctcttcagaatctatgtgcttcctctcattcttagtgccccctatgaccatctacactgaacaagatttatacagttatgtcatatctaagccccgcaacaaaagagtacccattcttccttttgttataggagcaggagtgctaggtgcactaggtactggcattggcggtatcacaacctctactcagttctactacaaactatctcaagaactaaatggggacatggaacgggtcgccgactccctggtcaccttgcaagatcaacttaactccctagcagcagtagtccttcaaaatcgaagagctttagacttgctaaccgctgaaagagggggaacctgtttatttttaggggaagaatgctgttattatgttaatcaatccggaatcgtcactgagaaagttaaagaaattcgagatcgaatacaacgtagagcagaggagctccgaaacactggaccctggggcctcctcagccaatggatgccctggattctccccttcttaggacctctagcagctataatattgctactcctctttggaccctgtatctttaacctccttgttaactttgtctcttccagaatcgaagctgtaaaactaggatccactagtccagtgtggtggaattctgcagatatccagcacagtggcggccgctcgagtctagagggcccgaacaaaaactcatctcagaagaggatctga

SEQ ID NO: 3745 - DNA, 1563 bp, synthetic construct
  source 1..1563: mol_type = other DNA
atggagacagacacactcctgctatgggtactgctgctctgggttccaggttccactggtgacgcaccccctccatgccgctgtatgacaagcagcagcccctaccaagagttcctgtggcgaatgcagaggcccggcaacattgacgcccctagctacagaagcctgagcaagggcacccctaccttcacagcccacacacacatgccccggaactgctaccatagcgccacactgtgtatgcacgccaacacacactactggaccggcaagatgattaaccctagctgccctggcggcctgggcgtgacagtttgttggacctactttacccagaccggcatgtccgatggtggcggagttcaagaccaggccagagaaaagcacgtgaaagaagtgatctcccagctgaccagagtgcacggcacaagcagcccttacaaaggactggacctgtccaagctgcacgagacactgagaacccacacacggctggtgtccctgttcaacaccacactgaccggactgcacgaggtgtccgctcagaatcctaccaactgctggatctgcctgcctctgaacttcagaccctacgtgtcaatccccgtgcctgagcagtggaacaacttcagcaccgagatcaataccaccagcgtgctcgtgggacccctggtgtccaatctggaaatcacccacaccagcaacctgacctgcgtgaagttctccaacaccacctacaccaccaacagccagtgcatcagatgggtcacccctccaacacagatcgtgtgtctgcccagcggcatcttcttcgtgtgtggcacaagcgcctaccgctgcctgaatggcagcagcgagtctatgtgcttcctgagcttcctggtgcctcctatgaccatctacaccgagcaggacctgtacagctacgtgatctccaagcctcggaacaagcgggtgcccatcctgccttttgtgattggagctggcgtgctgggagccctcggaactggaatcggaggcatcaccacctctactcagttctactacaaactatctcaagaactaaatggggacatggaaagagtggccgacagcctggtcacactccaggaccagctcaattctctggctgccgtggtgctccagaatcggagagcactcgatctgctgacagccgagagaggcggcacctgtctgtttctgggcgaagagtgctgctactacgtgaaccagtccggaatcgtcactgagaaagttaaagaaattcgagatcgaatccagcggagagccgaggaactgagaaacacaggaccttggggcctgctgagccagtggatgccttggattctgcccttcctgggacctctggccgccatcattctgctgctgctgttcggcccctgtatctttaacctccttgttaactttgtctcttccagaatcgaagctgtaaaactaggatccactagtccagtgtggtggaattctgcagatatccagcacagtggcggccgctcgagtctagagggcccgaacaaaaactcatctcagaagaggatctga

SEQ ID NO: 3746 - DNA, 1446 bp, synthetic construct
  source 1..1446: mol_type = other DNA
atggagacagacacactcctgctatgggtactgctgctctgggttccaggttccactggtgacgcaccccctccatgccgctgtatgacaagcagcagcccctaccaagagttcctgtggcgaatgcagaggcccggcaacattgacgcccctagctacagaagcctgagcaagggcacccctaccttcacagcccacacacacatgccccggaactgctaccatagcgccacactgtgtatgcacgccaacacacactactggaccggcaagatgattaaccctagctgccctggcggcctgggcgtgacagtttgttggacctactttacccagaccggcatgtccgatggtggcggagttcaagaccaggccagagaaaagcacgtgaaagaagtgatctcccagctgaccagagtgcacggcacaagcagcccttacaaaggactggacctgtccaagctgcacgagacactgagaacccacacacggctggtgtccctgttcaacaccacactgaccggactgcacgaggtgtccgctcagaatcctaccaactgctggatctgcctgcctctgaacttcagaccctacgtgtcaatccccgtgcctgagcagtggaacaacttcagcaccgagatcaataccaccagcgtgctcgtgggacccctggtgtccaatctggaaatcacccacaccagcaacctgacctgcgtgaagttctccaacaccacctacaccaccaacagccagtgcatcagatgggtcacccctccaacacagatcgtgtgtctgcccagcggcatcttcttcgtgtgtggcacaagcgcctaccgctgcctgaatggcagcagcgagtctatgtgcttcctgagcttcctggtgcctcctatgaccatctacaccgagcaggacctgtacagctacgtgatctccaagcctcggaacaagcgggtgcccatcctgccttttgtgattggagctggcgtgctgggagccctcggaactggaatcggaggcatcaccacctctactcagttctactacaaactatctcaagaactaaatggggacatggaaagagtggccgacagcctggtcacactccaggaccagctcaattctctggctgccgtggtgctccagaatcggagagcactcgatctgctgacagccgagagaggcggcacctgtctgtttctgggcgaagagtgctgctactacgtgaaccagtccggaatcgtcactgagaaagttaaagaaattcgagatcgaatccagcggagagccgaggaactgagaaacacaggaccttggggcctgctgagccagtggatgccttggattctgcccttcctgggacctctggccgccatcattctgctgctgctgttcggcccctgtatctttaacctccttgttaactttgtctcttccagaatctaa

SEQ ID NO: 3747 - DNA, 1455 bp, synthetic construct
  source 1..1455: mol_type = other DNA
atggagacagacacactcctgctatgggtactgctgctctgggttccaggttccactggtgacgcaccccctccatgccgctgtatgacaagcagcagcccctaccaagagttcctgtggcgaatgcagaggcccggcaacattgacgcccctagctacagaagcctgagcaagggcacccctaccttcacagcccacacacacatgccccggaactgctaccatagcgccacactgtgtatgcacgccaacacacactactggaccggcaagatgattaaccctagctgccctggcggcctgggcgtgacagtttgttggacctactttacccagaccggcatgtccgatggtggcggagttcaagaccaggccagagaaaagcacgtgaaagaagtgatctcccagttgaccagagtgcacggcacaagcagcccttacaaaggactggacctgtccaagctgcacgagacactgagaacccacacacggctggtgtccctgttcaacaccacactgaccggactgcacgaggtgtccgctcagaatcctaccaactgctggatctgcctgcctctgaacttcagaccctacgtgtcaatccccgtgcctgagcagtggaacaacttcagcaccgagatcaataccaccagcgtgctcgtgggacccctggtgtccaatctggaaatcacccacaccagcaacctgacctgcgtgaagttctccaacaccacctacaccaccaacagccagtgcatcagatgggtcacccctccaacacagatcgtgtgtctgcccagcggcatcttcttcgtgtgtggcacaagcgcctaccgctgcctgaatggcagcagcgagtctatgtgcttcctgagcttcctggtgcctcctatgaccatctacaccgagcaggacctgtacagctacgtgatctccaagcctcggaacaagcgggtgcccatcctgccttttgtgattggagctggcgtgctgggagccctcggaactggaatcggaggcatcaccacctctactcagttctactacaaactatctcaagaactaaatggggacatggaaagagtggccgacagcctggtcacactccaggaccagctcaattctctggctgccgtggtgctccagaatcggagagcactcgatctgctgacagccgagagaggcggcacctgtctgtttctgggcgaagagtgctgctactacgtgaaccagtccggaatcgtcactgagaaagttaaagaaattcgagatcgaatccagcggagagccgaggaactgagaaacacaggaccttggggcctgctgagccagtggatgccttggattctgcccttcctgggacctctggccgccatcattctgctgctgctgttcggcccctgtatctttaacctccttgttaactttgtctcttccagaatcgaagctgtataa

SEQ ID NO: 3748 - DNA, 1455 bp, synthetic construct
  source 1..1455: mol_type = other DNA
atggagacagacacactcctgctatgggtactgctgctctgggttccaggttccactggtgacgcaccccctccatgccgctgtatgacaagcagcagcccctaccaagagttcctgtggcgaatgcagaggcccggcaacattgacgcccctagctacagaagcctgagcaagggcacccctaccttcacagcccacacacacatgccccggaactgctaccatagcgccacactgtgtatgcacgccaacacacactactggaccggcaagatgattaaccctagctgccctggcggcctgggcgtgacagtttgttggacctactttacccagaccggcatgtccgatggtggcggagttcaagaccaggccagagaaaagcacgtgaaagaagtgatctcccagctgaccagagtgcacggcacaagcagcccttacaaaggactggacctgtccaagctgcacgagacactgagaacccacacacggctggtgtccctgttcaacaccacactgaccggactgcacgaggtgtccgctcagaatcctaccaactgctggatctgcctgcctctgaacttcagaccctacgtgtcaatccccgtgcctgagcagtggaacaacttcagcaccgagatcaataccaccagcgtgctcgtgggacccctggtgtccaatctggaaatcacccacaccagcaacctgacctgcgtgaagttctccaacaccacctacaccaccaacagccagtgcatcagatgggtcacccctccaacacagatcgtgtgtctgcccagcggcatcttcttcgtgtgtggcacaagcgcctaccgctgcctgaatggcagcagcgagtctatgtgcttcctgagcttcctggtgcctcctatgaccatctacaccgagcaggacctgtacagctacgtgatctccaagcctcggaacaagcgggtgcccatcctgccttttgtgattggagctggcgtgctgggagccctcggaactggaatcggaggcatcaccacctctactcagttctactacaaactatctcaagaactaaatggggacatggaaagagtggccgacagcctggtcacactccaggaccagctcaattctctggctgccgtggtgctccagaatcggagagcactcgatctgctgacagccgagagaggcggcacctgtctgtttctgggcgaagagtgctgctactacgtgaaccagtccggaatcgtcactgagaaagttaaagaaattcgagatcgaatccagcggagagccgaggaactgagaaacacaggaccttggggcctgctgagccagtggatgccttggattctgcccttcctgggacctctggccgccatcattctgctgctgctgttcggcccctgtatctttaacctccttgttaactttgtctcttccagaatcgaagctgtataa

SEQ ID NO: 3749 - DNA, 1458 bp, synthetic construct
  source 1..1458: mol_type = other DNA
atggagacagacacactcctgctatgggtactgctgctctgggttccaggttccactggtgacgcaccccctccatgccgctgtatgacaagcagcagcccctaccaagagttcctgtggcgaatgcagaggcccggcaacattgacgcccctagctacagaagcctgagcaagggcacccctaccttcacagcccacacacacatgccccggaactgctaccatagcgccacactgtgtatgcacgccaacacacactactggaccggcaagatgattaaccctagctgccctggcggcctgggcgtgacagtttgttggacctactttacccagaccggcatgtccgatggtggcggagttcaagaccaggccagagaaaagcacgtgaaagaagtgatctcccagctgaccagagtgcacggcacaagcagcccttacaaaggactggacctgtccaagctgcacgagacactgagaacccacacacggctggtgtccctgttcaacaccacactgaccggactgcacgaggtgtccgctcagaatcctaccaactgctggatctgcctgcctctgaacttcagaccctacgtgtcaatccccgtgcctgagcagtggaacaacttcagcaccgagatcaataccaccagcgtgctcgtgggacccctggtgtccaatctggaaatcacccacaccagcaacctgacctgcgtgaagttctccaacaccacctacaccaccaacagccagtgcatcagatgggtcacccctccaacacagatcgtgtgtctgcccagcggcatcttcttcgtgtgtggcacaagcgcctaccgctgcctgaatggcagcagcgagtctatgtgcttcctgagcttcctggtgcctcctatgaccatctacaccgagcaggacctgtacagctacgtgatctccaagcctcggaacaagcgggtgcccatcctgccttttgtgattggagctggcgtgctgggagccctcggaactggaatcggaggcatcaccacctctactcagttctactacaaactatctcaagaactaaatggggacatggaaagagtggccgacagcctggtcacactccaggaccagctcaattctctggctgccgtggtgctccagaatcggagagcactcgatctgctgacagccgagagaggcggcacctgtctgtttctgggcgaagagtgctgctactacgtgaaccagtccggaatcgtcactgagaaagttaaagaaattcgagatcgaatccagcggagagccgaggaactgagaaacacaggaccttggggcctgctgagccagtggatgccttggattctgcccttcctgggacctctggccgccatcattctgctgctgctgttcggcccctgtatctttaacctccttgttaactttgtctcttccagaatcgaagctgtaaaataa

SEQ ID NO: 3750 - DNA, 1461 bp, synthetic construct
  source 1..1461: mol_type = other DNA
atggagacagacacactcctgctatgggtactgctgctctgggttccaggttccactggtgacgcaccccctccatgccgctgtatgacaagcagcagcccctaccaagagttcctgtggcgaatgcagaggcccggcaacattgacgcccctagctacagaagcctgagcaagggcacccctaccttcacagcccacacacacatgccccggaactgctaccatagcgccacactgtgtatgcacgccaacacacactactggaccggcaagatgattaaccctagctgccctggcggcctgggcgtgacagtttgttggacctactttacccagaccggcatgtccgatggtggcggagttcaagaccaggccagagaaaagcacgtgaaagaagtgatctcccagctgaccagagtgcacggcacaagcagcccttacaaaggactggacctgtccaagctgcacgagacactgagaacccacacacggctggtgtccctgttcaacaccacactgaccggactgcacgaggtgtccgctcagaatcctaccaactgctggatctgcctgcctctgaacttcagaccctacgtgtcaatccccgtgcctgagcagtggaacaacttcagcaccgagatcaataccaccagcgtgctcgtgggacccctggtgtccaatctggaaatcacccacaccagcaacctgacctgcgtgaagttctccaacaccacctacaccaccaacagccagtgcatcagatgggtcacccctccaacacagatcgtgtgtctgcccagcggcatcttcttcgtgtgtggcacaagcgcctaccgctgcctgaatggcagcagcgagtctatgtgcttcctgagcttcctggtgcctcctatgaccatctacaccgagcaggacctgtacagctacgtgatctccaagcctcggaacaagcgggtgcccatcctgccttttgtgattggagctggcgtgctgggagccctcggaactggaatcggaggcatcaccacctctactcagttctactacaaactatctcaagaactaaatggggacatggaaagagtggccgacagcctggtcacactccaggaccagctcaattctctggctgccgtggtgctccagaatcggagagcactcgatctgctgacagccgagagaggcggcacctgtctgtttctgggcgaagagtgctgctactacgtgaaccagtccggaatcgtcactgagaaagttaaagaaattcgagatcgaatccagcggagagccgaggaactgagaaacacaggaccttggggcctgctgagccagtggatgccttggattctgcccttcctgggacctctggccgccatcattctgctgctgctgttcggcccctgtatctttaacctccttgttaactttgtctcttccagaatcgaagctgtaaaactataa

SEQ ID NO: 3751 - DNA, 1464 bp, synthetic construct
  source 1..1464: mol_type = other DNA
atggagacagacacactcctgctatgggtactgctgctctgggttccaggttccactggtgacgcaccccctccatgccgctgtatgacaagcagcagcccctaccaagagttcctgtggcgaatgcagaggcccggcaacattgacgcccctagctacagaagcctgagcaagggcacccctaccttcacagcccacacacacatgccccggaactgctaccatagcgccacactgtgtatgcacgccaacacacactactggaccggcaagatgattaaccctagctgccctggcggcctgggcgtgacagtttgttggacctactttacccagaccggcatgtccgatggtggcggagttcaagaccaggccagagaaaagcacgtgaaagaagtgatctcccagctgaccagagtgcacggcacaagcagcccttacaaaggactggacctgtccaagctgcacgagacactgagaacccacacacggctggtgtccctgttcaacaccacactgaccggactgcacgaggtgtccgctcagaatcctaccaactgctggatctgcctgcctctgaacttcagaccctacgtgtcaatccccgtgcctgagcagtggaacaacttcagcaccgagatcaataccaccagcgtgctcgtgggacccctggtgtccaatctggaaatcacccacaccagcaacctgacctgcgtgaagttctccaacaccacctacaccaccaacagccagtgcatcagatgggtcacccctccaacacagatcgtgtgtctgcccagcggcatcttcttcgtgtgtggcacaagcgcctaccgctgcctgaatggcagcagcgagtctatgtgcttcctgagcttcctggtgcctcctatgaccatctacaccgagcaggacctgtacagctacgtgatctccaagcctcggaacaagcgggtgcccatcctgccttttgtgattggagctggcgtgctgggagccctcggaactggaatcggaggcatcaccacctctactcagttctactacaaactatctcaagaactaaatggggacatggaaagagtggccgacagcctggtcacactccaggaccagctcaattctctggctgccgtggtgctccagaatcggagagcactcgatctgctgacagccgagagaggcggcacctgtctgtttctgggcgaagagtgctgctactacgtgaaccagtccggaatcgtcactgagaaagttaaagaaattcgagatcgaatccagcggagagccgaggaactgagaaacacaggaccttggggcctgctgagccagtggatgccttggattctgcccttcctgggacctctggccgccatcattctgctgctgctgttcggcccctgtatctttaacctccttgttaactttgtctcttccagaatcgaagctgtaaaactacaataa

SEQ ID NO: 3752 - DNA, 1467 bp, synthetic construct
  source 1..1467: mol_type = other DNA
atggagacagacacactcctgctatgggtactgctgctctgggttccaggttccactggtgacgcaccccctccatgccgctgtatgacaagcagcagcccctaccaagagttcctgtggcgaatgcagaggcccggcaacattgacgcccctagctacagaagcctgagcaagggcacccctaccttcacagcccacacacacatgccccggaactgctaccatagcgccacactgtgtatgcacgccaacacacactactggaccggcaagatgattaaccctagctgccctggcggcctgggcgtgacagtttgttggacctactttacccagaccggcatgtccgatggtggcggagttcaagaccaggccagagaaaagcacgtgaaagaagtgatctcccagctgaccagagtgcacggcacaagcagcccttacaaaggactggacctgtccaagctgcacgagacactgagaacccacacacggctggtgtccctgttcaacaccacactgaccggactgcacgaggtgtccgctcagaatcctaccaactgctggatctgcctgcctctgaacttcagaccctacgtgtcaatccccgtgcctgagcagtggaacaacttcagcaccgagatcaataccaccagcgtgctcgtgggacccctggtgtccaatctggaaatcacccacaccagcaacctgacctgcgtgaagttctccaacaccacctacaccaccaacagccagtgcatcagatgggtcacccctccaacacagatcgtgtgtctgcccagcggcatcttcttcgtgtgtggcacaagcgcctaccgctgcctgaatggcagcagcgagtctatgtgcttcctgagcttcctggtgcctcctatgaccatctacaccgagcaggacctgtacagctacgtgatctccaagcctcggaacaagcgggtgcccatcctgccttttgtgattggagctggcgtgctgggagccctcggaactggaatcggaggcatcaccacctctactcagttctactacaaactatctcaagaactaaatggggacatggaaagagtggccgacagcctggtcacactccaggaccagctcaattctctggctgccgtggtgctccagaatcggagagcactcgatctgctgacagccgagagaggcggcacctgtctgtttctgggcgaagagtgctgctactacgtgaaccagtccggaatcgtcactgagaaagttaaagaaattcgagatcgaatccagcggagagccgaggaactgagaaacacaggaccttggggcctgctgagccagtggatgccttggattctgcccttcctgggacctctggccgccatcattctgctgctgctgttcggcccctgtatctttaacctccttgttaactttgtctcttccagaatcgaagctgtaaaactacaaatgtaa

SEQ ID NO: 3753 - DNA, 1518 bp, synthetic construct
  source 1..1518: mol_type = other DNA
atggagacagacacactcctgctatgggtactgctgctctgggttccaggttccactggtgacgcaccccctccatgccgctgtatgacaagcagcagcccctaccaagagttcctgtggcgaatgcagaggcccggcaacattgacgcccctagctacagaagcctgagcaagggcacccctaccttcacagcccacacacacatgccccggaactgctaccatagcgccacactgtgtatgcacgccaacacacactactggaccggcaagatgattaaccctagctgccctggcggcctgggcgtgacagtttgttggacctactttacccagaccggcatgtccgatggtggcggagttcaagaccaggccagagaaaagcacgtgaaagaagtgatctcccagctgaccagagtgcacggcacaagcagcccttacaaaggactggacctgtccaagctgcacgagacactgagaacccacacacggctggtgtccctgttcaacaccacactgaccggactgcacgaggtgtccgctcagaatcctaccaactgctggatctgcctgcctctgaacttcagaccctacgtgtcaatccccgtgcctgagcagtggaacaacttcagcaccgagatcaataccaccagcgtgctcgtgggacccctggtgtccaatctggaaatcacccacaccagcaacctgacctgcgtgaagttctccaacaccacctacaccaccaacagccagtgcatcagatgggtcacccctccaacacagatcgtgtgtctgcccagcggcatcttcttcgtgtgtggcacaagcgcctaccgctgcctgaatggcagcagcgagtctatgtgcttcctgagcttcctggtgcctcctatgaccatctacaccgagcaggacctgtacagctacgtgatctccaagcctcggaacaagcgggtgcccatcctgccttttgtgattggagctggcgtgctgggagccctcggaactggaatcggaggcatcaccacctctactcagttctactacaaactatctcaagaactaaatggggacatggaaagagtggccgacagcctggtcacactccaggaccagctcaattctctggctgccgtggtgctccagaatcggagagcactcgatctgctgacagccgagagaggcggcacctgtctgtttctgggcgaagagtgctgctactacgtgaaccagtccggaatcgtcactgagaaagttaaagaaattcgagatcgaatccagcggagagccgaggaactgagaaacacaggaccttggggcctgctgagccagtggatgccttggattctgcccttcctgggacctctggccgccatcattctgctgctgctgttcggcccctgtatctttaacctccttgttaactttgtctcttccagaatcgaagctgtaaaactacaaatggagcccaagatgcagtccaagactaagatctaccgcagacccctggaccggtaa

SEQ ID NO: 3754 - DNA, 1551 bp, synthetic construct
  source 1..1551: mol_type = other DNA
atggagacagacacactcctgctatgggtactgctgctctgggttccaggttccactggtgacgcaccccctccatgccgctgtatgacaagcagcagcccctaccaagagttcctgtggcgaatgcagaggcccggcaacattgacgcccctagctacagaagcctgagcaagggcacccctaccttcacagcccacacacacatgccccggaactgctaccatagcgccacactgtgtatgcacgccaacacacactactggaccggcaagatgattaaccctagctgccctggcggcctgggcgtgacagtttgttggacctactttacccagaccggcatgtccgatggtggcggagttcaagaccaggccagagaaaagcacgtgaaagaagtgatctcccagctgaccagagtgcacggcacaagcagcccttacaaaggactggacctgtccaagctgcacgagacactgagaacccacacacggctggtgtccctgttcaacaccacactgaccggactgcacgaggtgtccgctcagaatcctaccaactgctggatctgcctgcctctgaacttcagaccctacgtgtcaatccccgtgcctgagcagtggaacaacttcagcaccgagatcaataccaccagcgtgctcgtgggacccctggtgtccaatctggaaatcacccacaccagcaacctgacctgcgtgaagttctccaacaccacctacaccaccaacagccagtgcatcagatgggtcacccctccaacacagatcgtgtgtctgcccagcggcatcttcttcgtgtgtggcacaagcgcctaccgctgcctgaatggcagcagcgagtctatgtgcttcctgagcttcctggtgcctcctatgaccatctacaccgagcaggacctgtacagctacgtgatctccaagcctcggaacaagcgggtgcccatcctgccttttgtgattggagctggcgtgctgggagccctcggaactggaatcggaggcatcaccacctctactcagttctactacaaactatctcaagaactaaatggggacatggaaagagtggccgacagcctggtcacactccaggaccagctcaattctctggctgccgtggtgctccagaatcggagagcactcgatctgctgacagccgagagaggcggcacctgtctgtttctgggcgaagagtgctgctactacgtgaaccagtccggaatcgtcactgagaaagttaaagaaattcgagatcgaatccagcggagagccgaggaactgagaaacacaggaccttggggcctgctgagccagtggatgccttggattctgcccttcctgggacctctggccgccatcattctgctgctgctgttcggcccctgtatctttaacctccttgttaactttgtctcttccagaatcgaagctgtaaaactacaaatggagcccaagatgcagtccaagactaagatctaccgcagacccctggaccggcctgccagcccacgatctgatgttaatgacatctaa

SEQ ID NO: 3755 - DNA, 1497 bp, synthetic construct
  source 1..1497: mol_type = other DNA
atggagacagacacactcctgctatgggtactgctgctctgggttccaggttccactggtgacgcaccccctccatgccgctgtatgacaagcagcagcccctaccaagagttcctgtggcgaatgcagaggcccggcaacattgacgcccctagctacagaagcctgagcaagggcacccctaccttcacagcccacacacacatgccccggaactgctaccatagcgccacactgtgtatgcacgccaacacacactactggaccggcaagatgattaaccctagctgccctggcggcctgggcgtgacagtttgttggacctactttacccagaccggcatgtccgatggtggcggagttcaagaccaggccagagaaaagcacgtgaaagaagtgatctcccagctgaccagagtgcacggcacaagcagcccttacaaaggactggacctgtccaagctgcacgagacactgagaacccacacacggctggtgtccctgttcaacaccacactgaccggactgcacgaggtgtccgctcagaatcctaccaactgctggatctgcctgcctctgaacttcagaccctacgtgtcaatccccgtgcctgagcagtggaacaacttcagcaccgagatcaataccaccagcgtgctcgtgggacccctggtgtccaatctggaaatcacccacaccagcaacctgacctgcgtgaagttctccaacaccacctacaccaccaacagccagtgcatcagatgggtcacccctccaacacagatcgtgtgtctgcccagcggcatcttcttcgtgtgtggcacaagcgcctaccgctgcctgaatggcagcagcgagtctatgtgcttcctgagcttcctggtgcctcctatgaccatctacaccgagcaggacctgtacagctacgtgatctccaagcctcggaacaagcgggtgcccatcctgccttttgtgattggagctggcgtgctgggagccctcggaactggaatcggaggcatcaccacctctactcagttctactacaaactatctcaagaactaaatggggacatggaaagagtggccgacagcctggtcacactccaggaccagctcaattctctggctgccgtggtgctccagaatcggagagcactcgatctgctgacagccgagagaggcggcacctgtctgtttctgggcgaagagtgctgctactacgtgaaccagtccggaatcgtcactgagaaagttaaagaaattcgagatcgaatccagcggagagccgaggaactgagaaacacaggaccttggggcctgctgagccagtggatgccttggattctgcccttcctgggacctctggccgccatcattctgctgctgctgttcggcccctgtatctttaacctccttgttaactttgtctcttccagaatcgaagctgtaaaactacaaatggagcccaagatgcagtccaagactaagatctaa

SEQ ID NO: 3756 - DNA, 1575 bp, synthetic construct
  source 1..1575: mol_type = other DNA
atggagacagacacactcctgctatgggtactgctgctctgggttccaggttccactggtgacgcaccccctccatgccgctgtatgacaagcagcagcccctaccaagagttcctgtggcgaatgcagaggcccggcaacattgacgcccctagctacagaagcctgagcaagggcacccctaccttcacagcccacacacacatgccccggaactgctaccatagcgccacactgtgtatgcacgccaacacacactactggaccggcaagatgattaaccctagctgccctggcggcctgggcgtgacagtttgttggacctactttacccagaccggcatgtccgatggtggcggagttcaagaccaggccagagaaaagcacgtgaaagaagtgatctcccagctgaccagagtgcacggcacaagcagcccttacaaaggactggacctgtccaagctgcacgagacactgagaacccacacacggctggtgtccctgttcaacaccacactgaccggactgcacgaggtgtccgctcagaatcctaccaactgctggatctgcctgcctctgaacttcagaccctacgtgtcaatccccgtgcctgagcagtggaacaacttcagcaccgagatcaataccaccagcgtgctcgtgggacccctggtgtccaatctggaaatcacccacaccagcaacctgacctgcgtgaagttctccaacaccacctacaccaccaacagccagtgcatcagatgggtcacccctccaacacagatcgtgtgtctgcccagcggcatcttcttcgtgtgtggcacaagcgcctaccgctgcctgaatggcagcagcgagtctatgtgcttcctgagcttcctggtgcctcctatgaccatctacaccgagcaggacctgtacagctacgtgatctccaagcctcggaacaagcgggtgcccatcctgccttttgtgattggagctggcgtgctgggagccctcggaactggaatcggaggcatcaccacctctactcagttctactacaaactatctcaagaactaaatggggacatggaaagagtggccgacagcctggtcacactccaggaccagctcaattctctggctgccgtggtgctccagaatcggagagcactcgatctgctgacagccgagagaggcggcacctgtctgtttctgggcgaagagtgctgctactacgtgaaccagtccggaatcgtcactgagaaagttaaagaaattcgagatcgaatccagcggagagccgaggaactgagaaacacaggaccttggggcctgctgagccagtggatgccttggattctgcccttcctgggacctctggccgccatcattctgctgctgctgttcggcccctgtatctttaacctccttgttaactttgtctcttccagaatcgaagctgtaaaactacaaatggagcccaagatgcagtccaagactaagatctaccgcagacccctggaccggcctgccagcccacgatctgatgttaatgacatcaaaggcacccctcctgaggaaatctca

SEQ ID NO: 3757 - DNA, 1437 bp, synthetic construct
  source 1..1437: mol_type = other DNA
atggagacagacacactcctgctatgggtactgctgctctgggttccaggttccactggtgacgcaccccctccatgccgctgtatgacaagcagcagcccctaccaagagttcctgtggcgaatgcagaggcccggcaacattgacgcccctagctacagaagcctgagcaagggcacccctaccttcacagcccacacacacatgccccggaactgctaccatagcgccacactgtgtatgcacgccaacacacactactggaccggcaagatgattaaccctagctgccctggcggcctgggcgtgacagtttgttggacctactttacccagaccggcatgtccgatggtggcggagttcaagaccaggccagagaaaagcacgtgaaagaagtgatctcccagctgaccagagtgcacggcacaagcagcccttacaaaggactggacctgtccaagctgcacgagacactgagaacccacacacggctggtgtccctgttcaacaccacactgaccggactgcacgaggtgtccgctcagaatcctaccaactgctggatctgcctgcctctgaacttcagaccctacgtgtcaatccccgtgcctgagcagtggaacaacttcagcaccgagatcaataccaccagcgtgctcgtgggacccctggtgtccaatctggaaatcacccacaccagcaacctgacctgcgtgaagttctccaacaccacctacaccaccaacagccagtgcatcagatgggtcacccctccaacacagatcgtgtgtctgcccagcggcatcttcttcgtgtgtggcacaagcgcctaccgctgcctgaatggcagcagcgagtctatgtgcttcctgagcttcctggtgcctcctatgaccatctacaccgagcaggacctgtacagctacgtgatctccaagcctcggaacaagcgggtgcccatcctgccttttgtgattggagctggcgtgctgggagccctcggaactggaatcggaggcatcaccacctctactcagttctactacaaactatctcaagaactaaatggggacatggaaagagtggccgacagcctggtcacactccaggaccagctcaattctctggctgccgtggtgctccagaatcggagagcactcgatctgctgacagccgagagaggcggcacctgtctgtttctgggcgaagagtgctgctactacgtgaaccagtccggaatcgtcactgagaaagttaaagaaattcgagatcgaatccagcggagagccgaggaactgagaaacacaggaccttggggcctgctgagccagtggatgccttggattctgcccttcctgggacctctggccgccatcattctgctgctgctgttcggcccctgtatctttaacctccttgttaactttgtctcttcc

SEQ ID NO: 3758 - DNA, 1434 bp, synthetic construct
  source 1..1434: mol_type = other DNA
atggagacagacacactcctgctatgggtactgctgctctgggttccaggttccactggtgacgcaccccctccatgccgctgtatgacaagcagcagcccctaccaagagttcctgtggcgaatgcagaggcccggcaacattgacgcccctagctacagaagcctgagcaagggcacccctaccttcacagcccacacacacatgccccggaactgctaccatagcgccacactgtgtatgcacgccaacacacactactggaccggcaagatgattaaccctagctgccctggcggcctgggcgtgacagtttgttggacctactttacccagaccggcatgtccgatggtggcggagttcaagaccaggccagagaaaagcacgtgaaagaagtgatctcccagctgaccagagtgcacggcacaagcagcccttacaaaggactggacctgtccaagctgcacgagacactgagaacccacacacggctggtgtccctgttcaacaccacactgaccggactgcacgaggtgtccgctcagaatcctaccaactgctggatctgcctgcctctgaacttcagaccctacgtgtcaatccccgtgcctgagcagtggaacaacttcagcaccgagatcaataccaccagcgtgctcgtgggacccctggtgtccaatctggaaatcacccacaccagcaacctgacctgcgtgaagttctccaacaccacctacaccaccaacagccagtgcatcagatgggtcacccctccaacacagatcgtgtgtctgcccagcggcatcttcttcgtgtgtggcacaagcgcctaccgctgcctgaatggcagcagcgagtctatgtgcttcctgagcttcctggtgcctcctatgaccatctacaccgagcaggacctgtacagctacgtgatctccaagcctcggaacaagcgggtgcccatcctgccttttgtgattggagctggcgtgctgggagccctcggaactggaatcggaggcatcaccacctctactcagttctactacaaactatctcaagaactaaatggggacatggaaagagtggccgacagcctggtcacactccaggaccagctcaattctctggctgccgtggtgctccagaatcggagagcactcgatctgctgacagccgagagaggcggcacctgtctgtttctgggcgaagagtgctgctactacgtgaaccagtccggaatcgtcactgagaaagttaaagaaattcgagatcgaatccagcggagagccgaggaactgagaaacacaggaccttggggcctgctgagccagtggatgccttggattctgcccttcctgggacctctggccgccatcattctgctgctgctgttcggcccctgtatctttaacctccttgttaactttgtctct

SEQ ID NO: 3759 - DNA, 1578 bp, synthetic construct
  source 1..1578: mol_type = other DNA
atggagacagacacactcctgctatgggtactgctgctctgggttccaggttccactggtgacgcaccccctccatgccgctgtatgacaagcagcagcccctaccaagagttcctgtggcgaatgcagaggcccggcaacattgacgcccctagctacagaagcctgagcaagggcacccctaccttcacagcccacacacacatgccccggaactgctaccatagcgccacactgtgtatgcacgccaacacacactactggaccggcaagatgattaaccctagctgccctggcggcctgggcgtgacagtttgttggacctactttacccagaccggcatgtccgatggtggcggagttcaagaccaggccagagaaaagcacgtgaaagaagtgatctcccagctgaccagagtgcacggcacaagcagcccttacaaaggactggacctgtccaagctgcacgagacactgagaacccacacacggctggtgtccctgttcaacaccacactgaccggactgcacgaggtgtccgctcagaatcctaccaactgctggatctgcctgcctctgaacttcagaccctacgtgtcaatccccgtgcctgagcagtggaacaacttcagcaccgagatcaataccaccagcgtgctcgtgggacccctggtgtccaatctggaaatcacccacaccagcaacctgacctgcgtgaagttctccaacaccacctacaccaccaacagccagtgcatcagatgggtcacccctccaacacagatcgtgtgtctgcccagcggcatcttcttcgtgtgtggcacaagcgcctaccgctgcctgaatggcagcagcgagtctatgtgcttcctgagcttcctggtgcctcctatgaccatctacaccgagcaggacctgtacagctacgtgatctccaagcctcggaacaagcgggtgcccatcctgccttttgtgattggagctggcgtgctgggagccctcggaactggaatcggaggcatcaccacctctactcagttctactacaaactatctcaagaactaaatggggacatggaaagagtggccgacagcctggtcacactccaggaccagctcaattctctggctgccgtggtgctccagaatcggagagcactcgatctgctgacagccgagagaggcggcacctgtctgtttctgggcgaagagtgctgctactacgtgaaccagtccggaatcgtcactgagaaagttaaagaaattcgagatcgaatccagcggagagccgaggaactgagaaacacaggaccttggggcctgctgagccagtggatgccttggattctgcccttcctgggacctctggccgccatcattctgctgctgctgttcggcccctgtatctttaacctccttgttaactttgtctcttccagaatcgaagctgtaaaactacaaatggagcccaagatgcagtccaagactaagatctaccgcagacccctggaccggcctgccagcccacgatctgatgttaatgacatcaaaggcacccctcctgaggaaatctcagct

SEQ ID NO: 3760 - DNA, 1587 bp, synthetic construct
  source 1..1587: mol_type = other DNA
atggagacagacacactcctgctatgggtactgctgctctgggttccaggttccactggtgacgcaccccctccatgccgctgtatgacaagcagcagcccctaccaagagttcctgtggcgaatgcagaggcccggcaacattgacgcccctagctacagaagcctgagcaagggcacccctaccttcacagcccacacacacatgccccggaactgctaccatagcgccacactgtgtatgcacgccaacacacactactggaccggcaagatgattaaccctagctgccctggcggcctgggcgtgacagtttgttggacctactttacccagaccggcatgtccgatggtggcggagttcaagaccaggccagagaaaagcacgtgaaagaagtgatctcccagctgaccagagtgcacggcacaagcagcccttacaaaggactggacctgtccaagctgcacgagacactgagaacccacacacggctggtgtccctgttcaacaccacactgaccggactgcacgaggtgtccgctcagaatcctaccaactgctggatctgcctgcctctgaacttcagaccctacgtgtcaatccccgtgcctgagcagtggaacaacttcagcaccgagatcaataccaccagcgtgctcgtgggacccctggtgtccaatctggaaatcacccacaccagcaacctgacctgcgtgaagttctccaacaccacctacaccaccaacagccagtgcatcagatgggtcacccctccaacacagatcgtgtgtctgcccagcggcatcttcttcgtgtgtggcacaagcgcctaccgctgcctgaatggcagcagcgagtctatgtgcttcctgagcttcctggtgcctcctatgaccatctacaccgagcaggacctgtacagctacgtgatctccaagcctcggaacaagcgggtgcccatcctgccttttgtgattggagctggcgtgctgggagccctcggaactggaatcggaggcatcaccacctctactcagttctactacaaactatctcaagaactaaatggggacatggaaagagtggccgacagcctggtcacactccaggaccagctcaattctctggctgccgtggtgctccagaatcggagagcactcgatctgctgacagccgagagaggcggcacctgtctgtttctgggcgaagagtgctgctactacgtgaaccagtccggaatcgtcactgagaaagttaaagaaattcgagatcgaatccagcggagagccgaggaactgagaaacacaggaccttggggcctgctgagccagtggatgccttggattctgcccttcctgggacctctggccgccatcattctgctgctgctgttcggcccctgtatctttaacctccttgttaactttgtctcttccagaatcgaagctgtaaaactacaaatggagcccaagatgcagtccaagactaagatctaccgcagacccctggaccggcctgccagcccacgatctgatgttaatgacatcaaaggcacccctcctgaggaaatctcagctgcacaacct

SEQ ID NO: 3761 - DNA, 1596 bp, synthetic construct
  source 1..1596: mol_type = other DNA
atggagacagacacactcctgctatgggtactgctgctctgggttccaggttccactggtgacgcaccccctccatgccgctgtatgacaagcagcagcccctaccaagagttcctgtggcgaatgcagaggcccggcaacattgacgcccctagctacagaagcctgagcaagggcacccctaccttcacagcccacacacacatgccccggaactgctaccatagcgccacactgtgtatgcacgccaacacacactactggaccggcaagatgattaaccctagctgccctggcggcctgggcgtgacagtttgttggacctactttacccagaccggcatgtccgatggtggcggagttcaagaccaggccagagaaaagcacgtgaaagaagtgatctcccagctgaccagagtgcacggcacaagcagcccttacaaaggactggacctgtccaagctgcacgagacactgagaacccacacacggctggtgtccctgttcaacaccacactgaccggactgcacgaggtgtccgctcagaatcctaccaactgctggatctgcctgcctctgaacttcagaccctacgtgtcaatccccgtgcctgagcagtggaacaacttcagcaccgagatcaataccaccagcgtgctcgtgggacccctggtgtccaatctggaaatcacccacaccagcaacctgacctgcgtgaagttctccaacaccacctacaccaccaacagccagtgcatcagatgggtcacccctccaacacagatcgtgtgtctgcccagcggcatcttcttcgtgtgtggcacaagcgcctaccgctgcctgaatggcagcagcgagtctatgtgcttcctgagcttcctggtgcctcctatgaccatctacaccgagcaggacctgtacagctacgtgatctccaagcctcggaacaagcgggtgcccatcctgccttttgtgattggagctggcgtgctgggagccctcggaactggaatcggaggcatcaccacctctactcagttctactacaaactatctcaagaactaaatggggacatggaaagagtggccgacagcctggtcacactccaggaccagctcaattctctggctgccgtggtgctccagaatcggagagcactcgatctgctgacagccgagagaggcggcacctgtctgtttctgggcgaagagtgctgctactacgtgaaccagtccggaatcgtcactgagaaagttaaagaaattcgagatcgaatccagcggagagccgaggaactgagaaacacaggaccttggggcctgctgagccagtggatgccttggattctgcccttcctgggacctctggccgccatcattctgctgctgctgttcggcccctgtatctttaacctccttgttaactttgtctcttccagaatcgaagctgtaaaactacaaatggagcccaagatgcagtccaagactaagatctaccgcagacccctggaccggcctgccagcccacgatctgatgttaatgacatcaaaggcacccctcctgaggaaatctcagctgcacaacctctactacgc

SEQ ID NO: 3762 - DNA, 1578 bp, synthetic construct
  source 1..1578: mol_type = other DNA
atggagacagacacactcctgctatgggtactgctgctctgggttccaggttccactggtgacgcaccccctccatgccgctgtatgacaagcagcagcccctaccaagagttcctgtggcgaatgcagaggcccggcaacattgacgcccctagctacagaagcctgagcaagggcacccctaccttcacagcccacacacacatgccccggaactgctaccatagcgccacactgtgtatgcacgccaacacacactactggaccggcaagatgattaaccctagctgccctggcggcctgggcgtgacagtttgttggacctactttacccagaccggcatgtccgatggtggcggagttcaagaccaggccagagaaaagcacgtgaaagaagtgatctcccagctgaccagagtgcacggcacaagcagcccttacaaaggactggacctgtccaagctgcacgagacactgagaacccacacacggctggtgtccctgttcaacaccacactgaccggactgcacgaggtgtccgctcagaatcctaccaactgctggatctgcctgcctctgaacttcagaccctacgtgtcaatccccgtgcctgagcagtggaacaacttcagcaccgagatcaataccaccagcgtgctcgtgggacccctggtgtccaatctggaaatcacccacaccagcaacctgacctgcgtgaagttctccaacaccacctacaccaccaacagccagtgcatcagatgggtcacccctccaacacagatcgtgtgtctgcccagcggcatcttcttcgtgtgtggcacaagcgcctaccgctgcctgaatggcagcagcgagtctatgtgcttcctgagcttcctggtgcctcctatgaccatctacaccgagcaggacctgtacagctacgtgatctccaagcctcggaacaagcgggtgcccatcctgccttttgtgattggagctggcgtgctgggagccctcggaactggaatcggaggcatcaccacctctactcagttctactacaaactatctcaagaactaaatggggacatggaaagagtggccgacagcctggtcacactccaggaccagctcaattctctggctgccgtggtgctccagaatcggagagcactcgatctgctgacagccgagagaggcggcacctgtctgtttctgggcgaagagtgctgctactacgtgaaccagtccggaatcgtcactgagaaagttaaagaaattcgagatcgaatccagcggagagccgaggaactgagaaacacaggaccttggggcctgctgagccattggatgccttggattctgcccttcctgggacctctggccgccatcattctgctgctgctgttcggcccctgtatctttaacctccttgttaactttgtctcttccagaatcgaagctgtaaaactacaaatggagcccaagatgcagtccaagactaagatctaccgcagacccctggaccggcctgccagcccacgatctgatgttaatgacatcaaaggcacccctcctgaggaaatctcataa

SEQ ID NO: 3763 - DNA, 29 bp, synthetic construct
  source 1..29: mol_type = other DNA
ggggggggggggggggggggggggggggg

SEQ ID NO: 3764 - DNA, 372 bp, synthetic construct
  source 1..372: mol_type = other DNA
ggctctgacctgggcatcaagctgctgttcgccgctgccaagggccaggacgacgaagtgcggattctgctggctgctggggccgacgtgaacgccaaggatttcgagggctacacccccctgcacgtggccgcctatgatggacacctggaaatcgtggaagtgctgctgaaggctggcgctgatgtgaatgccaaagacagccagggccggacccctctgcatgaagccgcctacagcggccatctggaaattgtggaagtgctgctgaaagccggggcagacgtgaacgctcaggacgacgctggcgagacaccagccgatctggctgcagcttggggccacgaagatatcgccgaggtgctgcagaag

SEQ ID NO: 3765 - DNA, 270 bp, synthetic construct
  source 1..270: mol_type = other DNA
atgctgcccgctcctaagaatctggtggtgtccagaatcaccgaggacagcgccagactgtcttggacagctcctgatgccgccttcgacagcttccccatccggtacatcgagacactgatctggggcgaagccatctggctggatgtgcctggaagcgagagaagctacgacctgaccggactgaagcctggcacagagtatgccgtggtcatcaccggcgtgaaaggcggcagattctctagccctctggtggcctctttcaccacc

SEQ ID NO: 3766 - DNA, 576 bp, synthetic construct
  source 1..576: mol_type = other DNA
ggcatgcggactgaagacctcccaaaggctgtggtgttcctggagcctcaatggtacagggtgctggagaaggacagtgtgactctgaagtgccagggagcctactcccctgaggacaattccacacagtggtttcacaatgagagcctcatctcaagccaggcctccagctacttcattgacgctgccacagtggacgacagtggagagtacaggtgccagacaaacctctccaccctcagtgacccggtgcagctagaagtccatatcggctggctgttgctccaggcccctcggtgggtgttcaaggaggaagaccctattcacctgaggtgtcacagctggaagaacactgctctgcataaggtcacatatttacagaatggcaaaggcaggaagtattttcatcataattctgacttctacattccaaaagccacactcaaagacagcggctcctacttctgcagggggcttgttgggagtaaaaatgtgtcttcagagactgtgaacatcaccatcactcaaggtttggcagtgtcaaccatctcatcattctttccacctggctaccaa

SEQ ID NO: 3767 - DNA, 921 bp, synthetic construct
  source 1..921: mol_type = other DNA
atggccttaccagtgaccgccttgctcctgccgctggccttgctgctccacgccgccaggccgctgttcaatcaagaggtgcagatccctctgaccgagagctactgtggcccctgtcctaagaactggatctgctacaagaacaactgctaccagttcttcgacgagagcaagaattggtacgagagccaggccagctgcatgagccagaatgccagcctgctgaaggtgtacagcaaagaggaccaggacctgctgaaactggtcaagagctaccactggatgggccttgtgcacatccccaccaatggctcttggcagtgggaggacggcagcattctgagccctaacctgctgaccatcatcgagatgcagaagggcgactgcgccctgtacgccagcagctttaagggctacatcgagaattgcagcaccccgaacacctacatctgtatgcagagaaccgttggcggaggcggaagtggaggcggaggatctggcggcggaggctctgacctctttaatcaagaagtccagattccactcaccgaatcctactgcggaccttgtccaaaaaattggatttgttataagaacaactgttatcaattctttgatgagtctaaaaattggtatgagtcccaggcttcctgcatgtctcagaacgcttctctgctgaaagtctactctaaagaagatcaggatctcctgaagctcgtcaagtcttatcattggatggggctcgtccacattcctaccaacggaagctggcaatgggaagatggctccatcctgtctccaaatctgctcacgattattgaaatgcagaaaggggattgtgctctctacgccagctccttcaagggatatattgagaactgtagcacgcccaatacttatatctgtatgcaacggaccgtg

SEQ ID NO: 3768 - DNA, 561 bp, synthetic construct
  source 1..561: mol_type = other DNA
atggagctgactgatttgctcctggcggccatgcttcttgcagtggcaagactaactctgtccagccccgtagctcctgcctgtgaccccagactcctaaataaactgctgcgtgactcccacctccttcacagccgactgagtcagtgtcccgacgtggaccctttgtctatccctgttctgctgcctgctgtggactttagcctgggagaatggaaaacccagacggaacagagcaaggcacaggacattctaggggcagtgtcccttctactggagggagtgatggcagcacgaggacagttggaaccctcctgcctctcatccctcctgggacagctttctgggcaggttcgcctcctcttgggggccctgcagggcctcctaggaacccagcttcctctacagggcaggaccacagctcacaaggaccccaatgccctcttcttgagcttgcaacaactgcttcggggaaaggtgcgcttcctgcttctggtagaaggtcccaccctctgtgtcagacggaccctgccaaccacagctgtcccaagcagtacttct

SEQ ID NO: 3769 - DNA, 981 bp, synthetic construct
  source 1..981: mol_type = other DNA
atggccttaccagtgaccgccttgctcctgccgctggccttgctgctccacgccgccaggccggaagtgcagctgcttgaaagtggcggcggactgattcagcctggcggatctctgagactgagctgtgccgccagcggcttcaccttttctagccacgccatgacctgggtccgacaggcacctggaaaagggcttgaatgggtgtccgccatcagcggctctggcgattacacacactacgccgacagcgtgaagggcagattcaccatcagcagagacaacagcaagaacaccgtgtacctccagatgaacagcctgagagccgaggacagcgccgtgtattattgcgccaaggatgaggatggcggcagcctgcttggacacagaggacaaggcaccctggtcaccgtttcttccacgcgtggaggtggtggctccgagcctcacagcctgagctacgacatcacagtgatccccaagttcagacccggaccacgttggtgcgctgtgcagggacaagtggacgagaaaaccttcctgcactacgactgcggcaacaagaccgtgacacccgtgtctccactgggcaagaaactgaacgtgaccaccgcctggaaggcccagaatcctgtgctgagagaagtggtggacatcctgaccgagcagctgtgggacattcagctggaaaactacacccctaaagagcccctgacactccaggccagaatgagctgtgaacagaaggccgagggccacagctctggctcttggcagttcagcttcgacggccagattttcctgctgttcgacagcgagaagcggatgtggaccacagtgcatcccggcgctcgcaagatgaaggaaaagtgggagaacgacaaggtggtggctaccctgctgtggggctggtctatgggagattgcatcggctggctggaagatttcctgatgggcatggacagcaccctggaaccttct

SEQ ID NO: 3770 - DNA, 153 bp, synthetic construct
  source 1..153: mol_type = other DNA
atggaccccgacctggaaatcagagccgccttcctgcggcagagaaacacagccctgagaacagaggtggccgagctggaacaagaggtgcagcggctggaaaacgaggtgtcccagtacgagacaagatacggccctctcggaggcggaaaa

SEQ ID NO: 3771 - DNA, 153 bp, synthetic construct
  source 1..153: mol_type = other DNA
atggaccctgatctcgaaattgaggccgcctttctggaacgcgagaacactgccctggaaaccagggtcgcagagctgagacagagagtgcagagactgcggaacagagtgtctcagtaccgcaccagatatggcccactcggcggaggtaaa

SEQ ID NO: 3772 - DNA, 84 bp, synthetic construct
  source 1..84: mol_type = other DNA
gaagttgctgccctcgagaaggaggtagcagctttggaaaaagaagtcgcagcccttgagaaagaagttgcggctctggagaag

SEQ ID NO: 3773 - DNA, 84 bp, synthetic construct
  source 1..84: mol_type = other DNA
aaagttgctgctcttaaagaaaaggtcgcggctctgaaagaaaaagtggcggcgctcaaggagaaagttgcagctctcaaagaa

SEQ ID NO: 3774 - DNA, 405 bp, synthetic construct
  source 1..405: mol_type = other DNA
ctgttcaatcaagaggtgcagatccctctgaccgagagctactgtggcccctgtcctaagaactggatctgctacaagaacaactgctaccagttcttcgacgagagcaagaattggtacgagagccaggccagctgcatgagccagaatgccagcctgctgaaggtgtacagcaaagaggaccaggacctgctgaaactggtcaagagcgcccactggatgggccttgtgcacatccccaccaatggctcttggcagtgggaggacggcagcattctgagccctaacctgctgaccatcatcgagatgcagaagggcgactgcgccctgtacgccagcagctttaagggcttcatcgagaattgcagcaccccgaacacctacatctgtatgcagagaaccgtt

SEQ ID NO: 3775 - DNA, 405 bp, synthetic construct
  source 1..405: mol_type = other DNA
ctgttcaatcaagaggtgcagatccctctgaccgagagctactgtggcccctgtcctaagaactggatctgctacaagaacaactgctaccagttcttcgacgagagcaagaattggtacgagagccaggccagctgcatgagccagaatgccagcctgctgaaggtgtacagcaaagaggaccaggacctgctgaaactggtcaagagcgcccactggatgggccttgtgcacatccccaccaatggctcttggcagtgggaggacggcagcattctgagccctaacctgctgaccatcatcgagatgcagaagggcgactgcgccctgtacgccagcagctttaagggctacatcgagaattgcagcaccccgaacacctacatctgtatgcagagaaccgtt

SEQ ID NO: 3776 - DNA, 858 bp, synthetic construct
  source 1..858: mol_type = other DNA
ctgttcaatcaagaggtgcagatccctctgaccgagagctactgtggcccctgtcctaagaactggatctgctacaagaacaactgctaccagttcttcgacgagagcaagaattggtacgagagccaggccagctgcatgagccagaatgccagcctgctgaaggtgtacagcaaagaggaccaggacctgctgaaactggtcaagagcgcccactggatgggccttgtgcacatccccaccaatggctcttggcagtgggaggacggcagcattctgagccctaacctgctgaccatcatcgagatgcagaagggcgactgcgccctgtacgccagcagctttaagggcttcatcgagaattgcagcaccccgaacacctacatctgtatgcagagaaccgttggcggaggcggaagtggaggcggaggatctggcggcggaggctctgacctctttaatcaagaagtccagattccactcaccgaatcctactgcggaccttgtccaaaaaattggatttgttataagaacaactgttatcaattctttgatgagtctaaaaattggtatgagtcccaggcttcctgcatgtctcagaacgcttctctgctgaaagtctactctaaagaagatcaggatctcctgaagctcgtcaagtctgcccattggatggggctcgtccacattcctaccaacggaagctggcaatgggaagatggctccatcctgtctccaaatctgctcacgattattgaaatgcagaaaggggattgtgctctctacgccagctccttcaagggatttattgagaactgtagcacgcccaatacttatatctgtatgcaacggaccgtg

SEQ ID NO: 3777 - DNA, 858 bp, synthetic construct
  source 1..858: mol_type = other DNA
ctgttcaatcaagaggtgcagatccctctgaccgagagctactgtggcccctgtcctaagaactggatctgctacaagaacaactgctaccagttcttcgacgagagcaagaattggtacgagagccaggccagctgcatgagccagaatgccagcctgctgaaggtgtacagcaaagaggaccaggacctgctgaaactggtcaagagcgcccactggatgggccttgtgcacatccccaccaatggctcttggcagtgggaggacggcagcattctgagccctaacctgctgaccatcatcgagatgcagaagggcgactgcgccctgtacgccagcagctttaagggctacatcgagaattgcagcaccccgaacacctacatctgtatgcagagaaccgtttctggcggaggcggctctggaggaggcggaagtggcggcggaggcgacctctttaatcaagaagtccagattccactcaccgaatcctactgcggaccttgtccaaaaaattggatttgttataagaacaactgttatcaattctttgatgagtctaaaaattggtatgagtcccaggcttcctgcatgtctcagaacgcttctctgctgaaagtctactctaaagaagatcaggatctcctgaagctcgtcaagtctgcccattggatggggctcgtccacattcctaccaacggaagctggcaatgggaagatggctccatcctgtctccaaatctgctcacgattattgaaatgcagaaaggggattgtgctctctacgccagctccttcaagggatatattgagaactgtagcacgcccaatacttatatctgtatgcaacggaccgtg

SEQ ID NO: 3778 - DNA, 540 bp, synthetic construct
  source 1..540: mol_type = other DNA
gagcctcacagcctgagctacgacatcacagtgatccccaagttcagacccggaccacgttggtgcgctgtgcagggacaagtggacgagaaaaccttcctgcactacgactgcggcaacaagaccgtgacacccgtgtctccactgggcaagaaactgaacgtgaccaccgcctggaaggcccagaatcctgtgctgagagaagtggtggacatcctgaccgagcagctgtgggacattcagctggaaaactacacccctaaagagcccctgacactccaggccagaatgagctgtgaacagaaggccgagggccacagctctggctcttggcagttcagcttcgacggccagattttcctgctgttcgacagcgagaagcggatgtggaccacagtgcatcccggcgctcgcaagatgaaggaaaagtgggagaacgacaaggtggtggctaccctgctgtggggctggtctatgggagattgcatcggctggctggaagatttcctgatgggcatggacagcaccctggaaccttct

SEQ ID NO: 3779 - DNA, 540 bp, synthetic construct
  source 1..540: mol_type = other DNA
gagcctcacagcctgagctacgacatcacagtgatccccaagttcagacccggaccacgttggtgcgctgtgcagggacaagtggacgagaaaaccttcctgcactacgactgcggcaacaagaccgtgacacccgtgtctccactgggcaagaaactgaacgtgaccaccgcctggaaggcccagaatcctgtgctgagagaagtggtggacatcctgaccgagcagctgtgggacattcagctggaaaactacacccctaaagagcccctgacactccaggccagaatgagctgtgaacagaaggccgagggccacagctctggctcttggcagttcagcttcgacggccagattttcctgctgttcgacagcgagaagcggatgtggaccacagtgcatcccggcgctcgcaagatgaaggaaaagtgggagaacgacaaggtggtggctaccaagctgtacctgtggtctatgggcgactgcatcggctggctggaagatttcctgatgggcatggacagcaccctggaaccttct

SEQ ID NO: 3780 - DNA, 45 bp, synthetic construct
  source 1..45: mol_type = other DNA
ggcggaggcggatctggcggcggaggtagcggtggcggaggatct

SEQ ID NO: 3781 - DNA, 18 bp, synthetic construct
  source 1..18: mol_type = other DNA
agcggcggaggcggatct

SEQ ID NO: 3782 - DNA, 423 bp, synthetic construct
  source 1..423: mol_type = other DNA
gatatccagaaccctgaccctgccgtgtaccagctgagagactctaaatccagtgacaagtctgtctgcctattcaccgattttgattctcaaacaaatgtgtcacaaagtaaggattctgatgtgtatatcacagacaaaactgtgctagacatgaggtctatggacttcaagagcaacagtgctgtggcctggagcaacaaatctgactttgcatgtgcaaacgccttcaacaacagcattattccagaagacaccttcttccccagcccagaaagttcctgtgatgtcaagctggtcgagaaaagctttgaaacagatacgaacctaaactttcaaaacctgtcagtgattgggttccgaatcctcctcctgaaagtggccgggtttaatctgctcatgacgctgcggctgtggtccagc

SEQ ID NO: 3783 - DNA, 420 bp, synthetic construct
  source 1..420: mol_type = other DNA
atccagaaccctgaccctgccgtgtaccagctgagagactctaaatccagtgacaagtctgtctgcctattcaccgattttgattctcaaacaaatgtgtcacaaagtaaggattctgatgtgtatatcacagacaaaactgtgctagacatgaggtctatggacttcaagagcaacagtgctgtggcctggagcaacaaatctgactttgcatgtgcaaacgccttcaacaacagcattattccagaagacaccttcttccccagcccagaaagttcctgtgatgtcaagctggtcgagaaaagctttgaaacagatacgaacctaaactttcaaaacctgtcagtgattgggttccgaatcctcctcctgaaagtggccgggtttaatctgctcatgacgctgcggctgtggtccagc

SEQ ID NO: 3784 - DNA, 420 bp, synthetic construct
  source 1..420: mol_type = other DNA
atccagaaccctgatcctgccgtgtaccagctgcgggatagcaagagcagcgacaagagcgtgtgtctgttcaccgacttcgacagccagaccaacgtgtcccagagcaaggactccgacgtgtacatcaccgataagtgcgtgctggacatgcggagcatggacttcaagagcaactccgccgtggcctggtccaacaagtccgatttcgcctgcgccaacgccttcaacaacagcattatccccgaggacacattcttcccaagcagcgacgtgccctgcgacgtgaagctggtggaaaagagcttcgagacagacaccaacctgaacttccagaacctgagcgtgatcggcttcagaatcctgctgctgaaagtggccggctttaacctgctgatgaccctgcggctgtggtccagc

SEQ ID NO: 3785 - DNA, 420 bp, synthetic construct
  source 1..420: mol_type = other DNA
atccagaaccctgatcctgccgtgtaccagctgcgggatagcaagagcagcgacaagagcgtgtgtctgttcaccgacttcgacagccagaccaacgtgtcccagagcaaggactccgacgtgtacatcaccgataagaccgtgctggacatgcggagcatggacttcaagagcaactccgccgtggcctggtccaacaagtccgatttcgcctgcgccaacgccttcaacaacagcattatccccgaggacacattcttcccaagccccgagagcagctgcgacgtgaagctggtggaaaagagcttcgagacagacaccaacctgaacttccagaacctgagcgtgatcggcttcagaatcctgctgctgaaagtggccggctttaacctgctgatgaccctgcggctgtggtccagc

SEQ ID NO: 3786 - DNA, 411 bp, synthetic construct
  source 1..411: mol_type = other DNA
cctgatcctgccgtgtaccagctgcgggatagcaagagcagcgacaagagcgtgtgcctgttcaccgacttcgacagccagaccaacgtgtctcagtctaaggatagtgatgtgtatatcaccgacaagaccgtgctggacatgcggagcatggacttcaagagcaacagcgccgtggcctggtccaacaagagcgacttcgcctgcgccaacgccttcaacaacagcatcatccccgaggacaccttcttccccagccccgagagcagctgcgacgtgaaactggtggagaagagcttcgagacagacaccaacctgaacttccagaacctgagcgtgatcggcttcagaatcctgctgctgaaggtggccggcttcaacctgctgatgaccctgcggctgtggagcagc

SEQ ID NO: 3787 - DNA, 420 bp, synthetic construct
  source 1..420: mol_type = other DNA
atccagaaccctgatcctgccgtgtaccagctgcgggatagcaagagcagcgacaagagcgtgtgtctgttcaccgacttcgacagccagaccaacgtgtcccagagcaaggactccgacgtgtacatcaccgataagtgcgtgctggacatgcggagcatggacttcaagagcaactccgccgtggcctggtccaacaagtccgatttcgcctgcgccaacgccttcaacaacagcattatccccgaggacacattcttcccaagccccgagagcagctgcgacgtgaagctggtggaaaagagcttcgagacagacaccaacctgaacttccagaacctgagcgtgatcggcttcagaatcctgctgctgaaagtggccggctttaacctgctgatgaccctgcggctgtggtccagc

SEQ ID NO: 3788 - DNA, 411 bp, synthetic construct
  source 1..411: mol_type = other DNA
cctgatcctgccgtgtaccagctgcgggatagcaagagcagcgacaagagcgtgtgtctgttcaccgacttcgacagccagaccaacgtgtcccagagcaaggactccgacgtgtacatcaccgataagtgcgtgctggacatgcggagcatggacttcaagagcaactccgccgtggcctggtccaacaagtccgatttcgcctgcgccaacgccttcaacaacagcattatccccgaggacacattcttcccaagccccgagagcagctgcgacgtgaagctggtggaaaagagcttcgagacagacaccaacctgaacttccagaacctgagcgtgatcggcttcagaatcctgctgctgaaagtggccggctttaacctgctgatgaccctgcggctgtggtccagc

SEQ ID NO: 3789 - DNA, 420 bp, synthetic construct
  source 1..420: mol_type = other DNA
atccagaaccctgatcctgccgtgtaccagctgcgggatagcaagagcagcgacaagagcgtgtgtctgttcaccgacttcgacagccagaccaacgtgtcccagagcaaggactccgacgtgtacatcaccgataagaccgtgctggacatgcggagcatggacttcaagagcaactccgccgtggcctggtccaacaagtccgatttcgcctgcgccaacgccttcaacaacagcattatccccgaggacacattcttcccaagcagcgacgtgccctgcgacgtgaagctggtggaaaagagcttcgagacagacaccaacctgaacttccagaacctgagcgtgatcggcttcagaatcctgctgctgaaagtggccggctttaacctgctgatgaccctgcggctgtggtccagc

SEQ ID NO: 3790 - DNA, 420 bp, synthetic construct
  source 1..420: mol_type = other DNA
atccagaaccctgatcctgccgtgtaccagctgcgggatagcaagagcagcgacaagagcgtgtgtctgttcaccgacttcgacagccagaccaacgtgtcccagagcaaggactccgacgtgtacatcaccgataagaccgtgctggacatgcggagcatggacttcaagagcaaccgcgccgtggcctggtccaacaagtccgatttcgcctgcgccaacgccttcaacaacagcattatccccgaggacacattcttcccaagccccgagagcagctgcgacgtgaagctggtggaaaagagcttcgagacagacaccaacctgaacttccagaacctgagcgtgatcggcttcagaatcctgctgctgaaagtggccggctttaacctgctgatgaccctgcggctgtggtccagc

SEQ ID NO: 3791 - DNA, 420 bp, synthetic construct
  source 1..420: mol_type = other DNA
atccagaaccctgatcctgccgtgtaccagctgcgggatagcaagagcagcgacaagagcgtgtgtctgttcaccgacttcgacagccagaccaacgtgtcccagagcaaggactccgacgtgtacatcaccgataagaccgtgctggacatgcggagcatggacttcaagagcaaccgcgccgtggcctggtccaacaagtccgatttcgcctgcgccaacgccttcaacaacagcattatccccgaggacacattcttcccaagcagcgacgtgccctgcgacgtgaagctggtggaaaagagcttcgagacagacaccaacctgaacttccagaacctgagcgtgatcggcttcagaatcctgctgctgaaagtggccggctttaacctgctgatgaccctgcggctgtggtccagc

SEQ ID NO: 3792 - DNA, 420 bp, synthetic construct
  source 1..420: mol_type = other DNA
atccagaaccctgatcctgccgtgtaccagctgcgggatagcaagagcagcgacaagagcgtgtgtctgttcaccgacttcgacagccagaccaacgtgtcccagagcaaggactccgacgtgtacatcaccgataagaccgtgctggacatgcggagcatggacttcaagagcaactccgccgtggcctggtccaacaagtccgatttcgcctgcgccaacgccttcaacaacagcattatccccgaggacacattcttcccaagcagcgacagcagctgcgacgtgaagctggtggaaaagagcttcgagacagacaccaacctgaacttccagaacctgagcgtgatcggcttcagaatcctgctgctgaaagtggccggctttaacctgctgatgaccctgcggctgtggtccagc

SEQ ID NO: 3793 - DNA, 420 bp, synthetic construct
  source 1..420: mol_type = other DNA
atccagaaccctgatcctgccgtgtaccagctgcgggatagcaagagcagcgacaagagcgtgtgtctgttcaccgacttcgacagccagaccaacgtgtcccagagcaaggactccgacgtgtacatcaccgataagtgcgtgctggacatgcggagcatggacttcaagagcaactccgccgtggcctggtccaacaagtccgatttcgcctgcgccaacgccttcaacaacagcattatccccgaggacacattcttcccaagccccgagagcagctgcgacgtgaagctggtggaaaagagcttcgagacagacaccaacctgaacttccagaacctgctggtgatcgtgctgagaatcctgctgctgaaagtggccggctttaacctgctgatgaccctgcggctgtggtccagc

SEQ ID NO: 3794 - DNA, 420 bp, synthetic construct; identical to SEQ ID NO: 3793
  source 1..420: mol_type = other DNA

SEQ ID NO: 3795 - DNA, 420 bp, synthetic construct
  source 1..420: mol_type = other DNA
atccagaaccctgatcctgccgtgtaccagctgcgggatagcaagagcagcgacaagttcgtgtgtctgttcaccgacttcgacagccagatcaacgtgtcccagagcaaggactccgacgtgtacatcaccgataagtgcgtgctggacatgcggagcatggacttcaagagcaactccgccgtggcctggtccaacaagtccgatttcacctgcgccaacgccttcaacaacagcattatccccgaggacacattcttcccaagccccgagagcagctgcgacgtgaagctggtggaaaagagcttcgagacagacaccaacctgaacttccagaacctgagcgtgatcggcttcagaatcctgctgctgaaagtggccggctttaacctgctgatgaccctgcggctgtggtccagc

SEQ ID NO: 3796 - DNA, 420 bp, synthetic construct
  source 1..420: mol_type = other DNA
atccagaaccctgatcctgccgtgtaccagctgcgggatagcaagagcagcgacaagagcgtgtgtctgttcaccgacttcgacagccagaccaacgtgtcccagagcaaggactccgacgtgtacatcaccgataagaccgtgctggacatgcggagcatggacttcaagagcaactccgccgtggcctggtccagcaagtccgatttcgcctgcgccaacgccttcaacaacagcattatccccgaggacacattcttcccaagccccgagatggcctgcgacgtgaagctggtggaaaagagcttcgagacagacaccaacctgaacttccagaacctgctcgtgatctggctgagaatcctgctgctgaaagtggccggctttaacctgctgatgaccctgcggctgtggtccagc

SEQ ID NO: 3797 - DNA, 420 bp, synthetic construct
  source 1..420: mol_type = other DNA
atccagaaccctgatcctgccgtgtaccagctgcgggatagcaagagcagcgacaagagcgtgtgtctgttcaccgacttcgacagccagaccaacgtgtcccagagcaaggactccgacgtgtacatcaccgataagaccgtgctggacatgcggagcatggacttcaagagcaactccgccgtggcctggtccaccaagtccgatttcgcctgcgccaacgccttcaacaacagcattatccccgaggacacattcttcccaagccccgaggtggtgtgcgacgtgaagctggtggaaaagagcttcgagacagacaccaacctgaacttccagaacctggtggtgatcggcgccagaatcctgctgctgaaagtggccggctttaacctgctgatgaccctgcggctgtggtccagc

SEQ ID NO: 3798 - DNA, 321 bp, synthetic construct
  source 1..321: mol_type = other DNA
atccagaaccctgatcctgccgtgtacatcaccgataagaccgtgctggacatgcggagcatggacttcaagagcaactccgccgtggcctggtccaacaagtccgatttcgcctgcgccaacgccttcaacaacagcattatccccgaggacacattcttcccaagccccgagagcagctgcgacgtgaagctggtggaaaagagcttcgagacagacaccaacctgaacttccagaacctgagcgtgatcggcttcagaatcctgctgctgaaagtggccggctttaacctgctgatgaccctgcggctgtggtccagc

SEQ ID NO: 3799 - DNA, 408 bp, synthetic construct
  source 1..408: mol_type = other DNA
atccagaaccctgaacctgccgtgtaccagctgaaggaccccagaagccaggacagcaccctgtgcctgttcaccgacttcgacagccagatcaacgtgcccaagacaatggaaagcggcaccttcatcaccgacaagaccgtgctggacatgaaggctatggacagcaagagcaacggcgccattgcctggtccaaccagaccagcttcacatgccaggacatcttcaaagagacaaacgccacctacccctccagcgacgtgccctgtgacgccaccctgaccgagaagtccttcgagacagacatgaacctcaacttccagaacctgagcgtgatgggcctgcgaatcctgctgctgaaagtggccggcttcaacctgctgatgaccctgcggctgtggtccagc

SEQ ID NO: 3800 - DNA, 408 bp, synthetic construct
  source 1..408: mol_type = other DNA
atccagaaccctgaacctgccgtgtaccagctgaaggaccccagaagccaggacagcaccctgtgcctgttcaccgacttcgacagccagatcaacgtgcccaagacaatggaaagcggcaccttcatcaccgacaagtgcgtgctggacatgaaggctatggacagcaagagcaacggcgccattgcctggtccaaccagaccagcttcacatgccaggacatcttcaaagagacaaacgccacctacccctccagcgacgtgccctgtgacgccaccctgaccgagaagtccttcgagacagacatgaacctcaacttccagaacctgagcgtgatgggcctgcgaatcctgctgctgaaagtggccggcttcaacctgctgatgaccctgcggctgtggtccagc

SEQ ID NO: 3801 - DNA, 408 bp, synthetic construct
  source 1..408: mol_type = other DNA
atccagaaccctgaacctgccgtgtaccagctgaaggaccccagaagccaggacagcaccctgtgcctgttcaccgacttcgacagccagatcaacgtgcccaagacaatggaaagcggcaccttcatcaccgacaagtgcgtgctggacatgaaggctatggacagcaagagcaacggcgccattgcctggtccaaccagaccagcttcacatgccaggacatcttcaaagagacaaacgccacctacccctccagcgacgtgccctgtgacgccaccctgaccgagaagtccttcgagacagacatgaacctcaacttccagaacctgctggtggtgggcctgcgaatcctgctgctgaaagtggccggcttcaacctgctgatgaccctgcggctgtggtccagc

SEQ ID NO: 3802 - DNA, 399 bp, synthetic construct
  source 1..399: mol_type = other DNA
gtgcaggaccctgaccctagcgtgtaccagatgagaagccccaagaccggcaggaccgtgtgcctgttcaccgacttcgacagccaggccgacttccagaagcctgagggggccaccgtgatctccctgaacagcaccgtgctggacatgaaagtgatggacagcaagagcaacggcgctctgacctggaacagcgagacaaacatcgagtgcaaagagaacttccagcagcccttctaccccagcagcaactactcctgcgacgccaagctgatcgagaagtccttcgagacagacatggacctgaacttctacaacctgctggtcatcggcctgagaatcctgctgctgaaagtgatcggcttcaacctgttcatgaccctgaggctgtggtcctgc

SEQ ID NO: 3803 - DNA, 717 bp, synthetic construct
  source 1..717: mol_type = other DNA
atccagaaccctgatcctgccgtgtaccagctgcgggatagcaagagcagcgacaagagcgtgtgtctgttcaccgacttcgacagccagaccaacgtgtcccagagcaaggactccgacgtgtacatcaccgataagaccgtgctggacatgcggagcatggacttcaagagcaactccgccgtggcctggtccaacaagtccgatttcgcctgcgccaacgccttcaacaacagcattatccccgaggacacattcttcccaagccccgagagcagctgcggtacccagagttttgggttgttggaccctaaattgtgctatctgttggacggaatcctgttcatttacggagtgatcctgaccgcattgttcctgcgggttaagttttccagatccgcagacgcacccgcttaccaacaagggcagaaccaactctacaatgaacttaatttggggcggagggaagagtacgacgttctggacaaaaggaggggacgagatcccgagatgggcggaaagcctcagcgaaggaagaatccgcaagaggggctttataacgaactccagaaagataaaatggcagaagcctatagtgagattgggatgaagggagaaaggaggaggggtaaaggtcacgatgggttgtaccaaggattgagcacagccactaaagatacctatgatgcgctccacatgcaggccctgccgccaaga

SEQ ID NO: 3804 - DNA, 531 bp, synthetic construct
  source 1..531: mol_type = other DNA
gaggacctgaacaaggtgttcccacccgaggtcgctgtgtttgagccatcagaagcagagatctcccacacccaaaaggccacactggtgtgcctggccacaggcttcttccccgaccacgtggagctgagctggtgggtgaatgggaaggaggtgcacagtggggtcagcacagacccgcagcccctcaaggagcagcccgccctcaatgactccagatactgcctgagcagccgcctgagggtctcggccaccttctggcagaacccccgcaaccacttccgctgtcaagtccagttctacgggctctcggagaatgacgagtggacccaggatagggccaaacccgtcacccagatcgtcagcgccgaggcctggggtagagcagactgtggctttacctcggtgtcctaccagcaaggggtcctgtctgccaccatcctctatgagatcctgctagggaaggccaccctgtatgctgtgctggtcagcgcccttgtgttgatggccatggtcaagagaaaggatttc

SEQ ID NO: 3805 - DNA, 537 bp, synthetic construct
  source 1..537: mol_type = other DNA
gaggacctgaaaaacgtgttcccacccgaggtcgctgtgtttgagccatcagaagcagagatctcccacacccaaaaggccacactggtatgcctggccacaggcttctaccccgaccacgtggagctgagctggtgggtgaatgggaaggaggtgcacagtggggtcagcacagacccgcagcccctcaaggagcagcccgccctcaatgactccagatactgcctgagcagccgcctgagggtctcggccaccttctggcagaacccccgcaaccacttccgctgtcaagtccagttctacgggctctcggagaatgacgagtggacccaggatagggccaaacccgtcacccagatcgtcagcgccgaggcctggggtagagcagactgtggcttcacctccgagtcttaccagcaaggggtcctgtctgccaccatcctctatgagatcttgctagggaaggccaccttgtatgccgtgctggtcagtgccctcgtgctgatggccatggtcaagagaaaggattccagaggc

SEQ ID NO: 3806 - DNA, 537 bp, synthetic construct; identical to SEQ ID NO: 3805
  source 1..537: mol_type = other DNA

SEQ ID NO: 3807 - DNA, 537 bp, synthetic construct
  source 1..537: mol_type = other DNA
gaggacctgaagaacgtgttcccacctgaggtggccgtgttcgagcctagcgaggccgagatcagccacacccagaaagccaccctcgtgtgcctggctaccggcttctaccccgaccatgtggaactgtcttggtgggtcaacggcaaagaggtgcacagcggcgtgtgtaccgacccccagccactgaaagaacagcccgccctgaacgacagccggtactgcctgagcagcagactgagagtgtccgccaccttctggcagaacccccggaaccacttcagatgccaggtgcagttctacggcctgagcgagaacgacgagtggacccaggacagagccaagcccgtgacccagatcgtgtctgccgaagcctggggcagagccgattgcggctttaccagcgagagctaccagcagggcgtgctgagcgccaccatcctgtacgagatcctgctgggcaaggccaccctgtacgccgtgctggtgtctgccctggtgctgatggctatggtcaagcggaaggacagccgggga

SEQ ID NO: 3808 - DNA, 537 bp, synthetic construct
  source 1..537: mol_type = other DNA
gaggacctgaagaacgtgttcccacctgaggtggccgtgttcgagcctagcaaggccgagatcgcccacacccagaaagccaccctcgtgtgcctggctaccggcttctaccccgaccatgtggaactgtcttggtgggtcaacggcaaagaggtgcacagcggcgtgtgtaccgacccccagccactgaaagaacagcccgccctgaacgacagccggtactgcctgagcagcagactgagagtgtccgccaccttctggcagaacccccggaaccacttcagatgccaggtgcagttctacggcctgagcgagaacgacgagtggacccaggacagagccaagcccgtgacccagatcgtgtctgccgaagcctggggcagagccgattgcggcatcaccagcgccagctaccaccagggcgtgctgagcgccaccatcctgtacgagatcctgctgggcaaggccaccctgtacgccgtgctggtgtctgccctggtgctgatggctatggtcaagcggaaggacagccgggga

SEQ ID NO: 3809 - DNA, 537 bp, synthetic construct
  source 1..537: mol_type = other DNA
gaggacctgaagaacgtgttcccacctgaggtggccgtgttcgagcctagcgaggccgagatcagccacacccagaaagccaccctcgtgtgcctggctaccggcttctaccccgaccatgtggaactgtcttggtgggtcaacggcaaagaggtgcacagcggcgtgtctaccgacccccagccactgaaagaacagcccgccctgaacgacagccggtactgcctgagcagcagactgagagtgtccgccaccttctggcagaacccccggaaccacttcagatgccaggtgcagttctacggcctgagcgagaacgacgagtggacccaggacagagccaagcccgtgacccagatcgtgtctgccgaagcctggggcagagccgattgcggctttaccagcgagagctaccagcagggcgtgctgagcgccaccatcctgtacgagatcctgctgggcaaggccaccctgtacgccgtgctggtgtctgccctggtgctgatggctatggtcaagcggaaggacagccgggga

SEQ ID NO: 3810 - DNA, 534 bp, synthetic construct
  source 1..534: mol_type = other DNA
gacctgaagaacgtgttcccacctgaggtggccgtgttcgagcctagcgaggccgagatcagccacacccagaaagccaccctcgtgtgcctggctaccggcttctaccccgaccatgtggaactgtcttggtgggtcaacggcaaagaggtgcacagcggcgtgtctaccgacccccagccactgaaagaacagcccgccctgaacgacagccggtactgcctgagcagcagactgagagtgtccgccaccttctggcagaacccccggaaccacttcagatgccaggtgcagttctacggcctgagcgagaacgacgagtggacccaggacagagccaagcccgtgacccagatcgtgtctgccgaagcctggggcagagccgattgcggctttaccagcgagagctaccagcagggcgtgctgagcgccaccatcctgtacgagatcctgctgggcaaggccaccctgtacgccgtgctggtgtctgccctggtgctgatggctatggtcaagcggaaggacagccgggga

SEQ ID NO: 3811 - DNA, 531 bp, synthetic construct
  source 1..531: mol_type = other DNA
gaggacctgaagaacgtgttcccacctgaggtggccgtgttcgagcccagcgaggccgagatttcacacactcagaaagccacactcgtatgtctggcgactggtttctttcccgaccacgtggagctgtcttggtgggtgaacggcaaagaggtgcacagcggggtctctaccgacccccagccactgaaagagcagcccgccctgaacgacagccggtactgcctctcttctcggctgagagtgtccgccaccttctggcagaacccccggaaccacttcagatgccaggtgcagttctacggcctgagcgagaacgacgagtggacccaggacagagccaagcctgtgacccagatcgtgagtgctgaagcgtggggacgcgccgattgcggctttaccagcgagagctaccagcagggcgtgctgtctgccaccatcctgtacgagatcctgctgggcaaggccaccctgtacgccgtgctggtgtccgccctggtgctgatggctatggtgaagcggaaggacttc

SEQ ID NO: 3812 - DNA, 531 bp, synthetic construct
  source 1..531: mol_type = other DNA
gaggacctgaacaaggtgttcccacctgaggtggccgtgttcgagcccagcgaggccgagatttcacacactcagaaagccacactcgtatgtctggcgactggtttctttcccgaccacgtggagctgtcttggtgggtgaacggcaaagaggtgcacagcggggtctctaccgacccccagccactgaaagagcagcccgccctgaacgacagccggtactgcctctcttctcggctgagagtgtccgccaccttctggcagaacccccggaaccacttcagatgccaggtgcagttctacggcctgagcgagaacgacgagtggacccaggacagagccaagcctgtgacccagatcgtgagtgctgaagcgtggggacgcgccgattgcggctttaccagcgtgagctaccagcagggcgtgctgtctgccaccatcctgtacgagatcctgctgggcaaggccaccctgtacgccgtgctggtgtccgccctggtgctgatggctatggtgaagcggaaggacttc

SEQ ID NO: 3813 - DNA, 537 bp, synthetic construct
  source 1..537: mol_type = other DNA
gaggacctgaagaacgtgttcccacctgaggtggccgtgttcgagcctagcaaggccgagatcgcccacacccagaaagccaccctcgtgtgcctggctaccggcttctaccccgaccatgtggaactgtcttggtgggtcaacggcaaagaggtgcacagcggcgtgtctaccgacccccagccactgaaagaacagcccgccctgaacgacagccggtactgcctgagcagcagactgagagtgtccgccaccttctggcagaacccccggaaccacttcagatgccaggtgcagttctacggcctgagcgagaacgacgagtggacccaggacagagccaagcccgtgacccagatcgtgtctgccgaagcctggggcagagccgattgcggcatcaccagcgccagctaccaccagggcgtgctgagcgccaccatcctgtacgagatcctgctgggcaaggccaccctgtacgccgtgctggtgtctgccctggtgctgatggctatggtcaagcggaaggacagccgggga

SEQ ID NO: 3814 - DNA, 537 bp, synthetic construct
  source 1..537: mol_type = other DNA
gaggacctgaagaacgtgttcccacctgaggtggccgtgttcgagcctagcaaggccgagatcgcccacacccagaaagccaccctcgtgtgcctggctaccggcttctaccccgaccatgtggaactgtcttggtgggtcaacggcaaagaggtgcacagcggcgtgtctaccgacccccagccactgaaagaacagcccgccctgaacgacagccggtactgcctgagcagcagactgagagtgtccgccaccttctggcagaacccccggaaccacttcagatgccaggtgcagttctacggcctgagcgagaacgacgagtggacccaggacagagccaagcccgtgacccagatcgtgtctgccgaagcctggggcagagccgattgcggctttaccagcgagagctaccagcagggcgtgctgagcgccaccatcctgtacgagatcctgctgggcaaggccaccctgtacgccgtgctggtgtctgccctggtgctgatggctatggtcaagcggaaggacagccgggga

SEQ ID NO: 3815 - DNA, 537 bp, synthetic construct
  source 1..537: mol_type = other DNA
gaggacctgaagaacgtgttcccacctgaggtggccgtgttcgagcctagcaaggccgagatcagccacacccagaaagccaccctcgtgtgcctggctaccggcttctaccccgaccatgtggaactgtcttggtgggtcaacggcaaagaggtgcacagcggcgtgtctaccgacccccagccactgaaagaacagcccgccctgaacgacagccggtactgcctgagcagcagactgagagtgtccgccaccttctggcagaacccccggaaccacttcagatgccaggtgcagttctacggcctgagcgagaacgacgagtggacccaggacagagccaagcccgtgacccagatcgtgtctgccgaagcctggggcagagccgattgcggcatcaccagcgagagctaccagcagggcgtgctgagcgccaccatcctgtacgagatcctgctgggcaaggccaccctgtacgccgtgctggtgtctgccctggtgctgatggctatggtcaagcggaaggacagccgggga

SEQ ID NO: 3816 - DNA, 537 bp, synthetic construct
  source 1..537: mol_type = other DNA
gaggacctgaagaacgtgttcccacctgaggtggccgtgttcgagcctagcaaggccgagatcagccacacccagaaagccaccctcgtgtgcctggctaccggcttctaccccgaccatgtggaactgtcttggtgggtcaacggcaaagaggtgcacagcggcgtgtctaccgacccccagccactgaaagaacagcccgccctgaacgacagccggtactgcctgagcagcagactgagagtgtccgccaccttctggcagaacccccggaaccacttcagatgccaggtgcagttctacggcctgagcgagaacgacgagtggacccaggacagagccaagcccgtgacccagatcgtgtctgccgaagcctggggcagagccgattgcggctttaccagcgccagctaccagcagggcgtgctgagcgccaccatcctgtacgagatcctgctgggcaaggccaccctgtacgccgtgctggtgtctgccctggtgctgatggctatggtcaagcggaaggacagccgggga

SEQ ID NO: 3817 - DNA, 537 bp, synthetic construct
  source 1..537: mol_type = other DNA
gaggacctgaagaacgtgttcccacctgaggtggccgtgttcgagcctagcaaggccgagatcagccacacccagaaagccaccctcgtgtgcctggctaccggcttctaccccgaccatgtggaactgtcttggtgggtcaacggcaaagaggtgcacagcggcgtgtctaccgacccccagccactgaaagaacagcccgccctgaacgacagccggtactgcctgagcagcagactgagagtgtccgccaccttctggcagaacccccggaaccacttcagatgccaggtgcagttctacggcctgagcgagaacgacgagtggacccaggacagagccaagcccgtgacccagatcgtgtctgccgaagcctggggcagagccgattgcggctttaccagcgagagctaccaccagggcgtgctgagcgccaccatcctgtacgagatcctgctgggcaaggccaccctgtacgccgtgctggtgtctgccctggtgctgatggctatggtcaagcggaaggacagccgggga

SEQ ID NO: 3818 - DNA, 537 bp, synthetic construct
  source 1..537: mol_type = other DNA
gaggacctgaagaacgtgttcccacctgaggtggccgtgttcgagcctagcagggccgagatcgcccacacccagaaagccaccctcgtgtgcctggctaccggcttctaccccgaccatgtggaactgtcttggtgggtcaacggcaaagaggtgcacagcggcgtgtctaccgacccccagccactgaaagaacagcccgccctgaacgacagccggtactgcctgagcagcagactgagagtgtccgccaccttctggcagaacccccggaaccacttcagatgccaggtgcagttctacggcctgagcgagaacgacgagtggacccaggacagagccaagcccgtgacccagatcgtgtctgccgaagcctggggcagagccgattgcggctttaccagcgagagctaccagcagggcgtgctgagcgccaccatcctgtacgagatcctgctgggcaaggccaccctgtacgccgtgctggtgtctgccctggtgctgatggctatggtcaagcggaaggacagccgggga

SEQ ID NO: 3819 - DNA, 537 bp, synthetic construct
  source 1..537: mol_type = other DNA
gaggacctgaagaacgtgttcccacctgaggtggccgtgttcgagcctagcagggccgagatcagccacacccagaaagccaccctcgtgtgcctggctaccggcttctaccccgaccatgtggaactgtcttggtgggtcaacggcaaagaggtgcacagcggcgtgtctaccgacccccagccactgaaagaacagcccgccctgaacgacagccggtactgcctgagcagcagactgagagtgtccgccaccttctggcagaacccccggaaccacttcagatgccaggtgcagttctacggcctgagcgagaacgacgagtggacccaggacagagccaagcccgtgacccagatcgtgtctgccgaagcctggggcagagccgattgcggctttaccagcgagagctaccagcagggcgtgctgagcgccaccatcctgtacgagatcctgctgggcaaggccaccctgtacgccgtgctggtgtctgccctggtgctgatggctatggtcaagcggaaggacagccgggga

SEQ ID NO: 3820 - DNA, 537 bp, synthetic construct
  source 1..537: mol_type = other DNA
gaggacctgaagaacgtgttcccacctgaggtggccgtgttcgagcctagcaaggccgagatcgcccacacccagaaagccaccctcgtgtgcctggctaccggcttctaccccgaccatgtggaactgtcttggtgggtcaacggcaaagaggtgcacagcggcgtgtctaccgacccccagccactgaaagaacagcccgccctgaacgacagccggtactgcctgagcagcggactgagagtgtccgccaccttctggcagaacccccggaaccacttcagatgccaggtgcagttctacggcctgagcgagaacgacgagtggacccaggacagagccaagcccgtgacccagatcgtgtctgccgaagcctggggcagagccgattgcggcatcaccagcgccagctaccaccagggcgtgctgagcgccaccatcctgtacgagatcctgctgggcaaggccaccctgtacgccgtgctggtgtctgccctggtgctgatggctatggtcaagcggaaggacagccgggga

SEQ ID NO: 3821 - DNA, 537 bp, synthetic construct
  source 1..537: mol_type = other DNA
gaggacctgaagaacgtgttcccacctgaggtggccgtgttcgagcctagcaaggccgagatcgcccacacccagaaagccaccctcgtgtgcctggctaccggcttctaccccgaccatgtggaactgtcttggtgggtcaacggcaaagaggtgcacagcggcgtgtctaccgacccccagccactgaaagaacagcccgccctgaacgacagccggtactgcctgagcagcggactgagagtgtccgccaccttctggcagaacccccggaaccacttcagatgccaggtgcagttctacggcctgagcgagaacgacgagtggacccaggacagagccaagcccgtgacccagatcgtgtctgccgaagcctggggcagagccgattgcggctttaccagcgagagctaccagcagggcgtgctgagcgccaccatcctgtacgagatcctgctgggcaaggccaccctgtacgccgtgctggtgtctgccctggtgctgatggctatggtcaagcggaaggacagccgggga

SEQ ID NO: 3822 - DNA, 537 bp, synthetic construct
  source 1..537: mol_type = other DNA
gaggacctgaagaacgtgttcccacctgaggtggccgtgttcgagcctagcgaggccgagatcagccacacccagaaagccaccctcgtgtgcctggctaccggcttctaccccgaccatgtggaactgtcttggtgggtcaacggcaaagaggtgcacagcggcgtgtctaccgacccccagccactgaaagaacagcccgccctgaacgacagccggtactgcctgagcagcggactgagagtgtccgccaccttctggcagaacccccggaaccacttcagatgccaggtgcagttctacggcctgagcgagaacgacgagtggacccaggacagagccaagcccgtgacccagatcgtgtctgccgaagcctggggcagagccgattgcggctttaccagcgagagctaccagcagggcgtgctgagcgccaccatcctgtacgagatcctgctgggcaaggccaccctgtacgccgtgctggtgtctgccctggtgctgatggctatggtcaagcggaaggacagccgggga

SEQ ID NO: 3823 - DNA, 537 bp, synthetic construct
  source 1..537: mol_type = other DNA
gaggacctgaagaacgtgttcccacctgaggtggccgtgttcgagcctagcagggccgagatcagccacacccagaaagccaccctcgtgtgcctggctaccggcttctaccccgaccatgtggaactgtcttggtgggtcaacggcaaagaggtgcacagcggcgtgtgtaccgacccccagccactgaaagaacagcccgccctgaacgacagccggtactgcctgagcagcagactgagagtgtccgccaccttctggcagaacccccggaaccacttcagatgccaggtgcagttctacggcctgagcgagaacgacgagtggacccaggacagagccaagcccgtgacccagatcgtgtctgccgaagcctggggcagagccgattgcggctttaccagcgagagctaccagcagggcgtgctgagcgccaccatcctgtacgagatcctgctgggcaaggccaccctgtacgccgtgctggtgtctgccctggtgctgatggctatggtcaagcggaaggacagccgggga

SEQ ID NO: 3824 - DNA, 537 bp, synthetic construct
  source 1..537: mol_type = other DNA
gaggacctgaagaacgtgttcccacctgaggtggccgtgttcgagcctagcagggccgagatcgcccacacccagaaagccaccctcgtgtgcctggctaccggcttctaccccgaccatgtggaactgtcttggtgggtcaacggcaaagaggtgcacagcggcgtgtgtaccgacccccagccactgaaagaacagcccgccctgaacgacagccggtactgcctgagcagcagactgagagtgtccgccaccttctggcagaacccccggaaccacttcagatgccaggtgcagttctacggcctgagcgagaacgacgagtggacccaggacagagccaagcccgtgacccagatcgtgtctgccgaagcctggggcagagccgattgcggctttaccagcgagagctaccagcagggcgtgctgagcgccaccatcctgtacgagatcctgctgggcaaggccaccctgtacgccgtgctggtgtctgccctggtgctgatggctatggtcaagcggaaggacagccgggga

SEQ ID NO: 3825 - DNA, 537 bp, synthetic construct
  source 1..537: mol_type = other DNA
gaggacctgaagaacgtgttcccacctgaggtggccgtgttcgagcctagcaaggccgagatcagcagaacccagaaagccaccctcgtgtgcctggctaccggcttctaccctcctcatgtggaactgtcttggtgggtcaacggcaaagaggtgcacgacggcgtgtgtaccgacccccagccactgaaagaacagcccgccctgaacgacagccggtactgcctgagcagcagactgagagtgtccgccaccttctggcagaacccccggaaccacttcagatgccaggtgcagttctacggcctgagcgagaacgacgagtggacccaggacagagccaagcccgtgacccagatcgtgtctgccgaagcctggggcagagccgattgcggctttaccagcgagagctaccagcagggcgtgctgagcgccaccatcctgtacgagatcctgctgggcaaggccaccctgtacgccgtgctggtgtctgccctggtgctgatggctatggtcaagcggaaggacagccgggga

SEQ ID NO: 3826 - DNA, 537 bp, synthetic construct
  source 1..537: mol_type = other DNA
gaggacctgaagcacgtgttcccacctgaggtggccgtgttcgagcctagcgacgccgagatctggcacacccagaaagccaccctcgtgtgcctggctaccggcttctaccccgaccatgtggaactgtcttggtgggtcaacggcaaagaggtgcacagcggcgtgtctaccgacccccagccactgaaagaacagcccgccctgaacgacagccggtactgcctgagcagcagactgagagtgtccgccaccttctggcagaacccccggaaccacttcagatgccaggtgcagttctacggcctgagcgagaacgacgagtggacccaggacagagccaagcccgtgacccagatcgtgtctgccgaagcctggggcagagccgattgcggctttaccagcgagagctaccagcagggcgtgctgagcgccaccatcctgtacgagatcctgctgggcaaggccaccctgtacgccgtgctggtgtctgccctggtgctgatggctatggtcaagcggaaggacagccgggga

SEQ ID NO: 3827 - DNA, 513 bp, synthetic construct
  source 1..513: mol_type = other DNA
gaggatctgcggaacgtgaccccacccaaggtgtccctgttcgagcccagcaaggccgagatcgccaataaacagaaggccaccctcgtgtgcctggccagaggcttcttccccgaccacgtggaactgtcttggtgggtcaacggcaaagaggtgcacagcggcgtcagcaccgaccctcaggcctacaaagagagcaactacagctactgcctgagcagtcggctgcgggtgtccgccaccttctggcacaacccccggaaccacttcagatgccaggtgcagttccacggcctgagcgaagaggacaagtggcccgagggcagccccaagcctgtcacccagaacatcagcgccgaggcctggggcagagcctgtggcatcaccagcagctaccagcagggcgtgctgagcgccaccatcctgtacgagatcctgctgggcaaggccaccctgtacgccgtgctggtgtccaccctggtggtcatggctatggtcaagcggaagaacagc

SEQ ID NO: 3828 - DNA, 513 bp, synthetic construct
  source 1..513: mol_type = other DNA
gaggatctgcggaacgtgaccccacccaaggtgtccctgttcgagcccagcaaggccgagatcgccaataaacagaaggccaccctcgtgtgcctggccagaggcttcttccccgaccacgtggaactgtcttggtgggtcaacggcaaagaggtgcacagcggcgtctgcaccgaccctcaggcctacaaagagagcaactacagctactgcctgagcagtcggctgcgggtgtccgccaccttctggcacaacccccggaaccacttcagatgccaggtgcagttccacggcctgagcgaagaggacaagtggcccgaaggcagccctaagcctgtcacccagaacatcagcgccgaggcctggggcagagcctgtggcatcaccagcagctaccagcagggcgtgctgagcgccaccatcctgtacgagatcctgctgggcaaggccaccctgtacgccgtgctggtgtccaccctggtggtcatggctatggtcaagcggaagaacagc

SEQ ID NO: 3829 - DNA, 531 bp, synthetic construct
  source 1..531: mol_type = other DNA
gaggacctccagaaagtgaccccccctaccgtgaccgtgttcgagccttctgaggccgagatcagccggacccagaaagccacactcgtgtgcctggctcggggcttctaccccgatcacgtggaactgtcttggtgggtcaacggcaaagaagtgaccagcggcttcagcaccgacccccagcctgacaaagagcggcccagcgagaacgacagcagctactgcctgagcagcagactgagagtgtccgccagcttctggcacaacccccggaaccacttcagatgccaggtgcagttctacggcctgggcgacgacgacgagtggaagtacgacagagtgaagcccatcacccagaacatcagcgccgaagcctggggcagagccgattgcggctttacctccgtcagctaccaccagggcgtgctgagcgccaccatcctgtacgagatcctgctgggcaaggccaccctgtacgccgtgctggtgtctatcctggtgctgatggctaaagtgaagcggaagggcagc

SEQ ID NO: 3830 - DNA, 828 bp, synthetic construct
  source 1..828: mol_type = other DNA
gaggacctgaagaacgtgttcccacctgaggtggccgtgttcgagcctagcgaggccgagatcagccacacccagaaagccaccctcgtgtgcctggctaccggcttctaccccgaccatgtggaactgtcttggtgggtcaacggcaaagaggtgcacagcggcgtgtctaccgacccccagccactgaaagaacagcccgccctgaacgacagccggtactgcctgagcagcagactgagagtgtccgccaccttctggcagaacccccggaaccacttcagatgccaggtgcagttctacggcctgagcgagaacgacgagtggacccaggacagagccaagcccgtgacccagatcgtgtctgccgaagcctggggcagagccgattgcggatcccagagcttcggcctgctggaccccaagctgtgctacctgctggatggcatcctgttcatctacggcgtgatcctgaccgccctgttcctgagagtgaagttcagcagaagcgccgacgcccctgcctaccagcagggacagaaccaactgtacaacgagctgaacctgggcagacgggaagagtacgacgtgctggacaagcggagaggcagggaccctgagatgggcggaaagccccagcggagaaagaacccccaggaaggactgtataacgaactccagaaagacaagatggccgaagcctacagcgagatcggcatgaagggcgagcggagaagaggcaagggccacgatggcctgtaccagggcctgagcaccgccaccaaggacacctatgacgccctgcacatgcaggccctgcctccaaga

SEQ ID NO: 3831 - DNA, 807 bp, synthetic construct
  source 1..807: mol_type = other DNA
gggtgtccagccctacccacaggtgtgggcggcacaccctttccttctctggccccaccaatcatgctgctggtggatggaaagcagcagatggtggtggtctgcctggtccttgatgttgcaccccctggccttgacagccccatctggttctcagccggcaatggcagtgcactggatgccttcacctatggcccttccccagcaacggatggcacctggaccaacttggcccatctctccctgccttctgaggagctggcatcctgggagcctttggtctgccacactgggcctggggctgagggtcacagcaggagtacacagcccatgcatctgtcaggagaggcttctacagccaggacctgcccccaggagcctctcagggggacaccgggtggggcgctgtggctgggggtcctgcggctgctgctcttcaagctgctgctgtttgacctgctcctgacctgcagctgcctgtgcgaccccgcgggcccgctgccttcccccgcaaccaccacccgcctgcgagccctcgggtcccatcgactgcacccggccacggagactgggggacgagaggccaccagctcacccagaccccagcctcgggaccgccgctggggtgacacccctccgggtcggaagcccgggagcccagtatggggggaagggtcttacctcagcagttaccccacttgcccagcacaggcctggtgctcaagatctcgcctcagggctccttcctccagtcttggagcattttttgcaggtgacctgcctcctcctctgcaggctggagctgcc

SEQ ID NO: 3832 - DNA, 774 bp, synthetic construct
  source 1..774: mol_type = other DNA
accccattcccttctctggcccctcccatcatgctgctggtggacggcaagcagcagatggtggtcgtgtgcctggtgctggatgtggccccacctggactggacagccccatctggtttagcgccggcaatggctctgccctggacgcctttacctacggcccaagccctgccaccgatggcacctggacaaatctggcccacctgagcctgcccagcgaggaactggcttcttgggagcctctcgtgtgccacacaggacctggcgctgagggacacagcagatccacccagcctatgcacctgtctggcgaggccagcaccgccagaacctgtcctcaggaacctctgagaggcacccctggcggagcactgtggctgggagtgctgagactgctgctgttcaagctgctgctgtttgacctgctgctgacctgctcctgtctgtgcgatcctgccggccctctgccttctcctgccaccaccacaagactgagagccctgggcagccacagactgcaccctgccacagagacaggcggcagagaggccacaagcagccctagaccccagcccagagacagaagatggggcgataccccccctggcagaaagcctggatctccagtgtggggcgagggcagctacctgagcagctaccctacatgccctgcccaggcttggtgcagcagaagcgcactgagagcacccagctctagcctgggagccttctttgccggcgatctgcctccaccactccaggctggcgctgct

SEQ ID NO: 3833 - DNA, 630 bp, synthetic construct
  source 1..630: mol_type = other DNA
accccattcccttctctggcccctcccatcatgctgctggtggacggcaagcagcagatggtggtcgtgtgcctggtgctggatgtggccccacctggactggacagccccatctggtttagcgccggcaatggctctgccctggacgcctttacctacggcccaagccctgccaccgatggcacctggacaaatctggcccacctgagcctgcccagcgaggaactggcttcttgggagcctctcgtgtgccacacaggacctggcgctgagggacacagcagatccacccagcctatgcacctgtctggcgaggccagcaccgccagaacctgtcctcaggaacctctgagaggcacccctggcggagcactgtggctgggagtgctgagactgctgctgttcaagctgctgctgtttgacctgctgctgacctgctcctgtctgtgcgatcctgccggccctctgccttctcctgccaccaccacaagactgagagccctgggcagccacagactgcaccctgccacagagacaggcggcagagaggccacaagcagccctagaccccagcccagagacagaagatggggcgataccccccctggcagaaagcctggatctccagtc

SEQ ID NO: 3834 - DNA, 567 bp, synthetic construct
  source 1..567: mol_type = other DNA
gataaacaacttgatgcagatgtttcccccaagcccactatttttcttccttcaattgctgaaacaaaactccagaaggctggaacatacctttgtcttcttgagaaatttttcccagatattattaagatacattggcaagaaaagaagagcaacacgattctgggatcccaggaggggaacaccatgaagactaacgacacatacatgaaatttagctggttaacggtgccagaagagtcactggacaaagaacacagatgtatcgtcagacatgagaataataaaaacggaattgatcaagaaattatctttcctccaataaagacagatgtcaccacagtggatcccaaatacaattattcaaaggatgcaaatgatgtcatcacaatggatcccaaagacaattggtcaaaagatgcaaatgatacactactgctgcagctcacaaacacctctgcatattacatgtacctcctcctgctcctcaagagtgtggtctattttgccatcatcacctgctgtctgcttggaagaacggctttctgctgcaatggagagaaatca

SEQ ID NO: 3835 - DNA, 519 bp, synthetic construct
  source 1..519: mol_type = other DNA
gacaagcagctggacgccgacgtgtcccccaagcctaccatcttcctgccctctatcgccgagacaaagctccagaaggccggcacctacctgtgcctgctggaaaagttcttcccagatgtgattaagatccactggcaggaaaagaagtccaacaccatcctgggcagccaggaaggcaacaccatgaagaccaacgacacctacatgaagttcagctggctgaccgtgcccgagaagtccctggacaaagaacacagatgcatcgtgcggcacgaaaacaacaagaacggcgtggaccaggaaatcatcttcccacccatcaagaccgatgtgattacaatggaccccaaggacaactgctccaaggacgccaacgataccctgctgctccagctgaccaacaccagcgcctactacatgtacttgttgctgctgctgaagtccgtggtgtacttcgccatcatcacatgctgcctgctgcggagaaccgccttctgctgcaacggcgagaagtct

SEQ ID NO: 3836 - DNA, 504 bp, synthetic construct
  source 1..504: mol_type = other DNA
gccgacgtgtcccccaagcctaccatcttcctgccctctatcgccgagacaaagctccagaaggccggcacctacctgtgcctgctggaaaagttcttcccagatgtgattaagatccactggcaggaaaagaagtccaacaccatcctgggcagccaggaaggcaacaccatgaagaccaacgacacctacatgaagttcagctggctgaccgtgcccgagaagtccctggacaaagaacacagatgcatcgtgcggcacgaaaacaacaagaacggcgtggaccaggaaatcatcttcccacccatcaagaccgatgtgattacaatggaccccaaggacaactgctccaaggacgccaacgataccctgctgctccagctgaccaacaccagcgcctactacatgtacttgttgctgctgctgaagtccgtggtgtacttcgccatcatcacatgctgcctgctgcggagaaccgccttctgctgcaacggcgagaagtct

SEQ ID NO: 3837 - DNA, 498 bp, synthetic construct
  source 1..498: mol_type = other DNA
gtgtcccccaagcctaccatcttcctgccctctatcgccgagacaaagctccagaaggccggcacctacctgtgcctgctggaaaagttcttcccagatgtgattaagatccactggcaggaaaagaagtccaacaccatcctgggcagccaggaaggcaacaccatgaagaccaacgacacctacatgaagttcagctggctgaccgtgcccgagaagtccctggacaaagaacacagatgcatcgtgcggcacgaaaacaacaagaacggcgtggaccaggaaatcatcttcccacccatcaagaccgatgtgattacaatggaccccaaggacaactgctccaaggacgccaacgataccctgctgctccagctgaccaacaccagcgcctactacatgtacttgttgctgctgctgaagtccgtggtgtacttcgccatcatcacatgctgcctgctgcggagaaccgccttctgctgcaacggcgagaagtct

SEQ ID NO: 3838 - DNA, 483 bp, synthetic construct
  source 1..483: mol_type = other DNA
accatcttcctgccctctatcgccgagacaaagctccagaaggccggcacctacctgtgcctgctggaaaagttcttcccagatgtgattaagatccactggcaggaaaagaagtccaacaccatcctgggcagccaggaaggcaacaccatgaagaccaacgacacctacatgaagttcagctggctgaccgtgcccgagaagtccctggacaaagaacacagatgcatcgtgcggcacgaaaacaacaagaacggcgtggaccaggaaatcatcttcccacccatcaagaccgatgtgattacaatggaccccaaggacaactgctccaaggacgccaacgataccctgctgctccagctgaccaacaccagcgcctactacatgtacttgttgctgctgctgaagtccgtggtgtacttcgccatcatcacatgctgcctgctgcggagaaccgccttctgctgcaacggcgagaagtct

SEQ ID NO: 3839 - DNA, 516 bp, synthetic construct
  source 1..516: mol_type = other DNA
gacaagagactggacgccgacatcagccccaagcctacaatcttcctgcctagcgtggccgagacaaacctgcacaagaccggcacctacctgtgtctgctggaaaagttcttccccgacgtgatccgggtgtactggaaagagaaggacggcaacaccatcctggactcccaagagggcgacaccctgaaaacaaacgacacctacatgaagttcagctggctgaccgtgcctgagagagctatgggcaaagaacacagatgcatcgtgaagcacgagaacaacaaaggcggagccgaccaagagatattcttcccgagcatcaagaaagtggccgtgtccaccaagccaaccacctgttggcaggacaagaacgacgtgctccagctccagttcaccatcaccagcgcctactacacatacctgctgctgctcctcaagagcgtgatctacctggccatcatcagcttcagcctgctgcggagaacaagcgtgtgcggcaacgagaagaagtcc

SEQ ID NO: 3840 - DNA, 459 bp, synthetic construct
  source 1..459: mol_type = other DNA
agtcagcctcataccaaaccatccgtttttgtcatgaaaaatggaacaaatgtcgcttgtctggtgaaggaattctaccccaaggatataagaataaatctcgtgtcatccaagaagataacagagtttgatcctgctattgtcatctctcccagtgggaagtacaatgctgtcaagcttggtaaatatgaagattcaaattcagtgacatgttcagttcaacacgacaataaaactgtgcactccactgactttgaagtgaagacagattctacagatcacgtaaaaccaaaggaaactgaaaacacaaagcaaccttcaaagagctgccataaacccaaagccatagttcataccgagaaggtgaacatgatgtccctcacagtgcttgggctacgaatgctgtttgcaaagactgttgccgtcaattttctcttgactgccaagttatttttcttg

SEQ ID NO: 3841 - DNA, 459 bp, synthetic construct
  source 1..459: mol_type = other DNA
agccagcctcacaccaagcccagcgtgttcgtgatgaagaacggcaccaacgtggcctgcctcgtgaaagagttctaccccaaggacatcaggatcaacctggtgtccagcaagaagatcaccgagttcgaccccgccatcgtgatctcccccagcggcaagtacaacgccgtgaagctggggaagtacgaggacagcaacagcgtgacctgctccgtgcagcacgacaacaagaccgtgcacagcaccgactttgaagtgaaaaccgactccaccgaccacgtgaagcccaaagagacagagaacaccaagcagcccagcaagagctgccacaagcccaaggccatcgtgcacaccgagaaagtgaacatgatgagcctgaccgtgctgggcctgcggatgctgttcgccaaaaccgtggccgtgaacttcctgctgaccgccaagctgttcttcctc

SEQ ID NO: 3842 - DNA, 456 bp, synthetic construct
  source 1..456: mol_type = other DNA
tctcagcctcctgccaagcctagcgtgttcattatgaagaacggcaccaacgtggcctgcctggtcaaggacttctaccccaaagaagtgaccatcagcctgcggagcagcaagaagatcgtcgagttcgaccccgccatcgtgattagccctagcggcaagtatagcgccgtgaagctgggccagtacggcgacagcaatagcgtgacatgtagcgtgcagcacaacagcgagacagtgcacagcaccgacttcgagccctacgccaacagcttcaacaacgagaagctgcccgagcctgagaacgacacccagatcagcgagccttgctacggccctagagtgaccgtgcacaccgagaaagtgaacatgatgagcctgaccgtgctgggcctgagactgctgttcgccaagacaatcgccatcaactttctgctgaccgtcaagctgttcttc

SEQ ID NO: 3843 - DNA, 90 bp, synthetic construct
  source 1..90: mol_type = other DNA
cagagcttcggcctgctggaccccaagctgtgctacctgctggatggcatcctgttcatctacggcgtgatcctgaccgccctgttcctg

SEQ ID NO: 3844 - DNA, 429 bp, synthetic construct
  source 1..429: mol_type = other DNA
cagagcttcggcctgctggaccccaagctgtgctacctgctggatggcatcctgttcatctacggcgtgatcctgaccgccctgttcctgagagtgaagttcagcagaagcgccgacgcccctgcctaccagcagggacagaaccaactgtacaacgagctgaacctgggcagacgggaagagtacgacgtgctggacaagcggagaggcagggaccctgagatgggcggaaagccccagcggagaaagaacccccaggaaggactgtataacgaactccagaaagacaagatggccgaagcctacagcgagatcggcatgaagggcgagcggagaagaggcaagggccacgatggcctgtaccagggcctgagcaccgccaccaaggacacctatgacgccctgcacatgcaggccctgcctccaaga

SEQ ID NO: 3845 - DNA, 429 bp, synthetic construct; identical to SEQ ID NO: 3844
  source 1..429: mol_type = other DNA

SEQ ID NO: 3846 - DNA, 123 bp, synthetic construct
  source 1..123: mol_type = other DNA
aggagtaagaggagcaggctcctgcacagtgactacatgaacatgactccacgccgccccggacccacccgcaagcattaccagccctatgccccaccacgcgacttcgcagcctatcgctcc

SEQ ID NO: 3847 - DNA, 126 bp, synthetic construct
  source 1..126: mol_type = other DNA
aaacggggcagaaagaaactcctgtatatattcaaacaaccatttatgagaccagtacaaactactcaagaggaagatggctgtagctgccgatttccagaagaagaagaaggaggatgtgaactg

SEQ ID NO: 3848 - DNA, 165 bp, synthetic construct
  source 1..165: mol_type = other DNA
aagaaccggaaggccaaggccaagcctgtgacaagaggtgctggtgctggcggcagacagagaggccagaacaaagaaagacctcctcctgtgcctaatcctgactacgagcccatcagaaaaggccagcgggatctgtacagcggcctgaaccagcggcggatc

SEQ ID NO: 3849 - DNA, 90 bp, synthetic construct
  source 1..90: mol_type = other DNA
cagagttttgggttgttggaccctaaattgtgctatctgttggacggaatcctgttcatttacggagtgatcctgaccgcattgttcctg

SEQ ID NO: 3850 - DNA, 339 bp, synthetic construct
  source 1..339: mol_type = other DNA
cgggttaagttttccagatccgcagacgcacccgcttaccaacaagggcagaaccaactctacaatgaacttaatttggggcggagggaagagtacgacgttctggacaaaaggaggggacgagatcccgagatgggcggaaagcctcagcgaaggaagaatccgcaagaggggctttataacgaactccagaaagataaaatggcagaagcctatagtgagattgggatgaagggagaaaggaggaggggtaaaggtcacgatgggttgtaccaaggattgagcacagccactaaagatacctatgatgcgctccacatgcaggccctgccgccaaga

SEQ ID NO: 3851 - DNA, 429 bp, synthetic construct
  source 1..429: mol_type = other DNA
cagagttttgggttgttggaccctaaattgtgctatctgttggacggaatcctgttcatttacggagtgatcctgaccgcattgttcctgcgggttaagttttccagatccgcagacgcacccgcttaccaacaagggcagaaccaactctacaatgaacttaatttggggcggagggaagagtacgacgttctggacaaaaggaggggacgagatcccgagatgggcggaaagcctcagcgaaggaagaatccgcaagaggggctttataacgaactccagaaagataaaatggcagaagcctatagtgagattgggatgaagggagaaaggaggaggggtaaaggtcacgatgggttgtaccaaggattgagcacagccactaaagatacctatgatgcgctccacatgcaggccctgccgccaaga

SEQ ID NO: 3852 - DNA, 123 bp, synthetic construct
  source 1..123: mol_type = other DNA
aggagcaagcggtcacggctgctccacagcgattacatgaatatgacaccacgaagaccgggtcctactcgcaaacactaccaaccctacgcacctccccgcgactttgcagcgtaccgatct

SEQ ID NO: 3853 - DNA, 126 bp, synthetic construct
  source 1..126: mol_type = other DNA
aagagaggccggaagaagctgctgtacatcttcaagcagcctttcatgcggcccgtgcagaccacccaggaagaggacggctgctcctgccggttccccgaggaagaagaaggcggctgcgagctg

SEQ ID NO: 3854 - DNA, 552 bp, synthetic construct
  source 1..552: mol_type = other DNA
cagagcttcggcctgctggaccccaagctgtgctacctgctggatggcatcctgttcatctacggcgtgatcctgaccgccctgttcctgaggagtaagaggagcaggctcctgcacagtgactacatgaacatgactccacgccgccccggacccacccgcaagcattaccagccctatgccccaccacgcgacttcgcagcctatcgctccagagtgaagttcagcagaagcgccgacgcccctgcctaccagcagggacagaaccaactgtacaacgagctgaacctgggcagacgggaagagtacgacgtgctggacaagcggagaggcagggaccctgagatgggcggaaagccccagcggagaaagaacccccaggaaggactgtataacgaactccagaaagacaagatggccgaagcctacagcgagatcggcatgaagggcgagcggagaagaggcaagggccacgatggcctgtaccagggcctgagcaccgccaccaaggacacctatgacgccctgcacatgcaggccctgcctccaaga

SEQ ID NO: 3855 - DNA, 555 bp, synthetic construct
  source 1..555: mol_type = other DNA
cagagcttcggcctgctggaccccaagctgtgctacctgctggatggcatcctgttcatctacggcgtgatcctgaccgccctgttcctgaaacggggcagaaagaaactcctgtatatattcaaacaaccatttatgagaccagtacaaactactcaagaggaagatggctgtagctgccgatttccagaagaagaagaaggaggatgtgaactgagagtgaagttcagcagaagcgccgacgcccctgcctaccagcagggacagaaccaactgtacaacgagctgaacctgggcagacgggaagagtacgacgtgctggacaagcggagaggcagggaccctgagatgggcggaaagccccagcggagaaagaacccccaggaaggactgtataacgaactccagaaagacaagatggccgaagcctacagcgagatcggcatgaagggcgagcggagaagaggcaagggccacgatggcctgtaccagggcctgagcaccgccaccaaggacacctatgacgccctgcacatgcaggccctgcctccaaga

SEQ ID NO: 3856 - DNA, 552 bp, synthetic construct
  source 1..552: mol_type = other DNA
cagagttttgggttgttggaccctaaattgtgctatctgttggacggaatcctgttcatttacggagtgatcctgaccgcattgttcctgaggagcaagcggtcacggctgctccacagcgattacatgaatatgacaccacgaagaccgggtcctactcgcaaacactaccaaccctacgcacctccccgcgactttgcagcgtaccgatctcgggttaagttttccagatccgcagacgcacccgcttaccaacaagggcagaaccaactctacaatgaacttaatttggggcggagggaagagtacgacgttctggacaaaaggaggggacgagatcccgagatgggcggaaagcctcagcgaaggaagaatccgcaagaggggctttataacgaactccagaaagataaaatggcagaagcctatagtgagattgggatgaagggagaaaggaggaggggtaaaggtcacgatgggttgtaccaaggattgagcacagccactaaagatacctatgatgcgctccacatgcaggccctgccgccaaga

SEQ ID NO: 3857 - DNA, 555 bp, synthetic construct
  source 1..555: mol_type = other DNA
cagagttttgggttgttggaccctaaattgtgctatctgttggacggaatcctgttcatttacggagtgatcctgaccgcattgttcctgaagagaggccggaagaagctgctgtacatcttcaagcagcctttcatgcggcccgtgcagaccacccaggaagaggacggctgctcctgccggttccccgaggaagaagaaggcggctgcgagctgcgggttaagttttccagatccgcagacgcacccgcttaccaacaagggcagaaccaactctacaatgaacttaatttggggcggagggaagagtacgacgttctggacaaaaggaggggacgagatcccgagatgggcggaaagcctcagcgaaggaagaatccgcaagaggggctttataacgaactccagaaagataaaatggcagaagcctatagtgagattgggatgaagggagaaaggaggaggggtaaaggtcacgatgggttgtaccaaggattgagcacagccactaaagatacctatgatgcgctccacatgcaggccctgccgccaaga

SEQ ID NO: 3858 - DNA, 180 bp, synthetic construct
  source 1..180: mol_type = other DNA
atccccgaggacacattcttcccaagccccgagagcagctgcgacgtgaagctggtggaaaagagcttcgagacagacaccaacctgaacttccagaacctgagcgtgatcggcttcagaatcctgctgctgaaagtggccggctttaacctgctgatgaccctgcggctgtggtccagc

SEQ ID NO: 3859 - DNA, 150 bp, synthetic construct
  source 1..150: mol_type = other DNA
gagagcagctgcgacgtgaagctggtggaaaagagcttcgagacagacaccaacctgaacttccagaacctgagcgtgatcggcttcagaatcctgctgctgaaagtggccggctttaacctgctgatgaccctgcggctgtggtccagc

SEQ ID NO: 3860 - DNA, 537 bp, synthetic construct; identical to SEQ ID NO: 3807
  source 1..537: mol_type = other DNA

SEQ ID NO: 3861 - DNA, 345 bp, synthetic construct
  source 1..345: mol_type = other DNA
gaacagcccgccctgaacgacagccggtactgcctgagcagcagactgagagtgtccgccaccttctggcagaacccccggaaccacttcagatgccaggtgcagttctacggcctgagcgagaacgacgagtggacccaggacagagccaagcccgtgacccagatcgtgtctgccgaagcctggggcagagccgattgcggctttaccagcgagagctaccagcagggcgtgctgagcgccaccatcctgtacgagatcctgctgggcaaggccaccctgtacgccgtgctggtgtctgccctggtgctgatggctatggtcaagcggaaggacagccgggga

SEQ ID NO: 3862 - DNA, 159 bp, synthetic construct
  source 1..159: mol_type = other DNA
ggcagagccgattgcggctttaccagcgagagctaccagcagggcgtgctgagcgccaccatcctgtacgagatcctgctgggcaaggccaccctgtacgccgtgctggtgtctgccctggtgctgatggctatggtcaagcggaaggacagccgggga

SEQ ID NO: 3863 - DNA, 153 bp, synthetic construct
  source 1..153: mol_type = other DNA
gccgattgcggctttaccagcgagagctaccagcagggcgtgctgagcgccaccatcctgtacgagatcctgctgggcaaggccaccctgtacgccgtgctggtgtctgccctggtgctgatggctatggtcaagcggaaggacagccgggga

SEQ ID NO: 3864 - DNA, 519 bp, synthetic construct; identical to SEQ ID NO: 3835
  source 1..519: mol_type = other DNA

SEQ ID NO: 3865 - DNA, 201 bp, synthetic construct
  source 1..201: mol_type = other DNA
cccatcaagaccgatgtgattacaatggaccccaaggacaactgctccaaggacgccaacgataccctgctgctccagctgaccaacaccagcgcctactacatgtacttgttgctgctgctgaagtccgtggtgtacttcgccatcatcacatgctgcctgctgcggagaaccgccttctgctgcaacggcgagaagtct

SEQ ID NO: 3866 - DNA, 177 bp, synthetic construct
  source 1..177: mol_type = other DNA
atggaccccaaggacaactgctccaaggacgccaacgataccctgctgctccagctgaccaacaccagcgcctactacatgtacttgttgctgctgctgaagtccgtggtgtacttcgccatcatcacatgctgcctgctgcggagaaccgccttctgctgcaacggcgagaagtct

SEQ ID NO: 3867 - DNA, 459 bp, synthetic construct; identical to SEQ ID NO: 3841
  source 1..459: mol_type = other DNA

SEQ ID NO: 3868 - DNA, 204 bp, synthetic construct
  source 1..204: mol_type = other DNA
gaagtgaaaaccgactccaccgaccacgtgaagcccaaagagacagagaacaccaagcagcccagcaagagctgccacaagcccaaggccatcgtgcacaccgagaaagtgaacatgatgagcctgaccgtgctgggcctgcggatgctgttcgccaaaaccgtggccgtgaacttcctgctgaccgccaagctgttcttcctc

SEQ ID NO: 3869 - DNA, 183 bp, synthetic construct
  source 1..183: mol_type = other DNA
gaccacgtgaagcccaaagagacagagaacaccaagcagcccagcaagagctgccacaagcccaaggccatcgtgcacaccgagaaagtgaacatgatgagcctgaccgtgctgggcctgcggatgctgttcgccaaaaccgtggccgtgaacttcctgctgaccgccaagctgttcttcctc

SEQ ID NO: 3870 - DNA, 531 bp, synthetic construct
  source 1..531: mol_type = other DNA
cagagttttgggttgttggaccctaaattgtgctatctgttggacggaatcctgttcatttacggagtgatcctgaccgcattgttcctgaacatctatgatgcctttgttatctactcaagccaggatgaggactgggtaaggaatgagctagtaaagaatttagaagaaggggtgcctccatttcagctctgccttcactacagagactttattcccggtgtggccattgctgccaacatcatccatgaaggtttccataaaagccgaaaggtgattgttgtggtgtcccagcacttcatccagagccgctggtgtatctttgaatatgagattgctcagacctggcagtttctgagcagtcgtgctggtatcatcttcattgtcctgcagaaggtggagaagaccctgctcaggcagcaggtggagctgtaccgccttctcagcaggaacacttacctggagtgggaggacagtgtcctggggcggcacatcttctggagacgactcagaaaagccctgctggatggt

SEQ ID NO: 3871 - DNA, 867 bp, synthetic construct
  source 1..867: mol_type = other DNA
cagagttttgggttgttggaccctaaattgtgctatctgttggacggaatcctgttcatttacggagtgatcctgaccgcattgttcctgcgggttaagttttccagatccgcagacgcacccgcttaccaacaagggcagaaccaactctacaatgaacttaatttggggcggagggaagagtacgacgttctggacaaaaggaggggacgagatcccgagatgggcggaaagcctcgaaggaagaatccgcaagaggggctttataacgaactccagaaagataaaatggcagaagcctatagtgagattgggatgaagggagaaaggaggaggggtaaaggtcacgatgggttgtaccaaggattgagcacagccactaaagatacctatgatgcgctccacatgcaggccctgccgccaagaaacatctatgatgcctttgttatctactcaagccaggatgaggactgggtaaggaatgagctagtaaagaatttagaagaaggggtgcctccatttcagctctgccttcactacagagactttattcccggtgtggccattgctgccaacatcatccatgaaggtttccataaaagccgaaaggtgattgttgtggtgtcccagcacttcatccagagccgctggtgtatctttgaatatgagattgctcagacctggcagtttctgagcagtcgtgctggtatcatcttcattgtcctgcagaaggtggagaagaccctgctcaggcagcaggtggagctgtaccgccttctcagcaggaacacttacctggagtgggaggacagtgtcctggggcggcacatcttctggagacgactcagaaaagccctgctggatggt

SEQ ID NO: 3872 - DNA, 654 bp, synthetic construct
  source 1..654: mol_type = other DNA
cagagcttcggcctgctggaccccaagctgtgctacctgctggatggcatcctgttcatctacggcgtgatcctgaccgccctgttcctgcacagacgggcctgtcggaagcggatcagacagaaactgcacctgtgctaccccgtgcagaccagccagcctaaactggaactggtggacagcagacccagaagaagcagcacccagctgagaagcggagcctctgtgacagaacctgtggccgaagaacggggcctgatgtctcagcctctgatggaaacctgccactctgtgggagccgcctaccttgagtctctgcccctgcaagatgcctctcctgctggcggaccaagctctccaagggatctgcctgagcctagagtgtccaccgagcacaccaacaacaagatcgagaaaatctacattatgaaggccgacaccgtgatcgtgggcaccgtgaaagctgagttgcccgaaggcagaggactggccggacctgctgaacctgagctggaagaagaactggaagccgatcacacccctcactaccccgagcaagaaaccgaacctcctctgggcagctgctccgatgtgatgctgtccgttgaggaagagggcaaagaggaccctctgcctacagccgcttctggaaaa

SEQ ID NO: 3873 - DNA, 993 bp, synthetic construct
  source 1..993: mol_type = other DNA
cagagcttcggcctgctggaccccaagctgtgctacctgctggatggcatcctgttcatctacggcgtgatcctgaccgccctgttcctgcacagacgggcctgtcggaagcggatcagacagaaactgcacctgtgctaccccgtgcagaccagccagcctaaactggaactggtggacagcagacccagaagaagcagcacccagctgagaagcggagcctctgtgacagaacctgtggccgaagaacggggcctgatgtctcagcctctgatggaaacctgccactctgtgggagccgcctaccttgagtctctgcccctgcaagatgcctctcctgctggcggaccaagctctccaagggatctgcctgagcctagagtgtccaccgagcacaccaacaacaagatcgagaaaatctacattatgaaggccgacaccgtgatcgtgggcaccgtgaaagctgagttgcccgaaggcagaggactggccggacctgctgaacctgagctggaagaagaactggaagccgatcacacccctcactaccccgagcaagaaaccgaacctcctctgggcagctgctccgatgtgatgctgtccgttgaggaagagggcaaagaggaccctctgcctacagccgcttctggaaaaagagtgaagttcagcagaagcgccgacgcccctgcctaccagcagggacagaaccaactgtacaacgagctgaacctgggcagacgggaagagtacgacgtgctggacaagcggagaggcagggaccctgagatgggcggaaagccccagcggagaaagaacccccaggaaggactgtataacgaactccagaaagacaagatggccgaagcctacagcgagatcggcatgaagggcgagcggagaagaggcaagggccacgatggcctgtaccagggcctgagcaccgccaccaaggacacctatgacgccctgcacatgcaggccctgcctccaaga

SEQ ID NO: 3874 - DNA, 654 bp, synthetic construct
  source 1..654: mol_type = other DNA
cagagttttgggttgttggaccctaaattgtgctatctgttggacggaatcctgttcatttacggagtgatcctgaccgcattgttcctgcatagaagggcctgtagaaagagaatccggcaaaagctgcatctctgttatcctgtgcagacctctcagcccaagttggagctggtggatagccggcctagacggtctagtacacagctgagatccggggccagtgtgactgaaccagttgctgaggaacgcggactgatgagccagccactcatggaaacatgtcacagcgtgggcgctgcctatctcgaaagcctgcctctccaagacgcttctccggcaggcggtccatcttctcctcgggatcttcccgagccacgggtgtccacagaacatacaaacaacaaaattgagaaaatctatattatgaaggctgatacggtcatcgtcgggacagtgaaagccgaactgcctgaaggacgtggccttgctggaccagccgaaccagaactcgaagaggaacttgaggccgaccatacaccacactatcctgagcaagagacagagccaccactgggctcttgcagcgacgtgatgctgagtgtggaagaggaaggcaaagaagatcccctgccaaccgctgcctctggcaaa

SEQ ID NO: 3875 - DNA, 993 bp, synthetic construct
  source 1..993: mol_type = other DNA
cagagttttgggttgttggaccctaaattgtgctatctgttggacggaatcctgttcatttacggagtgatcctgaccgcattgttcctgcatagaagggcctgtagaaagagaatccggcaaaagctgcatctctgttatcctgtgcagacctctcagcccaagttggagctggtggatagccggcctagacggtctagtacacagctgagatccggggccagtgtgactgaaccagttgctgaggaacgcggactgatgagccagccactcatggaaacatgtcacagcgtgggcgctgcctatctcgaaagcctgcctctccaagacgcttctccggcaggcggtccatcttctcctcgggatcttcccgagccacgggtgtccacagaacatacaaacaacaaaattgagaaaatctatattatgaaggctgatacggtcatcgtcgggacagtgaaagccgaactgcctgaaggacgtggccttgctggaccagccgaaccagaactcgaagaggaacttgaggccgaccatacaccacactatcctgagcaagagacagagccaccactgggctcttgcagcgacgtgatgctgagtgtggaagaggaaggcaaagaagatcccctgccaaccgctgcctctggcaaacgggttaagttttccagatccgcagacgcacccgcttaccaacaagggcagaaccaactctacaatgaacttaatttggggcggagggaagagtacgacgttctggacaaaaggaggggacgagatcccgagatgggcggaaagcctcagcgaaggaagaatccgcaagaggggctttataacgaactccagaaagataaaatggcagaagcctatagtgagattgggatgaagggagaaaggaggaggggtaaaggtcacgatgggttgtaccaaggattgagcacagccactaaagatacctatgatgcgctccacatgcaggccctgccgccaaga

SEQ ID NO: 3876 - DNA, 330 bp, synthetic construct
  source 1..330: mol_type = other DNA
ctgggagagcctcagctgtgctatatcctggacgccatcctgtttctgtacggcatcgtgctgaccctgctgtactgcaaacggggcagaaagaaactcctgtatatattcaaacaaccatttatgagaccagtacaaactactcaagaggaagatggctgtagctgccgatttccagaagaagaagaaggaggatgtgaactgcggctgaagatccaagtgcggaaggccgccatcaccagctacgagaaatccgacggcgtgtacaccggcctgagcaccagaaatcaagagacatacgagacactgaagcacgaaaagcctccacaa

SEQ ID NO: 3877 - DNA, 330 bp, synthetic construct
  source 1..330: mol_type = other DNA
ctgggagagcctcagctgtgctatatcctggacgccatcctgtttctgtacggcatcgtgctgaccctgctgtactgccggctgaagatccaagtgcggaaggccgccatcaccagctacgagaaatccgacggcgtgtacaccggcctgagcaccagaaatcaagagacatacgagacactgaagcacgaaaagcctccacaaaaacggggcagaaagaaactcctgtatatattcaaacaaccatttatgagaccagtacaaactactcaagaggaagatggctgtagctgccgatttccagaagaagaagaaggaggatgtgaactg

SEQ ID NO: 3878 - DNA, 330 bp, synthetic construct
  source 1..330: mol_type = other DNA
ctcggagaaccacagctctgttacattctggatgctatcctgttcctctatgggatcgtcctgacactcctgtattgcaagagaggccggaagaagctgctgtacatcttcaagcagcctttcatgcggcccgtgcagaccacccaggaagaggacggctgctcctgccggttccccgaggaagaagaaggcggctgcgagctgagactcaaaattcaagttcgcaaagccgccattacctcttacgagaagagtgatggggtgtacacaggactgtctacccggaatcaagaaacctacgaaaccctcaaacatgagaagccacctcag

SEQ ID NO: 3879 - DNA, 330 bp, synthetic construct
  source 1..330: mol_type = other DNA
ctcggagaaccacagctctgttacattctggatgctatcctgttcctctatgggatcgtcctgacactcctgtattgcagactcaaaattcaagttcgcaaagccgccattacctcttacgagaagagtgatggggtgtacacaggactgtctacccggaatcaagaaacctacgaaaccctcaaacatgagaagccacctcagaagagaggccggaagaagctgctgtacatcttcaagcagcctttcatgcggcccgtgcagaccacccaggaagaggacggctgctcctgccggttccccgaggaagaagaaggcggctgcgagctg

SEQ ID NO: 3880 - DNA, 327 bp, synthetic construct
  source 1..327: mol_type = other DNA
ctgggagagcctcagctgtgctatatcctggacgccatcctgtttctgtacggcatcgtgctgaccctgctgtactgcaggagtaagaggagcaggctcctgcacagtgactacatgaacatgactccacgccgccccggacccacccgcaagcattaccagccctatgccccaccacgcgacttcgcagcctatcgctcccggctgaagatccaagtgcggaaggccgccatcaccagctacgagaaatccgacggcgtgtacaccggcctgagcaccagaaatcaagagacatacgagacactgaagcacgaaaagcctccacaa

SEQ ID NO: 3881 - DNA, 327 bp, synthetic construct
  source 1..327: mol_type = other DNA
ctcggagaaccacagctctgttacattctggatgctatcctgttcctctatgggatcgtcctgacactcctgtattgcaggagcaagcggtcacggctgctccacagcgattacatgaatatgacaccacgaagaccgggtcctactcgcaaacactaccaaccctacgcacctccccgcgactttgcagcgtaccgatctagactcaaaattcaagttcgcaaagccgccattacctcttacgagaagagtgatggggtgtacacaggactgtctacccggaatcaagaaacctacgaaaccctcaaacatgagaagccacctcag

SEQ ID NO: 3882 - DNA, 486 bp, synthetic construct
  source 1..486: mol_type = other DNA
cagagcttcggcctgctggaccccaagctgtgctacctgctggatggcatcctgttcatctacggcgtgatcctgaccgccctgttcctgcacctgtgctgtagaagaaggcgggccagactgcggtttatgaagcagttctacaagagagtgaagttcagcagaagcgccgacgcccctgcctaccagcagggacagaaccaactgtacaacgagctgaacctgggcagacgggaagagtacgacgtgctggacaagcggagaggcagggaccctgagatgggcggaaagccccagcggagaaagaacccccaggaaggactgtataacgaactccagaaagacaagatggccgaagcctacagcgagatcggcatgaagggcgagcggagaagaggcaagggccacgatggcctgtaccagggcctgagcaccgccaccaaggacacctatgacgccctgcacatgcaggccctgcctccaaga

SEQ ID NO: 3883 - DNA, 525 bp, synthetic construct
  source 1..525: mol_type = other DNA
cagagttttgggttgttggaccctaaattgtgctatctgttggacggaatcctgttcatttacggagtgatcctgaccgcattgttcctgctgtactgcaaccaccggaacaggcggagagtgtgcaagtgccctagacctgtggtcaagagcggcgacaagcctagcctgagcgccagatatgttcgggttaagttttccagatccgcagacgcacccgcttaccaacaagggcagaaccaactctacaatgaacttaatttggggcggagggaagagtacgacgttctggacaaaaggaggggacgagatcccgagatgggcggaaagcctcagcgaaggaagaatccgcaagaggggctttataacgaactccagaaagataaaatggcagaagcctatagtgagattgggatgaagggagaaaggaggaggggtaaaggtcacgatgggttgtaccaaggattgagcacagccactaaagatacctatgatgcgctccacatgcaggccctgccgccaaga

SEQ ID NO: 3884 - DNA, 549 bp, synthetic construct
  source 1..549: mol_type = other DNA
cagagcttcggcctgctggaccccaagctgtgctacctgctggatggcatcctgttcatctacggcgtgatcctgaccgccctgttcctgtgcgtgcggtgcagacaccggcggagacaggccgagagaatgagccagatcaagagactgctgtccgagaagaaaacctgccagtgcccccacagattccagaaaacatgcagccccatcagagtgaagttcagcagaagcgccgacgcccctgcctaccagcagggacagaaccaactgtacaacgagctgaacctgggcagacgggaagagtacgacgtgctggacaagcggagaggcagggaccctgagatgggcggaaagccccagcggagaaagaacccccaggaaggactgtataacgaactccagaaagacaagatggccgaagcctacagcgagatcggcatgaagggcgagcggagaagaggcaagggccacgatggcctgtaccagggcctgagcaccgccaccaaggacacctatgacgccctgcacatgcaggccctgcctccaaga

SEQ ID NO: 3885 - DNA, 549 bp, synthetic construct
  source 1..549: mol_type = other DNA
cagagttttgggttgttggaccctaaattgtgctatctgttggacggaatcctgttcatttacggagtgatcctgaccgcattgttcctgtgtgtgaggtgccgccatcgacggaggcaggcagaaagaatgtcccagataaagcggttgcttagtgaaaagaaaacctgccagtgtcctcaccgattccagaagacgtgctcccccattcgggttaagttttccagatccgcagacgcacccgcttaccaacaagggcagaaccaactctacaatgaacttaatttggggcggagggaagagtacgacgttctggacaaaaggaggggacgagatcccgagatgggcggaaagcctcagcgaaggaagaatccgcaagaggggctttataacgaactccagaaagataaaatggcagaagcctatagtgagattgggatgaagggagaaaggaggaggggtaaaggtcacgatgggttgtaccaaggattgagcacagccactaaagatacctatgatgcgctccacatgcaggccctgccgccaaga

SEQ ID NO: 3886 - DNA, 588 bp, synthetic construct
  source 1..588: mol_type = other DNA
atgaaccaggccgatcctagactgagagccgtgtgtctgtggaccctgacatctgccgctatgagcagaggcgacaactgcactgatctgctggccctgggaatccccagcatcacacaggcttggggactgtgggttctgctgggagctgtgaccctgctgttcctgatttctctggccgctcacctgagccagtggaccagaggaagaagcagaagtcacccaggccagggaagatccggcgagtctgtggaagaggtgcccctgtatggcaacctgcactacctccagaccggcagactgtctcaggacccagaaccagatcagcaggaccctacactcggaggacctgccagagctgccgaggaagtgatgtgttacaccagcctccagctgcggcctcctcagggaagaatacctggacctggcacacccgtgaagtacagcgaagtggtgctggacagcgagcccaagtctcaggcttctggacctgagcctgagctgtacgcctctgtgtgtgctcagaccagaagggccagagccagctttccagatcaggcttacgccaactctcagcctgctgcttct

SEQ ID NO: 3887 - DNA, 516 bp, synthetic construct
  source 1..516: mol_type = other DNA
gacaactgcactgatctgctggccctgggaatccccagcatcacacaggcttggggactgtgggttctgctgggagctgtgaccctgctgttcctgatttctctggccgctcacctgagccagtggaccagaggaagaagcagaagtcacccaggccagggaagatccggcgagtctgtggaagaggtgcccctgtatggcaacctgcactacctccagaccggcagactgtctcaggacccagaaccagatcagcaggaccctacactcggaggacctgccagagctgccgaggaagtgatgtgttacaccagcctccagctgcggcctcctcagggaagaatacctggacctggcacacccgtgaagtacagcgaagtggtgctggacagcgagcccaagtctcaggcttctggacctgagcctgagctgtacgcctctgtgtgtgctcagaccagaagggccagagccagctttccagatcaggcttacgccaactctcagcctgctgcttct

SEQ ID NO: 3888 - DNA, 588 bp, synthetic construct
  source 1..588: mol_type = other DNA
atgaatcaggctgaccccagactgcgggctgtctgtctttggacactgactagcgccgccatgtccaggggcgatcagtgcacagacctgctcgctctgggcatccctagtattactcaggcatggggcctctgggtgctcctgggtgctgttacactcctgtttctcatcagcctggctgcccacctgtctcaatggacaaggggcagaagcagatcacaccccggacaaggcagaagcggcgagagcgttgaagaagtgcctctgtacggaaatctccactacctgcaaacaggacggctgagtcaggaccccgagcctgaccaacaagatccaacacttggcggccctgctagagccgctgaagaagtcatgtgctacacttccctgcaactgcggccaccacaaggcaggattccaggaccaggcactcctgtgaaatactctgaggtcgtgctggactccgagcctaagagccaagcctctggacccgaacctgaactctatgccagcgtgtgcgcccagacacgtagagctagggccagttttcccgaccaagcctatgccaatagtcagcctgccgcctct

SEQ ID NO: 3889 - DNA, 516 bp, synthetic construct
  source 1..516: mol_type = other DNA
gatcagtgcacagacctgctcgctctgggcatccctagtattactcaggcatggggcctctgggtgctcctgggtgctgttacactcctgtttctcatcagcctggctgcccacctgtctcaatggacaaggggcagaagcagatcacaccccggacaaggcagaagcggcgagagcgttgaagaagtgcctctgtacggaaatctccactacctgcaaacaggacggctgagtcaggaccccgagcctgaccaacaagatccaacacttggcggccctgctagagccgctgaagaagtcatgtgctacacttccctgcaactgcggccaccacaaggcaggattccaggaccaggcactcctgtgaaatactctgaggtcgtgctggactccgagcctaagagccaagcctctggacccgaacctgaactctatgccagcgtgtgcgcccagacacgtagagctagggccagttttcccgaccaagcctatgccaatagtcagcctgccgcctct

SEQ ID NO: 3890 - DNA, 558 bp, synthetic construct
  source 1..558: mol_type = other DNA
atgagcggaatcagcggctgccctttctttctgtggggactgctggctctgctgggactcgccctggttatcagcctgatcttcaacatcagccactacgtggaaaagcagcggcaggacaagatgtactcctacagcagcgaccacaccagagtggacgagtactacatcgaggacacccctatctacggcaacctggacgacatgatctccgagcctatggacgagaactgctacgagcagatgaaggccagacctgagaagtccgtgaacaagatgcaagaggccacaccttccgctcaggccaccaacgagacacagatgtgttacgccagcctggaccacagcgtgaagggcaagagaagaaagccccggaagcagaacacccacttcagcgacaaggatggcgacgaacagctgcacgccattgatgccagcgtgtccaagaccacactggtggacagcttcagccctgagtctcaggccgtggaagagaacatccacgacgaccccatcagactgttcggactgatccgggccaagagagagcctattaac

SEQ ID NO: 3891 - DNA, 558 bp, synthetic construct
  source 1..558: mol_type = other DNA
atgtctggaatctccggctgtccatttttcctctggggcctgcttgccctgcttggcctggctctggttatctctctgatctttaatatctctcactatgtcgagaagcagcgccaagataagatgtatagctactcctccgaccacacacgggttgacgaatattacattgaggatacgcccatctatgggaacctcgatgatatgattagcgagccgatggatgagaattgctatgaacaaatgaaggctcggcccgagaaaagcgtcaacaaaatgcaagaagctacccctagcgcacaggccacaaatgagactcaaatgtgctatgcctctctggaccactctgtgaaaggcaagcggcggaagcccagaaaacagaatacccatttctccgataaggacggggatgagcagctccatgccatcgacgcctccgtgtctaaaacaaccctggtggactctttcagccccgaaagccaggccgtcgaggaaaacattcacgacgatcctatccggctgtttggcctgattagagccaagcgcgagcccatcaat

SEQ ID NO: 3892 - DNA, 642 bp, synthetic construct
  source 1..642: mol_type = other DNA
ggaatgaggactgaggatcttcccaaagctgtcgtctttctcgaaccccaatggtatcgggtgctcgaaaaagactctgtgacactgaaatgccaaggggcctactctcccgaggacaactccacacagtggtttcataatgagtccctcatcagctctcaggccagctcttatttcattgatgccgctacagtggacgactccggcgagtatcggtgtcagaccaatctgtctacactgtctgaccccgtgcagcttgaggtccacattggatggttgctcttgcaagccccacgctgggttttcaaagaggaagatccaatccatctgcggtgccacagctggaaaaacaccgctctccacaaagtcacatacctgcaaaatggcaaaggacgcaaatacttccatcacaattccgatttttacattccgaaggctaccctgaaagacagcggcagctatttctgccggggactcgtcggctccaagaatgtgtcctccgaaaccgtgaatatcacgattacccaaggactggctgtgcctacaatctctagcttctttccgcctggataccaagtctccttctgtcttgtgatggtcctcctgtttgctgtggacacaggactgtacttttccgtgaaa

SEQ ID NO: 3893 - DNA, 639 bp, synthetic construct
  source 1..639: mol_type = other DNA
ggaatgaggactgaggatcttcccaaagctgtcgtctttctcgaaccccaatggtatcgggtgctcgaaaaagactctgtgacactgaaatgccaaggggcctactctcccgaggacaactccacacagtggtttcataatgagtccctcatcagctctcaggccagctcttatttcattgatgccgctacagtggacgactccggcgagtatcggtgtcagaccaatctgtctacactgtctgaccccgtgcagcttgaggtccacattggatggttgctcttgcaagccccacgctgggttttcaaagaggaagatccaatccatctgcggtgccacagctggaaaaacaccgctctccacaaagtcacatacctgcaaaatggcaaaggacgcaaatacttccatcacaattccgatttttacattccgaaggctaccctgaaagacagcggcagctatttctgccggggactcgtcggctccaagaatgtgtcctccgaaaccgtgaatatcacgattacccaaggactggctgtgcctacaatctctagcttctttccgcctggataccaagtctccttctgtcttgtgatggtcctcctgtttgctgtggacacaggactgtacttttccgtg

SEQ ID NO: 3894 - DNA, 636 bp, synthetic construct
  source 1..636: mol_type = other DNA
ggaatgaggactgaggatcttcccaaagctgtcgtctttctcgaaccccaatggtatcgggtgctcgaaaaagactctgtgacactgaaatgccaaggggcctactctcccgaggacaactccacacagtggtttcataatgagtccctcatcagctctcaggccagctcttatttcattgatgccgctacagtggacgactccggcgagtatcggtgtcagaccaatctgtctacactgtctgaccccgtgcagcttgaggtccacattggatggttgctcttgcaagccccacgctgggttttcaaagaggaagatccaatccatctgcggtgccacagctggaaaaacaccgctctccacaaagtcacatacctgcaaaatggcaaaggacgcaaatacttccatcacaattccgatttttacattccgaaggctaccctgaaagacagcggcagctatttctgccggggactcgtcggctccaagaatgtgtcctccgaaaccgtgaatatcacgattacccaaggactggctgtgcctacaatctctagcttctttccgcctggataccaagtctccttctgtcttgtgatggtcctcctgtttgctgtggacacaggactgtacttttcc

SEQ ID NO: 3895 - DNA, 639 bp, synthetic construct
  source 1..639: mol_type = other DNA
ggaatgaggactgaggatcttcccaaagctgtcgtctttctcgaaccccaatggtatcgggtgctcgaaaaagactctgtgacactgaaatgccaaggggcctactctcccgaggacaactccacacagtggtttcataatgagtccctcatcagctctcaggccagctcttatttcattgatgccgctacagtggacgactccggcgagtatcggtgtcagaccaatctgtctacactgtctgaccccgtgcagcttgaggtccacattggatggttgctcttgcaagccccacgctgggttttcaaagaggaagatccaatccatctgcggtgccacagctggaaaaacaccgctctccacaaagtcacatacctgcaaaatggcaaaggacgcaaatacttccatcacaattccgatttttacattccgaaggctaccctgaaagacagcggcagctatttctgccggggactcgtcggctccaagaatgtgtcctccgaaaccgtgaatatcacgattacccaaggactggctgtgcctacaatctctagcttctttccgcctggataccaagtctccttctgtcttgtgatggtcctcctgtttgctgtggacacaggactgtacttttacgtg

SEQ ID NO: 3896 - DNA, 714 bp, synthetic construct
  source 1..714: mol_type = other DNA
ggaatgaggactgaggatcttcccaaagctgtcgtctttctcgaaccccaatggtatcgggtgctcgaaaaagactctgtgacactgaaatgccaaggggcctactctcccgaggacaactccacacagtggtttcataatgagtccctcatcagctctcaggccagctcttatttcattgatgccgctacagtggacgactccggcgagtatcggtgtcagaccaatctgtctacactgtctgaccccgtgcagcttgaggtccacattggatggttgctcttgcaagccccacgctgggttttcaaagaggaagatccaatccatctgcggtgccacagctggaaaaacaccgctctccacaaagtcacatacctgcaaaatggcaaaggacgcaaatacttccatcacaattccgatttttacattccgaaggctaccctgaaagacagcggcagctatttctgccggggactcgtcggctccaagaatgtgtcctccgaaaccgtgaatatcacgattacccaaggactggctgtgcctacaatctctagcttctttccgcctggataccaagtctccttctgtcttgtgatggtcctcctgtttgctgtggacacaggactgtacttttccgtgaaaacgaacatccgcagctccacacgcgattggaaagatcacaagtttaaatggcgcaaagatccccaggacaag

SEQ ID NO: 3897 - DNA, 66 bp, synthetic construct
  source 1..66: mol_type = other DNA
gtgaagcagaccctgaatttcgacctgctgaagctggctggcgacgtggaatccaacccaggccct

SEQ ID NO: 3898 - DNA, 54 bp, synthetic construct
  source 1..54: mol_type = other DNA
gagggcagaggaagtctactaacctgcggagatgtggaagaaaatcctggccca

SEQ ID NO: 3899 - DNA, 54 bp, synthetic construct
  source 1..54: mol_type = other DNA
gagggaagaggtagcctcctcacctgtggggacgttgaagagaaccccggccca

SEQ ID NO: 3900 - DNA, 57 bp, synthetic construct
  source 1..57: mol_type = other DNA
gcaacaaacttctcactactcaaacaagcaggtgacgtggaggagaatcccgggcct

SEQ ID NO: 3901 - DNA, 57 bp, synthetic construct
  source 1..57: mol_type = other DNA
gcaacaaacttctcactactcaaacaagcaggtgacgtggagcagaatcccgggcct

SEQ ID NO: 3902 - DNA, 60 bp, synthetic construct
  source 1..60: mol_type = other DNA
caatgcactaattacgcattgctcaagctggccggtgacgttgagagtaatcctggcccc

SEQ ID NO: 3903 - DNA, 12 bp, synthetic construct
  source 1..12: mol_type = other DNA
tctggatctgga

SEQ ID NO: 3904 - DNA, 12 bp, synthetic construct
  source 1..12: mol_type = other DNA
agcggatctggc

SEQ ID NO: 3905 - DNA, 12 bp, synthetic construct
  source 1..12: mol_type = other DNA
cgggccaagaga

SEQ ID NO: 3906 - DNA, 12 bp, synthetic construct
  source 1..12: mol_type = other DNA
agggccaagcga

SEQ ID NO: 3907 - DNA, 12 bp, synthetic construct
  source 1..12: mol_type = other DNA
cgcgccaagaga

SEQ ID NO: 3908 - DNA, 318 bp, synthetic construct
  source 1..318: mol_type = other DNA
ggacagcctaaggccaatcctaccgtgacactgttccctccaagcagcgaagaactccaggccaacaaggccacacttgtgtgcctgatctccgacttctaccctggggctgtgacagtggcttggaaggccgatggatctcctgtgaaagccggcgtggaaaccaccaagccatccaagcagagcaacaacaaatacgccgccagctcctacctgagcctgacacctgagcagtggaagtcccacagatcctacagctgccaagtgacccacgaaggcagcaccgtggaaaagacagtggcccctacagagtgcagc

SEQ ID NO: 3909 - DNA, 309 bp, synthetic construct
  source 1..309: mol_type = other DNA
gcctctacaaagggaccctccgtgtttcctctggctcccagcagcaagtctacaagcggaggaacagccgctctgggctgcctggtcaaggattactttcccgagcctgtgaccgtgtcctggaatagcggagcactgacaagcggcgtgcacacctttccagccgtgctgcaaagcagcggcctgtactctctgagcagcgtggtcacagtgcctagctctagcctgggcacccagacctacatctgcaatgtgaaccacaagcctagcaacaccaaggtggacaagagagtggaacccaagagctgt

SEQ ID NO: 3910 - DNA, 306 bp, synthetic construct
  source 1..306: mol_type = other DNA
gcctctacaaagggaccctccgtgtttcctctggctcccagcagcaagtctacaagcggaggaacagccgctctgggctgcctggtcaaggattactttcccgagcctgtgaccgtgtcctggaatagcggagcactgacaagcggcgtgcacacctttccagccgtgctgcaaagcagcggcctgtactctctgagcagcgtggtcacagtgcctagctctagcctgggcacccagacctacatctgcaatgtgaaccacaagcctagcaacaccaaggtggacaagagagtggaacccaagagc

SEQ ID NO: 3911 - DNA, 339 bp, synthetic construct
  source 1..339: mol_type = other DNA
gcctctacaaagggaccctccgtgtttcctctggctcccagcagcaagtctacaagcggaggaacagccgctctgggctgcctggtcaaggattactttcccgagcctgtgaccgtgtcctggaatagcggagcactgacaagcggcgtgcacacctttccagccgtgctgcaaagcagcggcctgtactctctgagcagcgtggtcacagtgcctagctctagcctgggcacccagacctacatctgcaatgtgaaccacaagcctagcaacaccaaggtggacaagagagtggaacccaagagctgtgataaaactcatacctgtccgccatgcccg

SEQ ID NO: 3912 - DNA, 309 bp, synthetic construct
  source 1..309: mol_type = other DNA
gctagtaccaagggcccatcggtcttccccctggcaccctcctccaagagcacctctgggggcacagcggccctgggctgcctggtcaaggactacttccccgaaccggtgacggtgtcgtggaactcaggcgccctgaccagcggcgtgcacaccttcccggctgtcctacagtcctcaggactctactccctcagcagcgtggtgaccgtgccctccagcagcttgggcacccagacctacatctgcaacgtgaatcacaagcccagcaacaccaaggtggacaagaaagttgagcccaaatcttgt

SEQ ID NO: 3913 - DNA, 306 bp, synthetic construct
  source 1..306: mol_type = other DNA
gctagtaccaagggcccatcggtcttccccctggcaccctcctccaagagcacctctgggggcacagcggccctgggctgcctggtcaaggactacttccccgaaccggtgacggtgtcgtggaactcaggcgccctgaccagcggcgtgcacaccttcccggctgtcctacagtcctcaggactctactccctcagcagcgtggtgaccgtgccctccagcagcttgggcacccagacctacatctgcaacgtgaatcacaagcccagcaacaccaaggtggacaagaaagttgagcccaaatct

SEQ ID NO: 3914 - DNA, 339 bp, synthetic construct
  source 1..339: mol_type = other DNA
gctagtaccaagggcccatcggtcttccccctggcaccctcctccaagagcacctctgggggcacagcggccctgggctgcctggtcaaggactacttccccgaaccggtgacggtgtcgtggaactcaggcgccctgaccagcggcgtgcacaccttcccggctgtcctacagtcctcaggactctactccctcagcagcgtggtgaccgtgccctccagcagcttgggcacccagacctacatctgcaacgtgaatcacaagcccagcaacaccaaggtggacaagaaagttgagcccaaatcttgtgacaaaactcacacatgcccaccgtgccca

SEQ ID NO: 3915 - DNA, 303 bp, synthetic construct
  source 1..303: mol_type = other DNA
gcctcaacgaaagggcctagcgtcttccccctggcgccgtgctcacgatccacaagcgaatccaccgccgctctcggatgcctcgtaaaggattatttccctgaaccagtcacggtgtcatggaacagcggtgcccttaccagcggcgtccatacctttcctgctgtgctccagtccagcggactttatagtctcagctctgtcgtgaccgtcccttcctctaattttggcacccagacttacacgtgcaacgtcgatcataagcccagtaacaccaaggtagacaagacggtggaacgaaag

SEQ ID NO: 3916 - DNA, 306 bp, synthetic construct
  source 1..306: mol_type = other DNA
gcctccacgaagggaccatctgttttccctcttgccccctgctcacggtcaacgtctgaatccacggcagccctgggctgcctcgttaaggactactttccagagccggtaacagtctcctggaacagtggagcccttacatcaggtgttcacactttccctgccgtcttgcaaagtagcggactgtacagccttagttccgttgttacggttccttctagcaacttcggtacacagacatatacttgtaacgtagatcataagcctagcaacaccaaggtggacaaaaccgtagagagaaagtgt

SEQ ID NO: 3917 - DNA, 309 bp, synthetic construct
  source 1..309: mol_type = other DNA
gcaagtacaaagggacccagtgttttcccgctcgccccctgttcacgatcaacgagtgagtccactgcggctctcggatgcctcgtcaaagactacttccccgagccggtgactgttagttggaactctggggctcttacttcaggcgtacacacattccccgccgtgcttcagtcaagtgggctctactcacttagcagtgtggtaacggttccctctagcaactttggcacccaaacatatacttgcaacgtcgatcacaagccgtcaaataccaaagttgacaagaccgttgaaaggaaatgttgt

SEQ ID NO: 3918 - DNA, 309 bp, synthetic construct
  source 1..309: mol_type = other DNA
gcgtccactaagggtccgtcagtcttcccgctggcgccctgttcccgcagcacgagtgaatctaccgccgcccttgggtgcttggtaaaagactattttcctgagcccgttacagtatcatggaacagcggggctctgactagcggggtgcatacgttccctgcggttctgcaatctagcggactgtattctctctccagtgttgtgaccgtgccaagctccagcctcggtactaaaacttatacatgtaatgtggatcataaaccttcaaataccaaggttgacaaaagggtagagagtaagtacggt

SEQ ID NO: 3919 - DNA, 363 bp, synthetic construct
  source 1..363: mol_type = other DNA
gcgtctcccacttctccgaaagttttccccctttccctctgtagcacacaacctgatggaaatgtggtcatcgcatgtctggtacaaggattctttccacaagagccattgagcgttacatggtcagagagcgggcagggagttaccgctaggaatttcccaccctcacaggatgcgagtggtgatctttataccacatcatcacaactcacgttgccagccactcagtgcctcgctggaaagtcagtaacatgccatgtcaaacattacactaatccctcacaagatgttaccgtgccttgcccagtaccttctacgccgcccaccccgtctccatctactccacccacgccatcacctagt

SEQ ID NO: 3920 - DNA, 324 bp, synthetic construct
  source 1..324: mol_type = other DNA
gcgtcacctacgtccccaaaagtgttcccgctgtcactcgattccactccacaggacggtaacgtggtggttgcctgcctggtacaaggtttctttcctcaagaaccactctctgtgacgtggtctgaaagtggtcagaatgttacagcacggaacttcccaccgagtcaagatgcgagtggggatctctatacgacatccagtcaactcacactgcccgcaacacaatgccccgatggcaaatctgttacctgccatgtgaaacattacaccaatccatcccaggatgtgacagtaccttgtccggttccgccccctcccccg

SEQ ID NO: 3921 - DNA, 477 bp, synthetic construct
  source 1..477: mol_type = other DNA
gctccgacaaaggcgccagacgtttttcctattatttcaggatgtcggcatccgaaagataattccccagttgttctggcgtgtcttatcacgggctaccatcctacatctgttaccgttacgtggtatatgggtacgcaaagccaacctcagcggacttttccagagatccaacggcgagattcatattatatgacatccagtcagttgagtacaccgctgcaacagtggcggcaaggtgagtataagtgtgtggtccaacacacagccagtaaaagtaagaaagagatattccggtggcctgaaagcccgaaggcacaagcatcttctgttccgacggcgcaaccgcaagctgaaggaagtcttgcaaaagcaaccacagcacccgcgacaacacgaaacacaggacgcggaggcgaggaaaagaaaaaagaaaaggaaaaggaagagcaagaggagagggaaactaagaccccc

SEQ ID NO: 3922 - DNA, 309 bp, synthetic construct
  source 1..309: mol_type = other DNA
gctagtacccagtcaccttctgttttcccgcttactagatgctgcaagaacataccatccaatgccacttctgtcacactgggctgtcttgctacaggttattttcctgagccggtgatggtcacttgggataccggtagcctgaatggaactacaatgacgctgcctgccacgacgctcacattgagtgggcattacgcgacaattagtcttttgacggtaagcggagcttgggctaagcagatgttcacttgcagagtagcgcacactccctctagtactgactgggttgacaacaaaaccttttct

SEQ ID NO: 3923 - DNA, 312 bp, synthetic construct
  source 1..312: mol_type = other DNA
gggtcagcaagtgcgcccacgctctttccattggtttcttgcgagaactctccctcagacacatcaagtgtcgcggtaggctgtctcgcccaagattttttgcccgatagtataacgctgtcatggaaatataagaacaatagtgatataagctccacaaggggttttccgagcgtactgcgaggcggtaaatatgcagcgacgagtcaagtcttgctcccatccaaggatgtcatgcaaggcaccgatgagcatgttgtttgcaaagtgcaacatccgaatggaaataaggaaaaaaacgtcccgctgccc

SEQ ID NO: 3924 - DNA, 240 bp, synthetic construct
  source 1..240: mol_type = other DNA
atccagaaccctgatcctgccgtgtaccagctgcgggatagcaagagcagcgacaagagcgtgtgtctgttcaccgacttcgacagccagaccaacgtgtcccagagcaaggactccgacgtgtacatcaccgataagaccgtgctggacatgcggagcatggacttcaagagcaactccgccgtggcctggtccaacaagtccgatttcgcctgcgccaacgccttcaacaacagcatt

SEQ ID NO: 3925 - DNA, 270 bp, synthetic construct
  source 1..270: mol_type = other DNA
atccagaaccctgatcctgccgtgtaccagctgcgggatagcaagagcagcgacaagagcgtgtgtctgttcaccgacttcgacagccagaccaacgtgtcccagagcaaggactccgacgtgtacatcaccgataagaccgtgctggacatgcggagcatggacttcaagagcaactccgccgtggcctggtccaacaagtccgatttcgcctgcgccaacgccttcaacaacagcattatccccgaggacacattcttcccaagcccc

SEQ ID NO: 3926 - DNA, 378 bp, synthetic construct
  source 1..378: mol_type = other DNA
gaggacctgaagaacgtgttcccacctgaggtggccgtgttcgagcctagcgaggccgagatcagccacacccagaaagccaccctcgtgtgcctggctaccggcttctaccccgaccatgtggaactgtcttggtgggtcaacggcaaagaggtgcacagcggcgtgtctaccgacccccagccactgaaagaacagcccgccctgaacgacagccggtactgcctgagcagcagactgagagtgtccgccaccttctggcagaacccccggaaccacttcagatgccaggtgcagttctacggcctgagcgagaacgacgagtggacccaggacagagccaagcccgtgacccagatcgtgtctgccgaagcctgg

SEQ ID NO: 3927 - DNA, 384 bp, synthetic construct
  source 1..384: mol_type = other DNA
gaggacctgaagaacgtgttcccacctgaggtggccgtgttcgagcctagcgaggccgagatcagccacacccagaaagccaccctcgtgtgcctggctaccggcttctaccccgaccatgtggaactgtcttggtgggtcaacggcaaagaggtgcacagcggcgtgtctaccgacccccagccactgaaagaacagcccgccctgaacgacagccggtactgcctgagcagcagactgagagtgtccgccaccttctggcagaacccccggaaccacttcagatgccaggtgcagttctacggcctgagcgagaacgacgagtggacccaggacagagccaagcccgtgacccagatcgtgtctgccgaagcctggggcaga

SEQ ID NO: 3928 - DNA, 318 bp, synthetic construct
  source 1..318: mol_type = other DNA
gacaagcagctggacgccgacgtgtcccccaagcctaccatcttcctgccctctatcgccgagacaaagctccagaaggccggcacctacctgtgcctgctggaaaagttcttcccagatgtgattaagatccactggcaggaaaagaagtccaacaccatcctgggcagccaggaaggcaacaccatgaagaccaacgacacctacatgaagttcagctggctgaccgtgcccgagaagtccctggacaaagaacacagatgcatcgtgcggcacgaaaacaacaagaacggcgtggaccaggaaatcatcttccca

SEQ ID NO: 3929 - DNA, 342 bp, synthetic construct
  source 1..342: mol_type = other DNA
gacaagcagctggacgccgacgtgtcccccaagcctaccatcttcctgccctctatcgccgagacaaagctccagaaggccggcacctacctgtgcctgctggaaaagttcttcccagatgtgattaagatccactggcaggaaaagaagtccaacaccatcctgggcagccaggaaggcaacaccatgaagaccaacgacacctacatgaagttcagctggctgaccgtgcccgagaagtccctggacaaagaacacagatgcatcgtgcggcacgaaaacaacaagaacggcgtggaccaggaaatcatcttcccacccatcaagaccgatgtgattaca

SEQ ID NO: 3930 - DNA, 255 bp, synthetic construct
  source 1..255: mol_type = other DNA
agccagcctcacaccaagcccagcgtgttcgtgatgaagaacggcaccaacgtggcctgcctcgtgaaagagttctaccccaaggacatcaggatcaacctggtgtccagcaagaagatcaccgagttcgaccccgccatcgtgatctcccccagcggcaagtacaacgccgtgaagctggggaagtacgaggacagcaacagcgtgacctgctccgtgcagcacgacaacaagaccgtgcacagcaccgacttt

SEQ ID NO: 3931 - DNA, 276 bp, synthetic construct
  source 1..276: mol_type = other DNA
agccagcctcacaccaagcccagcgtgttcgtgatgaagaacggcaccaacgtggcctgcctcgtgaaagagttctaccccaaggacatcaggatcaacctggtgtccagcaagaagatcaccgagttcgaccccgccatcgtgatctcccccagcggcaagtacaacgccgtgaagctggggaagtacgaggacagcaacagcgtgacctgctccgtgcagcacgacaacaagaccgtgcacagcaccgactttgaagtgaaaaccgactccacc

SEQ ID NO: 3932 - DNA, 393 bp, synthetic construct
  source 1..393: mol_type = other DNA
gaggacctgaagaacgtgttcccacctgaggtggccgtgttcgagcctagcgaggccgagatcagccacacccagaaagccaccctcgtgtgcctggctaccggcttctaccccgaccatgtggaactgtcttggtgggtcaacggcaaagaggtgcacagcggcgtgtctaccgacccccagccactgaaagaacagcccgccctgaacgacagccggtactgcctgagcagcagactgagagtgtccgccaccttctggcagaacccccggaaccacttcagatgccaggtgcagttctacggcctgagcgagaacgacgagtggacccaggacagagccaagcccgtgacccagatcgtgtctgccgaagcctggggcagagccgattgc

SEQ ID NO: 3933 - DNA, 282 bp, synthetic construct
  source 1..282: mol_type = other DNA
atccagaaccctgatcctgccgtgtaccagctgcgggatagcaagagcagcgacaagagcgtgtgtctgttcaccgacttcgacagccagaccaacgtgtcccagagcaaggactccgacgtgtacatcaccgataagaccgtgctggacatgcggagcatggacttcaagagcaactccgccgtggcctggtccaacaagtccgatttcgcctgcgccaacgccttcaacaacagcattatccccgaggacacattcttcccaagccccgagagcagctgc

SEQ ID NO: 3934 - DNA, 282 bp, synthetic construct; identical to SEQ ID NO: 3933
  source 1..282: mol_type = other DNA

SEQ ID NO: 3935 - DNA, 237 bp, synthetic construct
  source 1..237: mol_type = other DNA
aagagcagcgacaagagcgtgtgtctgttcaccgacttcgacagccagaccaacgtgtcccagagcaaggactccgacgtgtacatcaccgataagaccgtgctggacatgcggagcatggacttcaagagcaactccgccgtggcctggtccaacaagtccgatttcgcctgcgccaacgccttcaacaacagcattatccccgaggacacattcttcccaagccccgagagcagc

SEQ ID NO: 3936 - DNA, 378 bp, synthetic construct; identical to SEQ ID NO: 3926
  source 1..378: mol_type = other DNA

SEQ ID NO: 3937 - DNA, 330 bp, synthetic construct
  source 1..330: mol_type = other DNA
cctgaggtggccgtgttcgagcctagcgaggccgagatcagccacacccagaaagccaccctcgtgtgcctggctaccggcttctaccccgaccatgtggaactgtcttggtgggtcaacggcaaagaggtgcacagcggcgtgtctaccgacccccagccactgaaagaacagcccgccctgaacgacagccggtactgcctgagcagcagactgagagtgtccgccaccttctggcagaacccccggaaccacttcagatgccaggtgcagttctacggcctgagcgagaacgacgagtggacccaggacagagccaagcccgtgacc

SEQ ID NO: 3938 - DNA, 342 bp, synthetic construct; identical to SEQ ID NO: 3929
  source 1..342: mol_type = other DNA

SEQ ID NO: 3939 - DNA, 285 bp, synthetic construct
  source 1..285: mol_type = other DNA
cccaagcctaccatcttcctgccctctatcgccgagacaaagctccagaaggccggcacctacctgtgcctgctggaaaagttcttcccagatgtgattaagatccactggcaggaaaagaagtccaacaccatcctgggcagccaggaaggcaacaccatgaagaccaacgacacctacatgaagttcagctggctgaccgtgcccgagaagtccctggacaaagaacacagatgcatcgtgcggcacgaaaacaacaagaacggcgtggaccaggaaatcatc

SEQ ID NO: 3940 - DNA, 255 bp, synthetic construct; identical to SEQ ID NO: 3930
  source 1..255: mol_type = other DNA

SEQ ID NO: 3941 - DNA, 276 bp, synthetic construct; identical to SEQ ID NO: 3931
  source 1..276: mol_type = other DNA

SEQ ID NO: 3942 - DNA, 63 bp, synthetic construct
  source 1..63: mol_type = other DNA
gacgtgaagctggtggaaaagagcttcgagacagacaccaacctgaacttccagaacctgagc

SEQ ID NO: 3943 - DNA, 66 bp, synthetic construct
  source 1..66: mol_type = other DNA
tgcgacgtgaagctggtggaaaagagcttcgagacagacaccaacctgaacttccagaacctgagc

SEQ ID NO: 3944 - DNA, 57 bp, synthetic construct
  source 1..57: mol_type = other DNA
ggcagagccgattgcggctttaccagcgagagctaccagcagggcgtgctgagcgcc

SEQ ID NO: 3945 - DNA, 81 bp, synthetic construct
  source 1..81: mol_type = other DNA
cagatcgtgtctgccgaagcctggggcagagccgattgcggctttaccagcgagagctaccagcagggcgtgctgagcgcc

SEQ ID NO: 3946 - DNA, 72 bp, synthetic construct
  source 1..72: mol_type = other DNA
atggaccccaaggacaactgctccaaggacgccaacgataccctgctgctccagctgaccaacaccagcgcc

SEQ ID NO: 3947 - DNA, 102 bp, synthetic construct
  source 1..102: mol_type = other DNA
ttcccacccatcaagaccgatgtgattacaatggaccccaaggacaactgctccaaggacgccaacgataccctgctgctccagctgaccaacaccagcgcc

SEQ ID NO: 3948 - DNA, 132 bp, synthetic construct
  source 1..132: mol_type = other DNA
gaagtgaaaaccgactccaccgaccacgtgaagcccaaagagacagagaacaccaagcagcccagcaagagctgccacaagcccaaggccatcgtgcacaccgagaaagtgaacatgatgagcctgaccgtg

SEQ ID NO: 3949 - DNA, 111 bp, synthetic construct
  source 1..111: mol_type = other DNA
gaccacgtgaagcccaaagagacagagaacaccaagcagcccagcaagagctgccacaagcccaaggccatcgtgcacaccgagaaagtgaacatgatgagcctgaccgtg

SEQ ID NO: 3950 - DNA, 30 bp, synthetic construct
  source 1..30: mol_type = other DNA
cagagttttgggttgttggaccctaaattg

SEQ ID NO: 3951 - DNA, 15 bp, synthetic construct
  source 1..15: mol_type = other DNA
ggggggggggggggg

SEQ ID NO: 3952 - DNA, 60 bp, synthetic construct
  source 1..60: mol_type = other DNA
gtgatcggcttcagaatcctgctgctgaaagtggccggctttaacctgctgatgaccctg

SEQ ID NO: 3953 - DNA, 69 bp, synthetic construct
  source 1..69: mol_type = other DNA
accatcctgtacgagatcctgctgggcaaggccaccctgtacgccgtgctggtgtctgccctggtgctg

SEQ ID NO: 3954 - DNA, 69 bp, synthetic construct
  source 1..69: mol_type = other DNA
tactacatgtacttgttgctgctgctgaagtccgtggtgtacttcgccatcatcacatgctgcctgctg

SEQ ID NO: 3955 - DNA, 69 bp, synthetic construct
  source 1..69: mol_type = other DNA
ctgggcctgcggatgctgttcgccaaaaccgtggccgtgaacttcctgctgaccgccaagctgttcttc

SEQ ID NO: 3956 - DNA, 60 bp, synthetic construct
  source 1..60: mol_type = other DNA
tgctatctgttggacggaatcctgttcatttacggagtgatcctgaccgcattgttcctg

SEQ ID NO: 3957 - DNA, 29 bp, synthetic construct
  source 1..29: mol_type = other DNA
ggggggggggggggggggggggggggggg

SEQ ID NO: 3958 - DNA, 15 bp, synthetic construct
  source 1..15: mol_type = other DNA
cggctgtggtccagc

SEQ ID NO: 3959 - DNA, 33 bp, synthetic construct
  source 1..33: mol_type = other DNA
atggctatggtcaagcggaaggacagccgggga

SEQ ID NO: 3960 - DNA, 36 bp, synthetic construct
  source 1..36: mol_type = other DNA
cggagaaccgccttctgctgcaacggcgagaagtct

SEQ ID NO: 3961 - DNA, 339 bp, synthetic construct; identical to SEQ ID NO: 3850
  source 1..339: mol_type = other DNA

SEQ ID NO: 3962 - DNA, 29 bp, synthetic construct
  source 1..29: mol_type = other DNA
ggggggggggggggggggggggggggggg

SEQ ID NO: 3963 - DNA, 30 bp, synthetic construct
  source 1..30: mol_type = other DNA
gataaaactcatacctgtccgccatgcccg

SEQ ID NO: 3964 - DNA, 27 bp, synthetic construct
  source 1..27: mol_type = other DNA
tgctgcgttgaatgtccgccgtgtcct

SEQ ID NO: 3965 - DNA, 702 bp, synthetic construct
  source 1..702: mol_type = other DNA
cctgctgaacccaaatccccagacaagacacatacctgccccccttgccctgcgcctcccgtcgccgggccttctgtcttccttttccctcccaagcccaaagacacgttgatgattgcccgaactccagaggtaacgtgtgttgtcgtcgatgttagccatgaggacccagaggttaagttcaattggtatgtggacggtgttgaagttcataatgctaagacaaaacctagggaggaacaatacaattcaacatatcgggtcgtcagtgtcctcaccgtccttcaccaagattggctcaatggtaaagaatataagtgcaaagtctcaaataaggcgcttcctgcgcccatcgaaaaaaccatttccaaggccaagggacaacctagagagccacaggtgtatacgcttccgccgagtcgggatgaattgacgaaaaaccaggtgagcctgacatgcttggtcaaagggttttatccaagcgacattgctgtcgagtgggaatccaacggccagcctgaaaataactacaaaaccacaccgcccgtactggacagtgacggatcattcttcctgtactctaaactcaccgttgacaaatcccggtggcaacagggtaatgtctttagttgcagtgtcatgcatgaggctctgcacaatcattatacccagaaaagtctgagtctgtcacccggtaaaaaa

SEQ ID NO: 3966 - DNA, 705 bp, synthetic construct
  source 1..705: mol_type = other DNA
ccagctgaaccaaaaagtcccgataaaacgcatacctgtccaccatgcccagcgccccctgtcgctgggccaagtgtttttctgtttcctccgaagccaaaggatacgctgatgattgcaagaactccagaagtcacctgcgtcgtcgtggatgtttctcacgaggacccagaggtaaagttcaactggtatgtagacggagtcgaagtacacaatgctaaaaccaaaccgcgcgaggaacaatacaattcaacttaccgggtcgtatctgtgcttaccgtcctccaccaagattggctgaatgggaaagaatacaaatgcaaagtcagtaataaggcgctgccggcacctatcgaaaagacgatctctaaggcaaaggggcagcccagagaaccgcaagtgtatacgcttccgccatcacgagatgagctgacgaagaaccaagtctcattgacttgcttggtgaaaggcttctacccgtccgacatagccgtggaatgggaaagcaatggtcaacctgagaataactacaagacaacacccccagttctcgacagcgatggtagcttctttttgtatagtaagttgacggtagataagtcacggtggcagcaaggcaacgtattcagttgtagtgtaatgcatgaagcactccataaccattatactcaaaagagcctttcttcactttctcctggaaagaaa

SEQ ID NO: 3967 - DNA, 687 bp, synthetic construct
  source 1..687: mol_type = other DNA
gaaagtaagtatggccctccgtgccctccgtgccccgcaccggaatttgagggcggaccatccgtgttcctttttccaccaaaacccaaagacacacttatgatttccaggacccctgaagtcacctgcgtcgtggtagacgtttctcaggaagatccggaggttcaatttaactggtacgttgacggtgtagaagtacacaatgccaagactaagccacgggaggagcaatttaattcaacatacagggtagtatcagtcttgacagtattgcaccaggattggctgaacggaaaagagtataagtgtaaggtatctaacaagggtctcccgtcatccatcgagaaaacgatcagtaaagcaaaagggcagccacgggaaccacaagtgtacacactgccacccagtcaagaggagatgactaagaatcaagtaagtcttacgtgtctcgtcaaggggttttatccgtcagacattgctgttgagtgggaatccaatgggcaacccgagaacaattataagaccacaccaccagtccttgatagcgatggcagtttttttctgtactccagactcacagtagataagagccggtggcaggagggcaatgttttctcctgcagcgttatgcacgaagcgcttcataaccactatactcagaaatccttgagtctgagtctcggcaaa

SEQ ID NO: 3968 - DNA, 357 bp, synthetic construct
  source 1..357: mol_type = other DNA
gagagtaaatacggtccgccgtgtccaccgtgccctggacagccgagggaaccacaggtttacactttgccaccgtcacaggaagaaatgactaaaaaccaggtcagcctcacttgtctggttaagggcttctaccccagcgacattgctgtggagtgggagagcaacggccagccagagaataattacaagaccacgccgcctgtgttggacagtgatggtagtttctttttgtactcacggcttacagtcgacaagagccggtggcaggaaggcaacgttttcagttgctcagtaatgcacgaagccttgcacaaccattatacccaaaaatcactgtcattgagtctcggtaag

SEQ ID NO: 3969 - DNA, 36 bp, synthetic construct
  source 1..36: mol_type = other DNA
gaatcaaagtacggccccccgtgtcctccatgtcct

SEQ ID NO: 3970 - DNA, 29 bp, synthetic construct
  source 1..29: mol_type = other DNA
ggggggggggggggggggggggggggggg

SEQ ID NO: 3971 - DNA, 630 bp, synthetic construct
  source 1..630: mol_type = other DNA
atgaggccaagactgtggctgctgctggctgctcagctgacagtgctgcacggcaattctgtgctccagcagacccctgcctacatcaaggtgcagaccaacaagatggtcatgctgagctgcgaggccaaaatcagcctgagcaacatgcggatctactggctgcggcagagacaggcccctagcagcgatagccaccacgaatttctggccctgtgggatagcgccaagggcacaattcacggcgaggaagtggaacaagagaagatcgccgtgttccgggacgccagcagattcatcctgaacctgaccagcgtgaagcccgaggacagcggcatctatttctgcatgatcgtgggcagccccgagctgacatttggcaagggaacacagctgagcgtggtggacttcctgcctactacagcccagcctaccaagaagtctaccctgaagaaaagagtgtgcaggctgcccagacctgagacacagaaaggccctctgtgcagccctatcacactgggattgctggtggctggcgtgctggtgctgctggtttctctgggagttgccatccacctgtgctgtagaagaaggcgggccagactgcggtttatgaagcagttctacaag

SEQ ID NO: 3972 - DNA, 705 bp, synthetic construct
  source 1..705: mol_type = other DNA
atggctctgcctgtgacagctctgctgctgcctctggcactgctgcttcatgctgctagacctagccagtttagagtgtcccctctggacagaacctggaacctgggcgagacagtggaactgaagtgccaggtgctgctgagcaaccctacaagcggctgctcctggctgtttcagcctagaggtgcagccgcctctcctacctttctgctgtacctgagccagaacaagcccaaggccgccgaaggactggacacccagagattcagcggcaagagactgggcgacaccttcgtgctgaccctgagcgacttcagaagagagaacgagggctactacttctgtagcgccctgagcaacagcatcatgtacttcagccacttcgtgcccgtgtttctgcccgccaagcctacaacaacccctgctcctagacctcctacaccagctcctacaatcgccagccagcctctgtctctcagacccgaagcctgtagacctgctgctggcggagctgtgcataccagaggactggatttcgcctgcgacatctacatctgggctcctctggctggcacatgtggcgtgctgctgctgtccctggtcatcaccctgtactgcaaccaccggaacaggcggagagtgtgcaagtgccctagacctgtggtcaagagcggcgacaagcctagcctgagcgccagatatgtt

SEQ ID NO: 3973 - DNA, 1377 bp, synthetic construct
  source 1..1377: mol_type = other DNA
atgaaccggggagtcccttttaggcacttgcttctggtgctgcaactggcgctcctcccagcagccactcagggaaagaaagtggtgctgggcaaaaaaggggatacagtggaactgacctgtacagcttcccagaagaagagcatacaattccactggaaaaactccaaccagataaagattctgggaaatcagggctccttcttaactaaaggtccatccaagctgaatgatcgcgctgactcaagaagaagcctttgggaccaaggaaactttcccctgatcatcaagaatcttaagatagaagactcagatacttacatctgtgaagtggaggaccagaaggaggaggtgcaattgctagtgttcggattgactgccaactctgacacccacctgcttcaggggcagagcctgaccctgaccttggagagcccccctggtagtagcccctcagtgcaatgtaggagtccaaggggtaaaaacatacagggggggaagaccctctccgtgtctcagctggagctccaggatagtggcacctggacatgcactgtcttgcagaaccagaagaaggtggagttcaaaatagacatcgtggtgctagctttccagaaggcctccagcatagtctataagaaagagggggaacaggtggagttctccttcccactcgcctttacagttgaaaagctgacgggcagtggcgagctgtggtggcaggcggagagggcttcctcctccaagtcttggatcacctttgacctgaagaacaaggaagtgtctgtaaaacgggttacccaggaccctaagctccagatgggcaagaagctcccgctccacctcaccctgccccaggccttgcctcagtatgctggctctggaaacctcaccctggcccttgaagcgaaaacaggaaagttgcatcaggaagtgaacctggtggtgatgagagccactcagctccagaaaaatttgacctgtgaggtgtggggacccacctcccctaagctgatgctgagtttgaaactggagaacaaggaggcaaaggtctcgaagcgggagaaggcggtgtgggtgctgaaccctgaggcggggatgtggcagtgtctgctgagtgactcgggacaggtcctgctggaatccaacatcaaggttctgcccacatggtccaccccggtgcagccaatggccctgattgtgctggggggcgtcgccggcctcctgcttttcattgggctaggcatcttcttctgtgtcaggtgccggcaccgaaggcgccaagcagagcggatgtctcagatcaagagactcctcagtgagaagaagacctgccagtgtcctcaccggtttcagaagacatgtagccccatttga

SEQ ID NO: 3974 - DNA, 57 bp, synthetic construct
  source 1..57: mol_type = other DNA
cacctgtgctgtagaagaaggcgggccagactgcggtttatgaagcagttctacaag

SEQ ID NO: 3975 - DNA, 96 bp, synthetic construct
  source 1..96: mol_type = other DNA
ctgtactgcaaccaccggaacaggcggagagtgtgcaagtgccctagacctgtggtcaagagcggcgacaagcctagcctgagcgccagatatgtt

SEQ ID NO: 3976 - DNA, 120 bp, synthetic construct
  source 1..120: mol_type = other DNA
tgcgtgcggtgcagacaccggcggagacaggccgagagaatgagccagatcaagagactgctgtccgagaagaaaacctgccagtgcccccacagattccagaaaacatgcagccccatc

SEQ ID NO: 3977 - DNA, 29 bp, synthetic construct
  source 1..29: mol_type = other DNA
ggggggggggggggggggggggggggggg

SEQ ID NO: 3978 - DNA, 2193 bp, synthetic construct
  source 1..2193: mol_type = other DNA
atggccttaccagtgaccgccttgctcctgccgctggccttgctgctccacgccgccaggccggacatccagatgacacagactacatcctccctgtctgcctctctgggagacagagtcaccatcagttgcagggcaagtcaggacattagtaaatatttaaattggtatcagcagaaaccagatggaactgttaaactcctgatctaccatacatcaagattacactcaggagtcccatcaaggttcagtggcagtgggtctggaacagattattctctcaccattagcaacctggagcaagaagatattgccacttacttttgccaacagggtaatacgcttccgtacacgttcggaggggggaccaagctggagatcacaggtggcggtggctcgggcggtggtgggtcgggtggcggcggatctgaggtgaaactgcaggagtcaggacctggcctggtggcgccctcacagagcctgtccgtcacatgcactgtctcaggggtctcattacccgactatggtgtaagctggattcgccagcctccacgaaagggtctggagtggctgggagtaatatggggtagtgaaaccacatactataattcagctctcaaatccagactgaccatcatcaaggacaactccaagagccaagttttcttaaaaatgaacagtctgcaaactgatgacacagccatttactactgtgccaaacattattactacggtggtagctatgctatggactactggggtcaaggaacctcagtcaccgtctcctcaacgcgtggaggcagtggtgtcttcacactcgaagatttcgttggggactggcgacagacagccggctacaacctggaccaagtccttgaacagggaggtgtgtccagtttgtttcagaatctcggggtgtccgtaactccgatccaaaggattgtcctgagcggtgaaaatgggctgaagatcgacatccatgtcatcatcccgtatgaaggtctgagcggcgaccaaatgggccagatcgaaaaaatttttaaggtggtgtaccctgtggatgatcatcactttaaggtgatcctgcactatggcacactggtaatcgacggggttacgccgaacatgatcgactatttcggacggccgtatgaaggcatcgccgtgttcgacggcaaaaagatcactgtaacagggaccctgtggaacggcaacaaaattatcgacgagcgcctgatcaaccccgacggctccctgctgttccgagtaaccatcaacggagtgaccggctggcggctgtgcgaacgcattctggcgctcgagggaggcagctggagccaccctcagtttgaaaaagactacaaagacgatgacgataagggatcagattacaaggatgatgatgacaaggggtcagattataaagacgacgatgataaagggagcgactacaaggacgacgatgacaaggcctggtcccatccccagttcgagaaacaccatcaccaccaccatcatcacactagtggctccggcgagggcagaggaagtctactaacctgcggagatgtggaagaaaatcctggcccacatatgaccgagtacaagcccacggtgcgcctcgccacccgcgacgacgtccccagggccgtacgcaccctcgccgccgcgttcgccgactaccccgccacgcgccacaccgtcgatccggaccgccacatcgagcgggtcaccgagctgcaagaactcttcctcacgcgcgtcgggctcgacatcggcaaggtgtgggtcgcggacgacggcgccgcggtggcggtctggaccacgccggagagcgtcgaagcgggggcggtgttcgccgagatcggcccgcgcatggccgagttgagcggttcccggctggccgcgcagcaacagatggaaggcctcctggcgccgcaccggcccaaggagcccgcgtggttcctggccaccgtcggcgtctcgcccgaccaccagggcaagggtctgggcagcgccgtcgtgctccccggagtggaggcggccgagcgcgccggggtgcccgccttcctggagacctccgcgccccgcaacctccccttctacgagcggctcggcttcaccgtcaccgccgacgtcgaggtgcccgaaggaccgcgcacctggtgcatgacccgcaagcccggtgcctga

SEQ ID NO: 3979 - DNA, 2025 bp, synthetic construct
  source 1..2025: mol_type = other DNA
atgccctcctgggccctcttcatggtcacctcctgcctcctcctggcccctcaaaacctggcccaagtcagcagccaagatgtctccttgctggcatcagactcagagcccctgaagtgtttctcccgaacatttgaggacctcacttgcttctgggatgaggaagaggcagcgcccagtgggacataccagctgctgtatgcctacccgcgggagaagccccgtgcttgccccctgagttcccagagcatgccccactttggaacccgatacgtgtgccagtttccagaccaggaggaagtgcgtctcttctttccgctgcacctctgggtgaagaatgtgttcctaaaccagactcggactcagcgagtcctctttgtggacagtgtaggcctgccggctccccccagtatcatcaaggccatgggtgggagccagccaggggaacttcagatcagctgggaggagccagctccagaaatcagtgatttcctgaggtacgaactccgctatggccccagagatcccaagaactccactggtcccacggtcatacagctgattgccacagaaacctgctgccctgctctgcagaggcctcactcagcctctgctctggaccagtctccatgtgctcagcccacaatgccctggcaagatggaccaaagcagacctccccaagtagagaagcttcagctctgacagcagagggtggaagctgcctcatctcaggactccagcctggcaactcctactggctgcagctgcgcagcgaacctgatgggatctccctcggtggctcctggggatcctggtccctccctgtgactgtggacctgcctggagatgcagtggcacttggactgcaatgctttaccttggacctgaagaatgttacctgtcaatggcagcaacaggaccatgctagctcccaaggcttcttctaccacagcagggcacggtgctgccccagagacaggtaccccatctgggagaactgcgaagaggaagagaaaacaaatccaggactacagaccccacagttctctcgctgccacttcaagtcacgaaatgacagcattattcacatccttgtggaggtgaccacagccccgggtactgttcacagctacctgggctcccctttctggatccaccaggctgtgcgcctccccaccccaaacttgcactggagggagatctccagtgggcatctggaattggagtggcagcacccatcgtcctgggcagcccaagagacctgttatcaactccgatacacaggagaaggccatcaggactggaaggtgctggagccgcctctcggggcccgaggagggaccctggagctgcgcccgcgatctcgctaccgtttacagctgcgcgccaggctcaacggccccacctaccaaggtccctggagctcgtggtcggacccaactagggtggagaccgccaccgagaccgccacgcgtggaggcagtggtgtcttcacactcgaagatttcgttggggactggcgacagacagccggctacaacctggaccaagtccttgaacagggaggtgtgtccagtttgtttcagaatctcggggtgtccgtaactccgatccaaaggattgtcctgagcggtgaaaatgggctgaagatcgacatccatgtcatcatcccgtatgaaggtctgagcggcgaccaaatgggccagatcgaaaaaatttttaaggtggtgtaccctgtggatgatcatcactttaaggtgatcctgcactatggcacactggtaatcgacggggttacgccgaacatgatcgactatttcggacggccgtatgaaggcatcgccgtgttcgacggcaaaaagatcactgtaacagggaccctgtggaacggcaacaaaattatcgacgagcgcctgatcaaccccgacggctccctgctgttccgagtaaccatcaacggagtgaccggctggcggctgtgcgaacgcattctggcgagttggaaggatgcctctggatggtcc

SEQ ID NO: 3980 - DNA, 1449 bp, synthetic construct
  source 1..1449: mol_type = other DNA
atgccacctcctcgcctcctcttcttcctcctcttcctcacccccatggaagtcaggcccgactacaaggacgacgatgacaaggaggaacctctagtggtgaaggtggaagagggagataacgctgtgctgcagtgcctcaaggggacctcagatggccccactcagcagctgacctggtctcgggagtccccgcttaaacccttcttaaaactcagcctggggctgccaggcctgggaatccacatgaggcccctggccatctggcttttcatcttcaacgtctctcaacagatggggggcttctacctgtgccagccggggcccccctctgagaaggcctggcagcctggctggacagtcaatgtggagggcagcggggagctgttccggtggaatgtttcggacctaggtggcctgggctgtggcctgaagaacaggtcctcagagggccccagctccccttccgggaagctcatgagccccaagctgtatgtgtgggccaaagaccgccctgaaatctgggagggagagcctccgtgtctcccaccgagggacagcctgaaccagagcctcagccaggacctcaccatggcccctggctccacactctggctgtcctgtggggtaccccctgactctgtgtccaggggccccctctcctggacccatgtgcaccccaaggggcctaagtcattgctgagcctagagctgaaggacgatcgcccggccagagatatgtgggtaatggagacgggtctgttgttgccccgggccacagctcaagacgctggaaagtattattgtcaccgtggcaacctgaccatgtcattccacctcgagatcactgctcggccagtactatggcactggctgctgaggactggtggctggacgcgtggaggcagtggtgtcttcacactcgaagatttcgttggggactggcgacagacagccggctacaacctggaccaagtccttgaacagggaggtgtgtccagtttgtttcagaatctcggggtgtccgtaactccgatccaaaggattgtcctgagcggtgaaaatgggctgaagatcgacatccatgtcatcatcccgtatgaaggtctgagcggcgaccaaatgggccagatcgaaaaaatttttaaggtggtgtaccctgtggatgatcatcactttaaggtgatcctgcactatggcacactggtaatcgacggggttacgccgaacatgatcgactatttcggacggccgtatgaaggcatcgccgtgttcgacggcaaaaagatcactgtaacagggaccctgtggaacggcaacaaaattatcgacgagcgcctgatcaaccccgacggctccctgctgttccgagtaaccatcaacggagtgaccggctggcggctgtgcgaacgcattctggcgagttggaaggatgcctctggatggtcc

SEQ ID NO: 3981 - DNA, 2298 bp, synthetic construct
  source 1..2298: mol_type = other DNA
atgccacctcctcgcctcctcttcttcctcctcttcctcacccccatggaagtcaggcccgactacaaggacgacgatgacaaggaggaacctctagtggtgaaggtggaagagggagataacgctgtgctgcagtgcctcaaggggacctcagatggccccactcagcagctgacctggtctcgggagtccccgcttaaacccttcttaaaactcagcctggggctgccaggcctgggaatccacatgaggcccctggccatctggcttttcatcttcaacgtctctcaacagatggggggcttctacctgtgccagccggggcccccctctgagaaggcctggcagcctggctggacagtcaatgtggagggcagcggggagctgttccggtggaatgtttcggacctaggtggcctgggctgtggcctgaagaacaggtcctcagagggccccagctccccttccgggaagctcatgagccccaagctgtatgtgtgggccaaagaccgccctgaaatctgggagggagagcctccgtgtctcccaccgagggacagcctgaaccagagcctcagccaggacctcaccatggcccctggctccacactctggctgtcctgtggggtaccccctgactctgtgtccaggggccccctctcctggacccatgtgcaccccaaggggcctaagtcattgctgagcctagagctgaaggacgatcgcccggccagagatatgtgggtaatggagacgggtctgttgttgccccgggccacagctcaagacgctggaaagtattattgtcaccgtggcaacctgaccatgtcattccacctcgagatcactgctcggccagtactatggcactggctgctgaggactggtggctggacgcgtggaggcagtggtgtcttcacactcgaagatttcgttggggactggcgacagacagccggctacaacctggaccaagtccttgaacagggaggtgtgtccagtttgtttcagaatctcggggtgtccgtaactccgatccaaaggattgtcctgagcggtgaaaatgggctgaagatcgacatccatgtcatcatcccgtatgaaggtctgagcggcgaccaaatgggccagatcgaaaaaatttttaaggtggtgtaccctgtggatgatcatcactttaaggtgatcctgcactatggcacactggtaatcgacggggttacgccgaacatgatcgactatttcggacggccgtatgaaggcatcgccgtgttcgacggcaaaaagatcactgtaacagggaccctgtggaacggcaacaaaattatcgacgagcgcctgatcaaccccgacggctccctgctgttccgagtaaccatcaacggagtgaccggctggcggctgtgcgaacgcattctggcgctcgagggaggcagctggagccaccctcagtttgaaaaagactacaaagacgatgacgataagggatcagattacaaggatgatgatgacaaggggtcagattataaagacgacgatgataaagggagcgactacaaggacgacgatgacaaggcctggtcccatccccagttcgagaaacaccatcaccaccaccatcatcacactagtggctccggcgagggcagaggaagtctactaacctgcggagatgtggaagaaaatcctggcccacatatgaccgagtacaagcccacggtgcgcctcgccacccgcgacgacgtccccagggccgtacgcaccctcgccgccgcgttcgccgactaccccgccacgcgccacaccgtcgatccggaccgccacatcgagcgggtcaccgagctgcaagaactcttcctcacgcgcgtcgggctcgacatcggcaaggtgtgggtcgcggacgacggcgccgcggtggcggtctggaccacgccggagagcgtcgaagcgggggcggtgttcgccgagatcggcccgcgcatggccgagttgagcggttcccggctggccgcgcagcaacagatggaaggcctcctggcgccgcaccggcccaaggagcccgcgtggttcctggccaccgtcggcgtctcgcccgaccaccagggcaagggtctgggcagcgccgtcgtgctccccggagtggaggcggccgagcgcgccggggtgcccgccttcctggagacctccgcgccccgcaacctccccttctacgagcggctcggcttcaccgtcaccgccgacgtcgaggtgcccgaaggaccgcgcacctggtgcatgacccgcaagcccggtgcctga

SEQ ID NO: 3982 - DNA, 29 bp, synthetic construct
  source 1..29: mol_type = other DNA
ggggggggggggggggggggggggggggg

SEQ ID NO: 3983 - DNA, 597 bp, synthetic construct
  source 1..597: mol_type = other DNA
atgaccgagtacaagcccacggtgcgcctcgccacccgcgacgacgtccccagggccgtacgcaccctcgccgccgcgttcgccgactaccccgccacgcgccacaccgtcgatccggaccgccacatcgagcgggtcaccgagctgcaagaactcttcctcacgcgcgtcgggctcgacatcggcaaggtgtgggtcgcggacgacggcgccgcggtggcggtctggaccacgccggagagcgtcgaagcgggggcggtgttcgccgagatcggcccgcgcatggccgagttgagcggttcccggctggccgcgcagcaacagatggaaggcctcctggcgccgcaccggcccaaggagcccgcgtggttcctggccaccgtcggcgtctcgcccgaccaccagggcaagggtctgggcagcgccgtcgtgctccccggagtggaggcggccgagcgcgccggggtgcccgccttcctggagacctccgcgccccgcaacctccccttctacgagcggctcggcttcaccgtcaccgccgacgtcgaggtgcccgaaggaccgcgcacctggtgcatgacccgcaagcccggtgcc

SEQ ID NO: 3984 - DNA, 396 bp, synthetic construct
  source 1..396: mol_type = other DNA
atggccaagcctttgtctcaagaagaatccaccctcattgaaagagcaacggctacaatcaacagcatccccatctctgaagactacagcgtcgccagcgcagctctctctagcgacggccgcatcttcactggtgtcaatgtatatcattttactgggggaccttgtgcagaactcgtggtgctgggcactgctgctgctgcggcagctggcaacctgacttgtatcgtcgcgatcggaaatgagaacaggggcatcttgagcccctgcggacggtgccgacaggtgcttctcgatctgcatcctgggatcaaagccatagtgaaggacagtgatggacagccgacggcagttgggattcgtgaattgctgccctctggttatgtgtgggagggc

SEQ ID NO: 3985 - DNA, 516 bp, synthetic construct
  source 1..516: mol_type = other DNA
atgggcaacgaggccagctaccctctggagatgtgctcccacttcgacgccgacgagatcaagcggctgggcaagcgcttcaagaagctggacctggacaacagcggcagcctgagcgtggaggagtttatgtctctgcccgagctgcagcagaaccccctggtgcagcgcgtgatcgacatcttcgacaccgacggcaacggcgaggtggacttcaaggagttcatcgagggcgtgagccagttcagcgtgaagggcgacaaggagcagaagctgcggttcgccttccgcatctacgatatggataaagatggctatatttctaatggcgagctgttccaggtgctgaagatgatggtgggcaacaataccaagctggccgatacccagctgcagcagatcgtggacaagaccatcatcaacgccgacaaggacggcgacggcagaatcagcttcgaggagttctgtgccgtggtgggaggcctggatattcacaaaaaaatggtggtggacgtg

SEQ ID NO: 3986 - DNA, 1071 bp, synthetic construct
  source 1..1071: mol_type = other DNA
atgctgctgctcgtgaccagcctgctgctgtgcgaactgccccaccctgcctttctgctgatcccccggaaagtgtgcaacggcatcggcatcggagagttcaaggacagcctgagcatcaacgccaccaacatcaagcacttcaagaactgcaccagcatcagcggcgacctgcacatcctgcccgtggcctttagaggcgacagcttcacccacacccccccactggaccctcaggaactggacatcctgaaaaccgtgaaagagatcaccggatttctgctgattcaggcttggcccgagaaccggaccgatctgcacgccttcgagaacctggaaatcatccggggcaggaccaagcagcacggccagttttctctggccgtggtgtccctgaacatcaccagcctgggcctgcggagcctgaaagaaatcagcgacggggatgtgattatcagcggcaacaagaacctgtgctacgccaacaccatcaactggaagaagctgttcggcacctccggccagaaaacaaagatcatcagcaaccggggcgagaacagctgcaaggccacaggacaagtgtgccacgccctgtgtagccctgagggctgttggggacccgagcccagagattgcgtgtcctgccggaatgtgtccagaggccgcgagtgcgtggacaagtgcaacctgctggaaggcgagccccgcgagtttgtggaaaacagcgagtgcatccagtgccaccccgagtgtctgccccaggccatgaatatcacctgtaccggcagaggccccgacaactgtatccagtgcgcccactacatcgacggcccccactgcgtgaaaacctgtccagctggcgtgatgggagagaacaacaccctcgtgtggaagtacgccgacgccggccatgtgtgccacctgtgtcaccccaactgcacctacggctgtacaggccctggcctggaaggctgccctaccaacggacccaagatccccagcattgccaccggcatggtgggagcattgctgctgctgctggtggtggccctgggcatcggcctgtttatg

SEQ ID NO: 3987 - DNA, 1272 bp, synthetic construct
  source 1..1272: mol_type = other DNA
atgcgaccctccgggacggccggggcagcgttcctggcgctgctggctgcgctctgcccggcgagtcgggctctggaggaaaagaaaggtaattatgtggtgacagatcacggctcgtgcgtccgagcctgtggggccgacagctatgagatggaggaagacggcgtccgcaagtgtaagaagtgcgaagggccttgccgcaaagtgtgtaacggaataggtattggtgaatttaaagactcactctccataaatgctacgaatattaaacacttcaaaaactgcacctccatcagtggcgatctccacatcctgccggtggcatttaggggtgactccttcacacatactcctcctctggatccacaggaactggatattctgaaaaccgtaaaggaaatcacagggtttttgctgattcaggcttggcctgaaaacaggacggacctccatgcctttgagaacctagaaatcatacgcggcaggaccaagcaacatggtcagttttctcttgcagtcgtcagcctgaacataacatccttgggattacgctccctcaaggagataagtgatggagatgtgataatttcaggaaacaaaaatttgtgctatgcaaatacaataaactggaaaaaactgtttgggacctccggtcagaaaaccaaaattataagcaacagaggtgaaaacagctgcaaggccacaggccaggtctgccatgccttgtgctcccccgagggctgctggggcccggagcccagggactgcgtctcttgccggaatgtcagccgaggcagggaatgcgtggacaagtgcaaccttctggagggtgagccaagggagtttgtggagaactctgagtgcatacagtgccacccagagtgcctgcctcaggccatgaacatcacctgcacaggacggggaccagacaactgtatccagtgtgcccactacattgacggcccccactgcgtcaagacctgcccggcaggagtcatgggagaaaacaacaccctggtctggaagtacgcagacgccggccatgtgtgccacctgtgccatccaaactgcacctacggatgcactgggccaggtcttgaaggctgtccaacgaatgggcctaagatcccgtccatcgccactgggatggtgggggccctcctcttgctgctggtggtggccctggggatcggcctcttcatgcgaaggcgccacatcgttcggaagcgcacgctgcggaggctgctgcaggagagggagcttgtggagcct

SEQ ID NO: 3988 - DNA, 999 bp, synthetic construct
  source 1..999: mol_type = other DNA
atgccccctcccagactgctgttcttcctgctgttcctgacccctatggaagtgcggcccgaggaacccctggtcgtgaaagtggaagagggcgacaacgccgtgctccagtgtctgaagggcacctccgatggccctacccagcagctgacatggtccagagagagccccctgaagcccttcctgaagctgtctctgggcctgcctggcctgggcatccacatgaggccactggctatctggctgttcatcttcaacgtgtcccagcagatgggcggcttctacctgtgtcagcctggccccccaagcgagaaagcctggcagcctggctggaccgtgaacgtggaaggatctggcgagctgttccggtggaacgtgtccgatctgggcggcctgggatgcggcctgaagaacagaagcagcgaaggccccagcagccccagcggcaaactgatgagccccaagctgtacgtgtgggccaaggaccggcccgagatttgggaaggcgagcctccttgcctgccccccagagatagcctgaaccagagcctgagccaggacctgacaatggcccctggcagcacactgtggctgagctgtggcgtgccacccgactctgtgtccagaggccctctgagctggacccacgtgcaccccaagggacctaagagcctgctgagcctggaactgaaggacgacagacccgccagagatatgtgggtcatggaaaccggcctgctgctgcctagagccacagcccaggatgccggcaagtattactgccaccggggcaacctgaccatgagcttccacctggaaatcaccgccagacccgtgctgtggcactggctgctgagaaccggcggatggaaagtgtccgccgtgaccctggcctacctgatcttctgcctgtgctccctcgtgggcatcctgcatctccagcgggctctggtgctgcggcggaagagaaagagaatgaccgaccccacccggcggttc

SEQ ID NO: 3989 - DNA, 315 bp, synthetic construct
  source 1..315: mol_type = other DNA
atggccttaccagtgaccgccttgctcctgccgctggccttgctgctccacgccgccaggccgttcgaaatgttgcagatggctgggcagtgctcccaaaatgaatattttgacagtttgttgcatgcttgcataccttgtcaacttcgatgttcttctaatactcctcctctaacatgtcagcgttattgtaatgcaagtgtgaccaattcagtgaaaggaacgaatgcgattctctggacctgtttgggactgagcttaataatttctttggcagttttcgtgctaatgtttttgctaaggaagataaactct

SEQ ID NO: 3990 - DNA, 564 bp, synthetic construct
  source 1..564: mol_type = other DNA
atggccacttacgaggttctctgtgaggtggcgcggaaactgggcacggatgacagggaagtggtattgttcctcctaaacgtgttcatacctcaacccacactggcccaattaattggagctcttagagctttaaaggaggagggcaggttaacgtttcccctgttagcggaatgtctgtttcgtgcaggtcgcagagacctcttgcgcgacctgcttcacttagacccgcgttttttagagcgccacctagcgggcacaatgagttatttcagcccttatcagctcactgttctccacgtagacggggagctgtgtgcgagggatattaggtctttgatatttttaagcaaggacactatagggtctcgcagcacaccacagacattcttacactgggtgtactgtatggaaaacttagacctactgggtcccactgacgtggatgccctaatgtcaatgcttagatctttgtcaagagtagacctacagcgccaagtgcaaaccctaatgggccttcacctttccggcccatcacactcccaacactatcgccatacacca

SEQ ID NO: 3991 - DNA, 723 bp, synthetic construct
  source 1..723: mol_type = other DNA
atgtccgactccaaggaggtccctagccttccatttttgcgacacttgctcgaagagttggacagccatgaggacagcttgctgctgtttctgtgtcacgacgcggccccgggctgcacgacggtcacgcaagctttgtgctcgcttagccaacagcgcaagctgaccctcgcggctctggtcgagatgctctacgtgctgcagcgtatggatcttctcaagagccgcttcgggctcagcaaggagggggccgagcaattgctgggcacaagctttctcacgcgctaccgcaagctcatggtttgcgtgggtgaggagctcgactcgagcgagctacgcgctctacgcttgttcgcgtgcaacctgaatccgagcctgagcacggcgctttctgagagcagccgctttgtcgagcttgtactcgcgcttgaaaacgtaggactcgtctcgccatcgagtgtttccgtgcttgcggacatgttgcgcactcttcggcgcctcgatttgtgccagcagcttgttgagtacgaacaacaagagcaagccaggtaccgttactgttacgcggcctcgccctcattgccagttcgtacgttacgtcgggggcacggcgcgagtgaacacgagcagctgtgcatgcccgtgcaagaatcctctgacagccccgagctgctgcgcacgcccgtacaagaatcctccagcgacagccccgagcaaacgact

SEQ ID NO: 3992 - DNA, 564 bp, synthetic construct
  source 1..564: mol_type = other DNA
atggctacctacgaggtgctgtgcgaggtggcaagaaagctgggcaccgacgacagagaagtggtgctgttcctgctgaacgtgttcatccctcagcctacactggcccagctgatcggtgcactgagagccctgaaagaggaaggccggctgacctttcctctgctggccgaatgcctgttcagagccggaagaagggatctgctgcgggacctgctgcatctggaccccagatttctggaaagacacctggccggcaccatgagctacttcagcccttaccagctgaccgtgctgcacgttgacggcgaactgtgcgccagagatattcggagcctgatcttcctgagcaaggacaccatcggcagccggtctacccctcagacatttctgcactgggtgtactgcatggaaaacctggacctgctcggccccacagatgtggatgccctgatgtccatgctgagaagcctgagcagagtggacctccagagacaggtgcagacactgatgggactgcacctgagcggacctagccacagccagcactacagacacacccct

SEQ ID NO: 3993 - DNA, 1200 bp, synthetic construct
  source 1..1200: mol_type = other DNA
atgctggaaggcgtgcaggtggaaaccatcagccctggcgacggcagaaccttccctaagaggggccagacctgcgtggtgcactacaccggaatgctggaagatggcaagaaggtggacagcagccgggaccggaacaagcccttcaagttcatgctgggcaagcaggaagtgatccggggctgggaagagggcgtggcccagatgtctgtgggccagagagccaagctgaccatctcccccgattacgcctacggcgctacaggccaccctggcatcattcctccacacgccacactggtgttcgacgtggaactgctgaagctggaaagcggcggaggcagcggagtggatggcttcggagatgtgggagccctggaaagcctgagaggcaacgccgacctggcctacatcctgagcatggaaccttgcggccactgcctgattatcaacaacgtgaacttctgccgcgagagcggcctgagaaccagaaccggcagcaacatcgactgcgagaagctgcggcggagattcagcagcctgcacttcatggtggaagtgaagggcgacctgaccgccaagaaaatggtgctggccctgctggaactggcccagcaggatcatggcgctctggactgctgtgtggtcgtgatcctgagccacggctgccaggcttcccatcttcagttccctggcgctgtgtacggcaccgatggctgtcctgtgtccgtggaaaagatcgtgaacatcttcaacggcaccagctgccccagcctgggcggaaagcccaagctgttctttattcaagcctgtggcggcgagcagaaggaccacggctttgaggtggcctccaccagccctgaggatgagagccctggcagcaaccctgagcctgacgccaccccattccaggaaggactgcggaccttcgaccagctggacgccatctctagcctgcccacccccagcgacatcttcgtgtcctacagcaccttccccggctttgtgtcctggcgggaccctaagagcggctcttggtacgtggaaaccctggacgacatctttgagcagtgggctcacagcgaggacctccagagcctgctgctgagagtggctaacgccgtgtccgtgaagggcatctacaagcagatgcctggctgcttcaacttcctgcggaagaagctgtttttcaagaccagc

SEQ ID NO: 3994 - DNA, 1188 bp, synthetic construct
  source 1..1188: mol_type = other DNA
atgtacaggatgcaactcctgtcttgcattgcactaagtcttgcacttgtcacaaacagtgcacctacttcaagttctacaaagaaaacacagctacaactggagcatttactgctggatttacagatgattttgaatggaattaataattacaagaatcccaaactcaccaggatgctcacatttaagttttacatgcccaagaaggccacagaactgaaacatcttcagtgtctagaagaagaactcaaacctctggaggaagtgctaaatttagctcaaagcaaaaactttcacttaagacccagggacttaatcagcaatatcaacgtaatagttctggaactaaagggatctgaaacaacattcatgtgtgaatatgctgatgagacagcaaccattgtagaatttctgaacagatggattaccttttgtcaaagcatcatctcaacactgactacgcgaggcggaggaagctcgcgtaaaattgaagttatgtatcctcctccttacctagacaatgagaagagcaatggaaccattatccatgtgaaagggaaacacctttgtccaagtcccctatttcccggaccttctaagcccttttgggtgctggtggtggttgggggagtcctggcttgctatagcttgctagtaacagtggcctttattattttctgggtgaggagtaagaggagctctagtagagcaaagcgaagtggtagcggagcaaccaacttttctctgctcaagcaagccggtgacgtggaagagaaccctggtcctcatatggccaagcctttgtctcaagaagaatccaccctcattgaaagagcaacggctacaatcaacagcatccccatctctgaagactacagcgtcgccagcgcagctctctctagcgacggccgcatcttcactggtgtcaatgtatatcattttactgggggaccttgtgcagaactcgtggtgctgggcactgctgctgctgcggcagctggcaacctgacttgtatcgtcgcgatcggaaatgagaacaggggcatcttgagcccctgcggacggtgccgacaggtgcttctcgatctgcatcctgggatcaaagccatagtgaaggacagtgatggacagccgacggcagttgggattcgtgaattgctgccctctggttatgtgtgggagggctaa

SEQ ID NO: 3995 - DNA, 90 bp, synthetic construct; identical to SEQ ID NO: 3843
  source 1..90: mol_type = other DNA

SEQ ID NO: 3996 - DNA, 90 bp, synthetic construct; identical to SEQ ID NO: 3849
  source 1..90: mol_type = other DNA

SEQ ID NO: 3997 - DNA, 90 bp, synthetic construct
  source 1..90: mol_type = other DNA
cagagcttcggcctgctggaccccaagctgagctacctgctggatggcatcctgttcatctacggcgtgatcctgaccgccctgttcctg

SEQ ID NO: 3998 - DNA, 90 bp, synthetic construct
  source 1..90: mol_type = other DNA
cagagttttgggttgttggaccctaaattgagctatctgttggacggaatcctgttcatttacggagtgatcctgaccgcattgttcctg

SEQ ID NO: 3999 - DNA, 108 bp, synthetic construct
  source 1..108: mol_type = other DNA
agggaccaaagactgcctcctgacgctcacaaacctccaggcggaggcagcttcagaacccctatccaagaggaacaggctgacgcccacagcaccctggcaaaaatt

SEQ ID NO: 4000 - DNA, 108 bp, synthetic construct
  source 1..108: mol_type = other DNA
cgcgatcagaggctgccacctgatgctcataagccacctggcggcggatctttcaggaccccaattcaagaagaacaagccgacgctcactctaccctggctaagatc

SEQ ID NO: 4001 - DNA, 198 bp, synthetic construct
  source 1..198: mol_type = other DNA
cagagcttcggcctgctggaccccaagctgtgctacctgctggatggcatcctgttcatctacggcgtgatcctgaccgccctgttcctgagggaccaaagactgcctcctgacgctcacaaacctccaggcggaggcagcttcagaacccctatccaagaggaacaggctgacgcccacagcaccctggcaaaaatt

SEQ ID NO: 4002 - DNA, 198 bp, synthetic construct
  source 1..198: mol_type = other DNA
cagagttttgggttgttggaccctaaattgtgctatctgttggacggaatcctgttcatttacggagtgatcctgaccgcattgttcctgcgcgatcagaggctgccacctgatgctcataagccacctggcggcggatctttcaggaccccaattcaagaagaacaagccgacgctcactctaccctggctaagatc

SEQ ID NO: 4003 - DNA, 198 bp, synthetic construct
  source 1..198: mol_type = other DNA
cagagcttcggcctgctggaccccaagctgagctacctgctggatggcatcctgttcatctacggcgtgatcctgaccgccctgttcctgagggaccaaagactgcctcctgacgctcacaaacctccaggcggaggcagcttcagaacccctatccaagaggaacaggctgacgcccacagcaccctggcaaaaatt

SEQ ID NO: 4004 - DNA, 198 bp, synthetic construct
  source 1..198: mol_type = other DNA
cagagttttgggttgttggaccctaaattgagctatctgttggacggaatcctgttcatttacggagtgatcctgaccgcattgttcctgcgcgatcagaggctgccacctgatgctcataagccacctggcggcggatctttcaggaccccaattcaagaagaacaagccgacgctcactctaccctggctaagatc

SEQ ID NO: 4005 - DNA, 345 bp, synthetic construct
  source 1..345: mol_type = other DNA
atgggaggactggaaccctgtagcagactgctgctgcttcctctgctgctggctgtgtctggactcagacctgttcaggctggatcccaggctcagagcgattgcagctgtagcacagtgtctccaggcgtgctggccggaattgtgatgggcgatctggtgctgacagtgctgattgccctggccgtgtacttcctgggtagactggtgcctagaggaagaggcgctgccgaagccgccacaagaaagcagagaatcaccgagacagagagcccctaccaagagctgcaaggccagagaagcgacgtgtacagcgacctgaatacccagcggccttactacaaa

SEQ ID NO: 4006 - DNA, 258 bp, synthetic construct
  source 1..258: mol_type = other DNA
caggctcagagcgattgcagctgtagcacagtgtctccaggcgtgctggccggaattgtgatgggcgatctggtgctgacagtgctgattgccctggccgtgtacttcctgggtagactggtgcctagaggaagaggcgctgccgaagccgccacaagaaagcagagaatcaccgagacagagagcccctaccaagagctgcaaggccagagaagcgacgtgtacagcgacctgaatacccagcggccttactacaaa

SEQ ID NO: 4007 - DNA, 345 bp, synthetic construct
  source 1..345: mol_type = other DNA
atgggtggacttgagccttgttccaggctgctgttgctgccactgctcctcgctgttagtggactgaggccagtgcaggctggtacccaggcacagtctgactgtagctgctccacagttagccctggcgttctggctggcatcgttatgggcgacctcgtcctgactgtcctgatcgctctggcagtgtattttctcggacggctggtcccaagaggaaggggagcagctgaagctgctacccggaagcagcggatcacagagactgagtctccataccaagaactccagggacagagatccgatgtgtactccgacctgaacacacagaggccctattataag

SEQ ID NO: 4008 - DNA, 258 bp, synthetic construct
  source 1..258: mol_type = other DNA
caggcacagtctgactgtagctgctccacagttagccctggcgttctggctggcatcgttatgggcgacctcgtcctgactgtcctgatcgctctggcagtgtattttctcggacggctggtcccaagaggaaggggagcagctgaagctgctacccggaagcagcggatcacagagactgagtctccataccaagaactccagggacagagatccgatgtgtactccgacctgaacacacagaggccctattataag

SEQ ID NO: 4009 - DNA, 345 bp, synthetic construct
  source 1..345: mol_type = other DNA
atgggaggactggaaccctgtagcagactgctgctgcttcctctgctgctggctgtgtctggactcagacctgttcaggctggatcccaggctcagagcgattgcagctctagcacagtgtctccaggcgtgctggccggaattgtgatgggcgatctggtgctgacagtgctgattgccctggccgtgtacttcctgggtagactggtgcctagaggaagaggcgctgccgaagccgccacaagaaagcagagaatcaccgagacagagagcccctaccaagagctgcaaggccagagaagcgacgtgtacagcgacctgaatacccagcggccttactacaaa

SEQ ID NO: 4010 - DNA, 258 bp, synthetic construct
  source 1..258: mol_type = other DNA
caggctcagagcgattgcagctctagcacagtgtctccaggcgtgctggccggaattgtgatgggcgatctggtgctgacagtgctgattgccctggccgtgtacttcctgggtagactggtgcctagaggaagaggcgctgccgaagccgccacaagaaagcagagaatcaccgagacagagagcccctaccaagagctgcaaggccagagaagcgacgtgtacagcgacctgaatacccagcggccttactacaaa

SEQ ID NO: 4011 - DNA, 345 bp, synthetic construct
  source 1..345: mol_type = other DNA
atgggtggacttgagccttgttccaggctgctgttgctgccactgctcctcgctgttagtggactgaggccagtgcaggctggtacccaggcacagtctgactgtagcagctccacagttagccctggcgttctggctggcatcgttatgggcgacctcgtcctgactgtcctgatcgctctggcagtgtattttctcggacggctggtcccaagaggaaggggagcagctgaagctgctacccggaagcagcggatcacagagactgagtctccataccaagaactccagggacagagatccgatgtgtactccgacctgaacacacagaggccctattataag

SEQ ID NO: 4012 - DNA, 258 bp, synthetic construct
  source 1..258: mol_type = other DNA
caggcacagtctgactgtagcagctccacagttagccctggcgttctggctggcatcgttatgggcgacctcgtcctgactgtcctgatcgctctggcagtgtattttctcggacggctggtcccaagaggaaggggagcagctgaagctgctacccggaagcagcggatcacagagactgagtctccataccaagaactccagggacagagatccgatgtgtactccgacctgaacacacagaggccctattataag

SEQ ID NO: 4013 - DNA, 549 bp, synthetic construct
  source 1..549: mol_type = other DNA
ctgtgggtttcacagcctccagagatcagaaccctggaaggcagcagcgccttcctgccttgcagcttcaatgcctctcagggcagactggctatcggcagcgtgacctggttcagagatgaggtggtgcccggcaaagaagtgcggaacggcacccctgagtttagaggaaggctggcccctctggcctccagcagatttctgcacgatcaccaggccgagctgcacatcagagatgtgcgaggacacgacgccagcatctacgtgtgcagagtggaagtgctcggcctcggagttggcacaggcaatggaacaagactggtggtggaaaaagagcaccctcagctcggagccggaacagtgctgcttctgagagccggcttttacgccgtgtcctttctgtctgtggccgtgggcagcaccgtgtactatcagggcaagtgcctgacctggaagggacctagaaggcaactgcctgctgtggtgcctgctcctttgcctcctccatgtggaagctctgcccatctgctgccacctgttccaggcgga

SEQ ID NO: 4014 - DNA, 228 bp, synthetic construct
  source 1..228: mol_type = other DNA
gtggtggaaaaagagcaccctcagctcggagccggaacagtgctgcttctgagagccggcttttacgccgtgtcctttctgtctgtggccgtgggcagcaccgtgtactatcagggcaagtgcctgacctggaagggacctagaaggcaactgcctgctgtggtgcctgctcctttgcctcctccatgtggaagctctgcccatctgctgccacctgttccaggcgga

SEQ ID NO: 4015 - DNA, 324 bp, synthetic construct
  source 1..324: mol_type = other DNA
ctgtgggtttcacagcctccagagatcagaaccctggaaggcagcagcgccttcctgccttgcagcttcaatgcctctcagggcagactggctatcggcagcgtgacctggttcagagatgaggtggtgcccggcaaagaagtgcggaacggcacccctgagtttagaggaaggctggcccctctggcctccagcagatttctgcacgatcaccaggccgagctgcacatcagagatgtgcgaggacacgacgccagcatctacgtgtgcagagtggaagtgctcggcctcggagttggcacaggcaatggaacaagactggtg

SEQ ID NO: 4016 - DNA, 27 bp, synthetic construct
  source 1..27: mol_type = other DNA
gtggaaaaagagcaccctcagctcgga

SEQ ID NO: 4017 - DNA, 63 bp, synthetic construct
  source 1..63: mol_type = other DNA
gccggaacagtgctgcttctgagagccggcttttacgccgtgtcctttctgtctgtggccgtg

SEQ ID NO: 4018 - DNA, 136 bp, synthetic construct
  source 1..136: mol_type = other DNA
gggcagcaccgtgtactatcagggcaagtgcctgacctggaagggacctagaaggcaactgcctgctgtggtgcctgctcctttgcctcctccatgtggaagctctgcccatctgctgccacctgttccaggcgga

SEQ ID NO: 4019 - DNA, 549 bp, synthetic construct
  source 1..549: mol_type = other DNA
ctgtgggtgtcccagccacctgaaattcggacactggaaggctcctccgcctttctgccctgtagctttaacgccagccaggggagactcgccatcggctctgtgacatggttccgggatgaagtcgtccctggaaaagaagttcgcaacggaacaccagagttcagaggcagactcgccccactggcaagctccagattcctgcatgaccatcaggctgaactgcacattagggacgtgcggggccacgatgcctccatctatgtgtgtcgggtcgaagtgcttggactcggcgtcggaactggaaacggcactaggctggtggtcgagaaagaacatccacagcttggcgctggcaccgtcctgttgcttagagccggattctatgccgtcagcttcctgtccgtggctgtggggtctacagtgtattaccagggaaaatgtctcacctggaaaggccccagacgccagcttccagctgttgttcctgctccactgccaccaccttgtggctcctctgctcacttgcttccaccagtgcctggcgga

SEQ ID NO: 4020 - DNA, 225 bp, synthetic construct
  source 1..225: mol_type = other DNA
gtcgagaaagaacatccacagcttggcgctggcaccgtcctgttgcttagagccggattctatgccgtcagcttcctgtccgtggctgtggggtctacagtgtattaccagggaaaatgtctcacctggaaaggccccagacgccagcttccagctgttgttcctgctccactgccaccaccttgtggctcctctgctcacttgcttccaccagtgcctggcgga

SEQ ID NO: 4021 - DNA, 324 bp, synthetic construct
  source 1..324: mol_type = other DNA
ctgtgggtgtcccagccacctgaaattcggacactggaaggctcctccgcctttctgccctgtagctttaacgccagccaggggagactcgccatcggctctgtgacatggttccgggatgaagtcgtccctggaaaagaagttcgcaacggaacaccagagttcagaggcagactcgccccactggcaagctccagattcctgcatgaccatcaggctgaactgcacattagggacgtgcggggccacgatgcctccatctatgtgtgtcgggtcgaagtgcttggactcggcgtcggaactggaaacggcactaggctggtg

SEQ ID NO: 4022 - DNA, 27 bp, synthetic construct
  source 1..27: mol_type = other DNA
gtcgagaaagaacatccacagcttggc

SEQ ID NO: 4023 - DNA, 63 bp, synthetic construct
  source 1..63: mol_type = other DNA
gctggcaccgtcctgttgcttagagccggattctatgccgtcagcttcctgtccgtggctgtg

SEQ ID NO: 4024 - DNA, 135 bp, synthetic construct
  source 1..135: mol_type = other DNA
gggtctacagtgtattaccagggaaaatgtctcacctggaaaggccccagacgccagcttccagctgttgttcctgctccactgccaccaccttgtggctcctctgctcacttgcttccaccagtgcctggcgga

SEQ ID NO: 4025 - DNA, 858 bp, synthetic construct
  source 1..858: mol_type = other DNA
atggcttggagagccctgcatcctctgctgctgcttctcctgctgttccctggatctcaggccggtaccagcggagaattcggatctctcgagcagtctaaagcccaggtgctgcaatctgtggccggacagacactgacagtgcggtgtcagtatcctcctaccggcagcctgtacgagaagaaaggctggtgcaaagaggccagcgcactcgtctgtatcagactggtcaccagcagcaagccccggacaatggcatggaccagcagattcaccatctgggacgatcccgacgccggcttctttaccgtgaccatgaccgacctgagagaagaggacagcggccactactggtgccggatctacagacccagcgacaacagcgtgtccaagagcgtgcggttctacctggtggtgtctcctgcctctgccagcacacagacaagctggaccccacgcgatctggtgtctagccagactcagacccagagctgtgtgcctcctacagctggtgctagacaggcccctgagagcccttctacaatccccgttccaagccagcctcagaacagcacactcagacctggacctgccgctcctattgctctggtgcctgtgttttgtggcctgctggtggctaagagcctggtgctgtctgccctgcttgtttggtggggagacatctggtggaaaaccatgatggaactgcggagcctggacacccagaaggccacctgtcatctccagcaagtgaccgatctgccctggacctctgtgtcaagccccgtggaaagagagatcctgtaccacaccgtggctcggaccaagatcagcgacgacgatgatgagcacaccctt

SEQ ID NO: 4026 - DNA, 765 bp, synthetic construct
  source 1..765: mol_type = other DNA
cagtctaaagcccaggtgctgcaatctgtggccggacagacactgacagtgcggtgtcagtatcctcctaccggcagcctgtacgagaagaaaggctggtgcaaagaggccagcgcactcgtctgtatcagactggtcaccagcagcaagccccggacaatggcatggaccagcagattcaccatctgggacgatcccgacgccggcttctttaccgtgaccatgaccgacctgagagaagaggacagcggccactactggtgccggatctacagacccagcgacaacagcgtgtccaagagcgtgcggttctacctggtggtgtctcctgcctctgccagcacacagacaagctggaccccacgcgatctggtgtctagccagactcagacccagagctgtgtgcctcctacagctggtgctagacaggcccctgagagcccttctacaatccccgttccaagccagcctcagaacagcacactcagacctggacctgccgctcctattgctctggtgcctgtgttttgtggcctgctggtggctaagagcctggtgctgtctgccctgcttgtttggtggggagacatctggtggaaaaccatgatggaactgcggagcctggacacccagaaggccacctgtcatctccagcaagtgaccgatctgccctggacctctgtgtcaagccccgtggaaagagagatcctgtaccacaccgtggctcggaccaagatcagcgacgacgatgatgagcacaccctt

SEQ ID NO: 4027 - DNA, 468 bp, synthetic construct
  source 1..468: mol_type = other DNA
aagagcgtgcggttctacctggtggtgtctcctgcctctgccagcacacagacaagctggaccccacgcgatctggtgtctagccagactcagacccagagctgtgtgcctcctacagctggtgctagacaggcccctgagagcccttctacaatccccgttccaagccagcctcagaacagcacactcagacctggacctgccgctcctattgctctggtgcctgtgttttgtggcctgctggtggctaagagcctggtgctgtctgccctgcttgtttggtggggagacatctggtggaaaaccatgatggaactgcggagcctggacacccagaaggccacctgtcatctccagcaagtgaccgatctgccctggacctctgtgtcaagccccgtggaaagagagatcctgtaccacaccgtggctcggaccaagatcagcgacgacgatgatgagcacaccctt

SEQ ID NO: 4028 - DNA, 297 bp, synthetic construct
  source 1..297: mol_type = other DNA
cagtctaaagcccaggtgctgcaatctgtggccggacagacactgacagtgcggtgtcagtatcctcctaccggcagcctgtacgagaagaaaggctggtgcaaagaggccagcgcactcgtctgtatcagactggtcaccagcagcaagccccggacaatggcatggaccagcagattcaccatctgggacgatcccgacgccggcttctttaccgtgaccatgaccgacctgagagaagaggacagcggccactactggtgccggatctacagacccagcgacaacagcgtgtcc

SEQ ID NO: 4029 - DNA, 216 bp, synthetic construct
  source 1..216: mol_type = other DNA
aagagcgtgcggttctacctggtggtgtctcctgcctctgccagcacacagacaagctggaccccacgcgatctggtgtctagccagactcagacccagagctgtgtgcctcctacagctggtgctagacaggcccctgagagcccttctacaatccccgttccaagccagcctcagaacagcacactcagacctggacctgccgctcctattgct

SEQ ID NO: 4030 - DNA, 63 bp, synthetic construct
  source 1..63: mol_type = other DNA
ctggtgcctgtgttttgtggcctgctggtggctaagagcctggtgctgtctgccctgcttgtt

SEQ ID NO: 4031 - DNA, 189 bp, synthetic construct
  source 1..189: mol_type = other DNA
tggtggggagacatctggtggaaaaccatgatggaactgcggagcctggacacccagaaggccacctgtcatctccagcaagtgaccgatctgccctggacctctgtgtcaagccccgtggaaagagagatcctgtaccacaccgtggctcggaccaagatcagcgacgacgatgatgagcacaccctt

SEQ ID NO: 4032 - DNA, 855 bp, synthetic construct
  source 1..855: mol_type = other DNA
atggcttggcgtgcactccatccattgctgttgttgctgctcctgtttcctggcagccaggctggatccagcttcgaaggcagcacgcgtcagagcaaggctcaggttctccagagtgtggcaggccagactctgactgtcagatgccagtatccaccaacaggctccctctatgagaaaaaaggatggtgtaaagaggcttctgccctcgtctgcatccggctggttacctctagcaagcccagaactatggcctggacatcccggtttacaatctgggatgaccctgatgccggatttttcacagtgacaatgacggatctgcgcgaggaagattccgggcactattggtgtagaatctacaggccctccgacaactccgtgtctaagtctgtgcgcttttacctggtcgtcagccctgccagtgcctccactcagacatcttggaccccaagggaccttgtgtcctctcagacacagacacagtcctgcgtgccaccaactgctggcgcaagacaggctccagagtctcccagcacaatccccgtcccttctcagccccagaactccacacttaggccaggaccagctgctccaatcgcactggtcccagtgttctgcggactgctggttgccaagtctctggtgctgagcgcactcctcgtttggtggggcgatatttggtggaaaacgatgatggaattgagatccctcgatacgcagaaagccacatgccaccttcagcaagtcacagacttgccttggaccagcgtcagctctcccgtggaacgggaaattctgtatcatacagtggcccgcaccaagatttccgacgatgacgacgagcacacactg

SEQ ID NO: 4033 - DNA, 765 bp, synthetic construct
  source 1..765: mol_type = other DNA
cagagcaaggctcaggttctccagagtgtggcaggccagactctgactgtcagatgccagtatccaccaacaggctccctctatgagaaaaaaggatggtgtaaagaggcttctgccctcgtctgcatccggctggttacctctagcaagcccagaactatggcctggacatcccggtttacaatctgggatgaccctgatgccggatttttcacagtgacaatgacggatctgcgcgaggaagattccgggcactattggtgtagaatctacaggccctccgacaactccgtgtctaagtctgtgcgcttttacctggtcgtcagccctgccagtgcctccactcagacatcttggaccccaagggaccttgtgtcctctcagacacagacacagtcctgcgtgccaccaactgctggcgcaagacaggctccagagtctcccagcacaatccccgtcccttctcagccccagaactccacacttaggccaggaccagctgctccaatcgcactggtcccagtgttctgcggactgctggttgccaagtctctggtgctgagcgcactcctcgtttggtggggcgatatttggtggaaaacgatgatggaattgagatccctcgatacgcagaaagccacatgccaccttcagcaagtcacagacttgccttggaccagcgtcagctctcccgtggaacgggaaattctgtatcatacagtggcccgcaccaagatttccgacgatgacgacgagcacacactg

SEQ ID NO: 4034 - DNA, 468 bp, synthetic construct
  source 1..468: mol_type = other DNA
aagtctgtgcgcttttacctggtcgtcagccctgccagtgcctccactcagacatcttggaccccaagggaccttgtgtcctctcagacacagacacagtcctgcgtgccaccaactgctggcgcaagacaggctccagagtctcccagcacaatccccgtcccttctcagccccagaactccacacttaggccaggaccagctgctccaatcgcactggtcccagtgttctgcggactgctggttgccaagtctctggtgctgagcgcactcctcgtttggtggggcgatatttggtggaaaacgatgatggaattgagatccctcgatacgcagaaagccacatgccaccttcagcaagtcacagacttgccttggaccagcgtcagctctcccgtggaacgggaaattctgtatcatacagtggcccgcaccaagatttccgacgatgacgacgagcacacactg

SEQ ID NO: 4035 - DNA, 297 bp, synthetic construct
  source 1..297: mol_type = other DNA
cagagcaaggctcaggttctccagagtgtggcaggccagactctgactgtcagatgccagtatccaccaacaggctccctctatgagaaaaaaggatggtgtaaagaggcttctgccctcgtctgcatccggctggttacctctagcaagcccagaactatggcctggacatcccggtttacaatctgggatgaccctgatgccggatttttcacagtgacaatgacggatctgcgcgaggaagattccgggcactattggtgtagaatctacaggccctccgacaactccgtgtct

SEQ ID NO: 4036 - DNA, 216 bp, synthetic construct
  source 1..216: mol_type = other DNA
aagtctgtgcgcttttacctggtcgtcagccctgccagtgcctccactcagacatcttggaccccaagggaccttgtgtcctctcagacacagacacagtcctgcgtgccaccaactgctggcgcaagacaggctccagagtctcccagcacaatccccgtcccttctcagccccagaactccacacttaggccaggaccagctgctccaatcgca

SEQ ID NO: 4037 - DNA, 63 bp, synthetic construct
  source 1..63: mol_type = other DNA
ctggtcccagtgttctgcggactgctggttgccaagtctctggtgctgagcgcactcctcgtt

SEQ ID NO: 4038 - DNA, 189 bp, synthetic construct
  source 1..189: mol_type = other DNA
tggtggggcgatatttggtggaaaacgatgatggaattgagatccctcgatacgcagaaagccacatgccaccttcagcaagtcacagacttgccttggaccagcgtcagctctcccgtggaacgggaaattctgtatcatacagtggcccgcaccaagatttccgacgatgacgacgagcacacactg

SEQ ID NO: 4039 - DNA, 849 bp, synthetic construct
  source 1..849: mol_type = other DNA
cagcagcagacactgcccaagcctttcatttgggccgagcctcacttcatggtgcccaaagaaaagcaagtgaccatctgctgccagggcaactacggcgctgtggaataccagctgcacttcgagggaagcctgttcgccgtggacagacctaagcctcctgagcggatcaacaaggtgcagttctacatccccgacatgaacagccggatggccggacagtacagctgcatctatagagtgggcgagctttggagcgagcccagcaatctgctggatctggtggtcaccgagatgtacgacacccctacactgagcgtgcaccccggacctgaagtgatctctggcgagaaagtgaccttctactgtcggctggataccgccaccagcatgtttctgctgctcaaagaaggccggtccagccacgtgcagcgcggatatggaaaagtgcaggccgagtttcccctgggacctgtgacaacagcccacagaggcacctacagatgcttcggcagctacaacaaccacgcttggagcttccctagcgagcccgtgaagttgcttgtgaccggcgacatcgagaacaccagtctggcccctgaggaccctacctttcctgccgatacctggggcacctacctgctgaccacagagacaggactccagaaagatcacgccctgtgggaccacacagcccagaacctgctgagaatgggcctcgcctttctggtgctggttgccctcgtgtggttcctggtggaagattggctgagccggaagcggacaagagagagagccagcagagcctctacctgggagggaagaagaaggctgaacacccagacactt

SEQ ID NO: 4040 - DNA, 558 bp, synthetic construct
  source 1..558: mol_type = other DNA
gagatgtacgacacccctacactgagcgtgcaccccggacctgaagtgatctctggcgagaaagtgaccttctactgtcggctggataccgccaccagcatgtttctgctgctcaaagaaggccggtccagccacgtgcagcgcggatatggaaaagtgcaggccgagtttcccctgggacctgtgacaacagcccacagaggcacctacagatgcttcggcagctacaacaaccacgcttggagcttccctagcgagcccgtgaagttgcttgtgaccggcgacatcgagaacaccagtctggcccctgaggaccctacctttcctgccgatacctggggcacctacctgctgaccacagagacaggactccagaaagatcacgccctgtgggaccacacagcccagaacctgctgagaatgggcctcgcctttctggtgctggttgccctcgtgtggttcctggtggaagattggctgagccggaagcggacaagagagagagccagcagagcctctacctgggagggaagaagaaggctgaacacccagacactt

SEQ ID NO: 4041 - DNA, 528 bp, synthetic construct
  source 1..528: mol_type = other DNA
caccccggacctgaagtgatctctggcgagaaagtgaccttctactgtcggctggataccgccaccagcatgtttctgctgctcaaagaaggccggtccagccacgtgcagcgcggatatggaaaagtgcaggccgagtttcccctgggacctgtgacaacagcccacagaggcacctacagatgcttcggcagctacaacaaccacgcttggagcttccctagcgagcccgtgaagttgcttgtgaccggcgacatcgagaacaccagtctggcccctgaggaccctacctttcctgccgatacctggggcacctacctgctgaccacagagacaggactccagaaagatcacgccctgtgggaccacacagcccagaacctgctgagaatgggcctcgcctttctggtgctggttgccctcgtgtggttcctggtggaagattggctgagccggaagcggacaagagagagagccagcagagcctctacctgggagggaagaagaaggctgaacacccagacactt

SEQ ID NO: 4042 - DNA, 279 bp, synthetic construct
  source 1..279: mol_type = other DNA
ggcgacatcgagaacaccagtctggcccctgaggaccctacctttcctgccgatacctggggcacctacctgctgaccacagagacaggactccagaaagatcacgccctgtgggaccacacagcccagaacctgctgagaatgggcctcgcctttctggtgctggttgccctcgtgtggttcctggtggaagattggctgagccggaagcggacaagagagagagccagcagagcctctacctgggagggaagaagaaggctgaacacccagacactt

SEQ ID NO: 4043 - DNA, 291 bp, synthetic construct
  source 1..291: mol_type = other DNA
cagcagcagacactgcccaagcctttcatttgggccgagcctcacttcatggtgcccaaagaaaagcaagtgaccatctgctgccagggcaactacggcgctgtggaataccagctgcacttcgagggaagcctgttcgccgtggacagacctaagcctcctgagcggatcaacaaggtgcagttctacatccccgacatgaacagccggatggccggacagtacagctgcatctatagagtgggcgagctttggagcgagcccagcaatctgctggatctggtggtcacc

SEQ ID NO: 4044 - DNA, 30 bp, synthetic construct
  source 1..30: mol_type = other DNA
gagatgtacgacacccctacactgagcgtg

SEQ ID NO: 4045 - DNA, 249 bp, synthetic construct
  source 1..249: mol_type = other DNA
caccccggacctgaagtgatctctggcgagaaagtgaccttctactgtcggctggataccgccaccagcatgtttctgctgctcaaagaaggccggtccagccacgtgcagcgcggatatggaaaagtgcaggccgagtttcccctgggacctgtgacaacagcccacagaggcacctacagatgcttcggcagctacaacaaccacgcttggagcttccctagcgagcccgtgaagttgcttgtgacc

SEQ ID NO: 4046 - DNA, 141 bp, synthetic construct
  source 1..141: mol_type = other DNA
ggcgacatcgagaacaccagtctggcccctgaggaccctacctttcctgccgatacctggggcacctacctgctgaccacagagacaggactccagaaagatcacgccctgtgggaccacacagcccagaacctgctgaga

SEQ ID NO: 4047 - DNA, 63 bp, synthetic construct
  source 1..63: mol_type = other DNA
atgggcctcgcctttctggtgctggttgccctcgtgtggttcctggtggaagattggctgagc

SEQ ID NO: 4048 - DNA, 75 bp, synthetic construct
  source 1..75: mol_type = other DNA
cggaagcggacaagagagagagccagcagagcctctacctgggagggaagaagaaggctgaacacccagacactt

SEQ ID NO: 4049 - DNA, 849 bp, synthetic construct
  source 1..849: mol_type = other DNA
caacaacagaccctgcctaaaccattcatctgggctgaaccccactttatggttccgaaagagaaacaagtcacgatttgttgccaagggaattacggggccgtcgagtatcagctccactttgagggctccctgtttgctgtggatcggcccaagccacctgaaagaatcaacaaagtccaattctatattcctgatatgaactcccgcatggcaggccagtattcatgtatctaccgcgtgggagaactttggagtgaaccctctaacctgctggacctcgtcgtgacagagatgtatgatacacccacactgtctgtgcaccctgggccagaagttatcagcggagaaaaagttaccttttattgccgcctcgataccgctacctctatgttcctcttgctgaaagagggccgcagctctcacgtgcagcgaggctacggaaaggtccaagctgagtttcctctcggccccgtgaccaccgctcacaggggcacatatagatgttttggctcttataacaatcatgcctggtcattcccatccgagcctgtgaaactgctggtcacaggcgatattgagaatacctctctggccccagaagatcctacattccccgccgacacatggggaacatatctgctgacaaccgaaaccgggctgcaaaaggaccatgctctgtgggatcataccgctcagaatctgcttcggatggggcttgcattcctggtcctggtggctcttgtctggtttctggtcgaggactggctgtcccggaagagaaccagagaaagagcttccagggccagcacctgggaaggcagacgcagactgaatactcagaccctg

SEQ ID NO: 4050 - DNA, 558 bp, synthetic construct
  source 1..558: mol_type = other DNA
gagatgtatgatacacccacactgtctgtgcaccctgggccagaagttatcagcggagaaaaagttaccttttattgccgcctcgataccgctacctctatgttcctcttgctgaaagagggccgcagctctcacgtgcagcgaggctacggaaaggtccaagctgagtttcctctcggccccgtgaccaccgctcacaggggcacatatagatgttttggctcttataacaatcatgcctggtcattcccatccgagcctgtgaaactgctggtcacaggcgatattgagaatacctctctggccccagaagatcctacattccccgccgacacatggggaacatatctgctgacaaccgaaaccgggctgcaaaaggaccatgctctgtgggatcataccgctcagaatctgcttcggatggggcttgcattcctggtcctggtggctcttgtctggtttctggtcgaggactggctgtcccggaagagaaccagagaaagagcttccagggccagcacctgggaaggcagacgcagactgaatactcagaccctg

SEQ ID NO: 4051 - DNA, 531 bp, synthetic construct
  source 1..531: mol_type = other DNA
gtgcaccctgggccagaagttatcagcggagaaaaagttaccttttattgccgcctcgataccgctacctctatgttcctcttgctgaaagagggccgcagctctcacgtgcagcgaggctacggaaaggtccaagctgagtttcctctcggccccgtgaccaccgctcacaggggcacatatagatgttttggctcttataacaatcatgcctggtcattcccatccgagcctgtgaaactgctggtcacaggcgatattgagaatacctctctggccccagaagatcctacattccccgccgacacatggggaacatatctgctgacaaccgaaaccgggctgcaaaaggaccatgctctgtgggatcataccgctcagaatctgcttcggatggggcttgcattcctggtcctggtggctcttgtctggtttctggtcgaggactggctgtcccggaagagaaccagagaaagagcttccagggccagcacctgggaaggcagacgcagactgaatactcagaccctg

SEQ ID NO: 4052 - DNA, 279 bp, synthetic construct
  source 1..279: mol_type = other DNA
ggcgatattgagaatacctctctggccccagaagatcctacattccccgccgacacatggggaacatatctgctgacaaccgaaaccgggctgcaaaaggaccatgctctgtgggatcataccgctcagaatctgcttcggatggggcttgcattcctggtcctggtggctcttgtctggtttctggtcgaggactggctgtcccggaagagaaccagagaaagagcttccagggccagcacctgggaaggcagacgcagactgaatactcagaccctg

SEQ ID NO: 4053 - DNA, 291 bp, synthetic construct
  source 1..291: mol_type = other DNA
caacaacagaccctgcctaaaccattcatctgggctgaaccccactttatggttccgaaagagaaacaagtcacgatttgttgccaagggaattacggggccgtcgagtatcagctccactttgagggctccctgtttgctgtggatcggcccaagccacctgaaagaatcaacaaagtccaattctatattcctgatatgaactcccgcatggcaggccagtattcatgtatctaccgcgtgggagaactttggagtgaaccctctaacctgctggacctcgtcgtgaca

SEQ ID NO: 4054 - DNA, 30 bp, synthetic construct
  source 1..30: mol_type = other DNA
gagatgtatgatacacccacactgtctgtg

SEQ ID NO: 4055 - DNA, 249 bp, synthetic construct
  source 1..249: mol_type = other DNA
caccctgggccagaagttatcagcggagaaaaagttaccttttattgccgcctcgataccgctacctctatgttcctcttgctgaaagagggccgcagctctcacgtgcagcgaggctacggaaaggtccaagctgagtttcctctcggccccgtgaccaccgctcacaggggcacatatagatgttttggctcttataacaatcatgcctggtcattcccatccgagcctgtgaaactgctggtcaca

SEQ ID NO: 4056 - DNA, 141 bp, synthetic construct
  source 1..141: mol_type = other DNA
ggcgatattgagaatacctctctggccccagaagatcctacattccccgccgacacatggggaacatatctgctgacaaccgaaaccgggctgcaaaaggaccatgctctgtgggatcataccgctcagaatctgcttcgg

SEQ ID NO: 4057 - DNA, 63 bp, synthetic construct
  source 1..63: mol_type = other DNA
atggggcttgcattcctggtcctggtggctcttgtctggtttctggtcgaggactggctgtcc

SEQ ID NO: 4058 - DNA, 75 bp, synthetic construct
  source 1..75: mol_type = other DNA
cggaagagaaccagagaaagagcttccagggccagcacctgggaaggcagacgcagactgaatactcagaccctg

SEQ ID NO: 4059 - DNA, 714 bp, synthetic construct
  source 1..714: mol_type = other DNA
ggcatgcggactgaagacctcccaaaggctgtggtgttcctggagcctcaatggtacagggtgctggagaaggacagtgtgactctgaagtgccagggagcctactcccctgaggacaattccacacagtggtttcacaatgagagcctcatctcaagccaggcctccagctacttcattgacgctgccacagtggacgacagtggagagtacaggtgccagacaaacctctccaccctcagtgacccggtgcagctagaagtccatatcggctggctgttgctccaggcccctcggtgggtgttcaaggaggaagaccctattcacctgaggtgtcacagctggaagaacactgctctgcataaggtcacatatttacagaatggcaaaggcaggaagtattttcatcataattctgacttctacattccaaaagccacactcaaagacagcggctcctacttctgcagggggcttgttgggagtaaaaatgtgtcttcagagactgtgaacatcaccatcactcaaggtttggcagtgtcaaccatctcatcattctttccacctggctaccaagtgtccttctgcctggtcatggtgctgctgttcgccgtggataccggcctgtacttcagcgtcaagaccaacatccggtccagcaccagagactggaaggaccacaagttcaagtggcggaaggaccctcaggacaag

SEQ ID NO: 4060 - DNA, 714 bp, synthetic construct
  source 1..714: mol_type = other DNA
ggcatgagaaccgaggacctgcctaaggccgtggtgttcctggaaccccagtggtacagagtgctggaaaaggacagcgtgaccctgaagtgccagggcgcctacagccccgaggacaatagcacccagtggttccacaacgagagcctgatctccagccaggccagcagctacttcatcgacgccgccaccgtggacgacagcggcgagtatagatgccagaccaacctgagcaccctgagcgaccccgtgcagctggaagtgcacatcggatggctgctgctgcaggcccccagatgggtgttcaaagaagaggaccccatccacctgagatgccactcttggaagaacaccgccctgcacaaagtgacctacctgcagaacggcaagggcagaaagtacttccaccacaacagcgacttctacatccccaaggccaccctgaaggactccggctcctacttctgcagaggcctcgtgggcagcaagaacgtgtccagcgagacagtgaacatcaccatcacccagggcctggccgtgtctaccatcagcagctttttcccacccggctaccaggtgtccttctgcctcgtgatggtgctgctgttcgccgtggacaccggcctgtacttcagcgtgaaaacaaacatccggtccagcaccagagactggaaggaccacaagttcaagtggcggaaggacccccaggacaag

SEQ ID NO: 4061 - DNA, 714 bp, synthetic construct; identical to SEQ ID NO: 3896
  source 1..714: mol_type = other DNA

SEQ ID NO: 4062 - DNA, 267 bp, synthetic construct
  source 1..267: mol_type = other DNA
atgattcctgccgtggtgctgctgctcctgctgctggttgaacaagctgccgctctgggatccctgggagagcctcagctgtgctatatcctggacgccatcctgtttctgtacggcatcgtgctgaccctgctgtactgccggctgaagatccaagtgcggaaggccgccatcaccagctacgagaaatccgacggcgtgtacaccggcctgagcaccagaaatcaagagacatacgagacactgaagcacgaaaagcctccacaa

SEQ ID NO: 4063 - DNA, 204 bp, synthetic construct
  source 1..204: mol_type = other DNA
ctgggagagcctcagctgtgctatatcctggacgccatcctgtttctgtacggcatcgtgctgaccctgctgtactgccggctgaagatccaagtgcggaaggccgccatcaccagctacgagaaatccgacggcgtgtacaccggcctgagcaccagaaatcaagagacatacgagacactgaagcacgaaaagcctccacaa

SEQ ID NO: 4064 - DNA, 267 bp, synthetic construct
  source 1..267: mol_type = other DNA
atgatccctgctgttgtcctcctcctgcttctgctggtcgagcaagcagcagctctcggtaccctcggagaaccacagctctgttacattctggatgctatcctgttcctctatgggatcgtcctgacactcctgtattgcagactcaaaattcaagttcgcaaagccgccattacctcttacgagaagagtgatggggtgtacacaggactgtctacccggaatcaagaaacctacgaaaccctcaaacatgagaagccacctcag

SEQ ID NO: 4065 - DNA, 204 bp, synthetic construct
  source 1..204: mol_type = other DNA
ctcggagaaccacagctctgttacattctggatgctatcctgttcctctatgggatcgtcctgacactcctgtattgcagactcaaaattcaagttcgcaaagccgccattacctcttacgagaagagtgatggggtgtacacaggactgtctacccggaatcaagaaacctacgaaaccctcaaacatgagaagccacctcag

SEQ ID NO: 4066 - DNA, 267 bp, synthetic construct
  source 1..267: mol_type = other DNA
atgattcctgccgtggtgctgctgctcctgctgctggttgaacaagctgccgctctgggatccctgggagagcctcagctgagctatatcctggacgccatcctgtttctgtacggcatcgtgctgaccctgctgtactgccggctgaagatccaagtgcggaaggccgccatcaccagctacgagaaatccgacggcgtgtacaccggcctgagcaccagaaatcaagagacatacgagacactgaagcacgaaaagcctccacaa

SEQ ID NO: 4067 - DNA, 204 bp, synthetic construct
  source 1..204: mol_type = other DNA
ctgggagagcctcagctgagctatatcctggacgccatcctgtttctgtacggcatcgtgctgaccctgctgtactgccggctgaagatccaagtgcggaaggccgccatcaccagctacgagaaatccgacggcgtgtacaccggcctgagcaccagaaatcaagagacatacgagacactgaagcacgaaaagcctccacaa

SEQ ID NO: 4068 - DNA, 267 bp, synthetic construct
  source 1..267: mol_type = other DNA
atgatccctgctgttgtcctcctcctgcttctgctggtcgagcaagcagcagctctcggtaccctcggagaaccacagctctcttacattctggatgctatcctgttcctctatgggatcgtcctgacactcctgtattgcagactcaaaattcaagttcgcaaagccgccattacctcttacgagaagagtgatggggtgtacacaggactgtctacccggaatcaagaaacctacgaaaccctcaaacatgagaagccacctcag

SEQ ID NO: 4069 - DNA, 204 bp, synthetic construct
  source 1..204: mol_type = other DNA
ctcggagaaccacagctctcttacattctggatgctatcctgttcctctatgggatcgtcctgacactcctgtattgcagactcaaaattcaagttcgcaaagccgccattacctcttacgagaagagtgatggggtgtacacaggactgtctacccggaatcaagaaacctacgaaaccctcaaacatgagaagccacctcag

SEQ ID NO: 4070 - DNA, 450 bp, synthetic construct
  source 1..450: mol_type = other DNA
cagagcttcggcctgctggaccccaagctgagctacctgctggatggcatcctgttcatctacggcgtgatcctgaccgccctgttcctgtggcggcggaagcggaaagagaagcagtctgagacaagccccaaagagttcctgaccatctacgaggacgtgaaggacctgaaaacccggcggaaccacgaacaagagcagacctttcctggcggaggcagcaccatctacagcatgatccagagccagagcagcgcccctacaagccaagagcctgcctacacactgtactccctgatccagcctagcagaaagagcggcagccggaagagaaatcacagccccagcttcaacagcacgatctacgaagtgatcggcaagagccagccaaaggctcagaaccctgccagactgagccggaaagagctggaaaacttcgacgtgtacagc

SEQ ID NO: 4071 - DNA, 360 bp, synthetic construct
  source 1..360: mol_type = other DNA
tggcggcggaagcggaaagagaagcagtctgagacaagccccaaagagttcctgaccatctacgaggacgtgaaggacctgaaaacccggcggaaccacgaacaagagcagacctttcctggcggaggcagcaccatctacagcatgatccagagccagagcagcgcccctacaagccaagagcctgcctacacactgtactccctgatccagcctagcagaaagagcggcagccggaagagaaatcacagccccagcttcaacagcacgatctacgaagtgatcggcaagagccagccaaaggctcagaaccctgccagactgagccggaaagagctggaaaacttcgacgtgtacagc

SEQ ID NO: 4072 - DNA, 456 bp, synthetic construct
  source 1..456: mol_type = other DNA
cagagttttgggttgttggaccctaaattgagctatctgttggacggaatcctgttcatttacggagtgatcctgaccgcattgttcctgtggcgacgcaagcgcaaagaaaagcaaagcgagacaagcccaaaagaatttctcactatatacgaggacgtgaaagatttgaagacgaggcggaatcatgagcaagagcagacatttcctggcgggggctctactatctactcaatgattcaatcccaaagctccgctccgacttcccaagagcccgcttacactctctactcactgatacagccttcaagaaaatcaggctctcggaaacggaatcattccccatccttcaatagtaccatctatgaagtaatcggtaagagtcaacctaaagctcaaaaccccgctcgcttgagccgcaaggagctggaaaacttcgatgtatatagctctaga

SEQ ID NO: 4073 - DNA, 360 bp, synthetic construct
  source 1..360: mol_type = other DNA
tggcgacgcaagcgcaaagaaaagcaaagcgagacaagcccaaaagaatttctcactatatacgaggacgtgaaagatttgaagacgaggcggaatcatgagcaagagcagacatttcctggcgggggctctactatctactcaatgattcaatcccaaagctccgctccgacttcccaagagcccgcttacactctctactcactgatacagccttcaagaaaatcaggctctcggaaacggaatcattccccatccttcaatagtaccatctatgaagtaatcggtaagagtcaacctaaagctcaaaaccccgctcgcttgagccgcaaggagctggaaaacttcgatgtatatagc

SEQ ID NO: 4074 - DNA, 597 bp, synthetic construct
  source 1..597: mol_type = other DNA
gcaaagcccaccacgactccagcgccgcgaccaccaacaccggcgcccactatcgcgtcgcagcccctgtccctgagaccagaggcgtgtagaccagcggctggaggcgcagtgcacacgagggggctggacttcgcctgtgacagcaacctgtttgtggcctcttggatcgccgtgatgattatcttcagaatcggaatggccgtggctatcttctgctgcttcttcttcccatcctggcggcggaagcggaaagagaagcagtctgagacaagccccaaagagttcctgaccatctacgaggacgtgaaggacctgaaaacccggcggaaccacgaacaagagcagacctttcctggcggaggcagcaccatctacagcatgatccagagccagagcagcgcccctacaagccaagagcctgcctacacactgtactccctgatccagcctagcagaaagagcggcagccggaagagaaatcacagccccagcttcaacagcacgatctacgaagtgatcggcaagagccagccaaaggctcagaaccctgccagactgagccggaaagagctggaaaacttcgacgtgtacagc

SEQ ID NO: 4075 - DNA, 144 bp, synthetic construct
  source 1..144: mol_type = other DNA
gcaaagcccaccacgactccagcgccgcgaccaccaacaccggcgcccactatcgcgtcgcagcccctgtccctgagaccagaggcgtgtagaccagcggctggaggcgcagtgcacacgagggggctggacttcgcctgtgac

SEQ ID NO: 4076 - DNA, 93 bp, synthetic construct
  source 1..93: mol_type = other DNA
agcaacctgtttgtggcctcttggatcgccgtgatgattatcttcagaatcggaatggccgtggctatcttctgctgcttcttcttcccatcc

SEQ ID NO: 4077 - DNA, 360 bp, synthetic construct; identical to SEQ ID NO: 4071
  source 1..360: mol_type = other DNA

SEQ ID NO: 4078 - DNA, 597 bp, synthetic construct
  source 1..597: mol_type = other DNA
gctaagccaaccaccacgccagctcctagacctcctacaccagctcctacaatcgccagccagcctctgtctctcagacccgaagcctgcagacctgctgctggcggagctgtgcataccagaggactggatttcgcctgcgattccaatctgttcgtggcaagctggattgccgtcatgataattttccgcattggaatggctgtcgcaatcttttgttgtttcttctttccctcctggcgacgcaagcgcaaagaaaagcaaagcgagacaagcccaaaagaatttctcactatatacgaggacgtgaaagatttgaagacgaggcggaatcatgagcaagagcagacatttcctggcgggggctctactatctactcaatgattcaatcccaaagctccgctccgacttcccaagagcccgcttacactctctactcactgatacagccttcaagaaaatcaggctctcggaaacggaatcattccccatccttcaatagtaccatctatgaagtaatcggtaagagtcaacctaaagctcaaaaccccgctcgcttgagccgcaaggagctggaaaacttcgatgtatatagc

SEQ ID NO: 4079 - DNA, 144 bp, synthetic construct
  source 1..144: mol_type = other DNA
gctaagccaaccaccacgccagctcctagacctcctacaccagctcctacaatcgccagccagcctctgtctctcagacccgaagcctgcagacctgctgctggcggagctgtgcataccagaggactggatttcgcctgcgat

SEQ ID NO: 4080 - DNA, 93 bp, synthetic construct
  source 1..93: mol_type = other DNA
tccaatctgttcgtggcaagctggattgccgtcatgataattttccgcattggaatggctgtcgcaatcttttgttgtttcttctttccctcc

SEQ ID NO: 4081 - DNA, 360 bp, synthetic construct; identical to SEQ ID NO: 4073
  source 1..360: mol_type = other DNA

SEQ ID NO: 4082 - DNA, 597 bp, synthetic construct
  source 1..597: mol_type = other DNA
gcaaagcccaccacgactccagcgccgcgaccaccaacaccggcgcccactatcgcgtcgcagcccctgtccctgagaccagaggcggccagaccagcggctggaggcgcagtgcacacgagggggctggacttcgcctgtgacagcaacctgtttgtggcctcttggatcgccgtgatgattatcttcagaatcggaatggccgtggctatcttctgctgcttcttcttcccatcctggcggcggaagcggaaagagaagcagtctgagacaagccccaaagagttcctgaccatctacgaggacgtgaaggacctgaaaacccggcggaaccacgaacaagagcagacctttcctggcggaggcagcaccatctacagcatgatccagagccagagcagcgcccctacaagccaagagcctgcctacacactgtactccctgatccagcctagcagaaagagcggcagccggaagagaaatcacagccccagcttcaacagcacgatctacgaagtgatcggcaagagccagccaaaggctcagaaccctgccagactgagccggaaagagctggaaaacttcgacgtgtacagc

SEQ ID NO: 4083 - DNA, 144 bp, synthetic construct
  source 1..144: mol_type = other DNA
gcaaagcccaccacgactccagcgccgcgaccaccaacaccggcgcccactatcgcgtcgcagcccctgtccctgagaccagaggcggccagaccagcggctggaggcgcagtgcacacgagggggctggacttcgcctgtgac

SEQ ID NO: 4084 - DNA, 597 bp, synthetic construct
  source 1..597: mol_type = other DNA
gctaagccaaccaccacgccagctcctagacctcctacaccagctcctacaatcgccagccagcctctgtctctcagacccgaagccgcgagacctgctgctggcggagctgtgcataccagaggactggatttcgcctgcgattccaatctgttcgtggcaagctggattgccgtcatgataattttccgcattggaatggctgtcgcaatcttttgttgtttcttctttccctcctggcgacgcaagcgcaaagaaaagcaaagcgagacaagcccaaaagaatttctcactatatacgaggacgtgaaagatttgaagacgaggcggaatcatgagcaagagcagacatttcctggcgggggctctactatctactcaatgattcaatcccaaagctccgctccgacttcccaagagcccgcttacactctctactcactgatacagccttcaagaaaatcaggctctcggaaacggaatcattccccatccttcaatagtaccatctatgaagtaatcggtaagagtcaacctaaagctcaaaaccccgctcgcttgagccgcaaggagctggaaaacttcgatgtatatagc

SEQ ID NO: 4085 - DNA, 144 bp, synthetic construct
  source 1..144: mol_type = other DNA
gctaagccaaccaccacgccagctcctagacctcctacaccagctcctacaatcgccagccagcctctgtctctcagacccgaagccgcgagacctgctgctggcggagctgtgcataccagaggactggatttcgcctgcgat

SEQ ID NO: 4086 - DNA, 267 bp, synthetic construct
  source 1..267: mol_type = other DNA
ggcatgcggactgaagacctcccaaaggctgtggtgttcctggagcctcaatggtacagggtgctggagaaggacagtgtgactctgaagtgccagggagcctactcccctgaggacaattccacacagtggtttcacaatgagagcctcatctcaagccaggcctccagctacttcattgacgctgccacagtggacgacagtggagagtacaggtgccagacaaacctctccaccctcagtgacccggtgcagctagaagtccat

SEQ ID NO: 4087 - DNA, 252 bp, synthetic construct
  source 1..252: mol_type = other DNA
atcggctggctgttgctccaggcccctcggtgggtgttcaaggaggaagaccctattcacctgaggtgtcacagctggaagaacactgctctgcataaggtcacatatttacagaatggcaaaggcaggaagtattttcatcataattctgacttctacattccaaaagccacactcaaagacagcggctcctacttctgcagggggcttgttgggagtaaaaatgtgtcttcagagactgtgaacatcacc

SEQ ID NO: 4088 - DNA, 42 bp, synthetic construct
  source 1..42: mol_type = other DNA
atcggctggctgttgctccaggcccctcggtgggtgttcaag

SEQ ID NO: 4089 - DNA, 210 bp, synthetic construct
  source 1..210: mol_type = other DNA
gaggaagaccctattcacctgaggtgtcacagctggaagaacactgctctgcataaggtcacatatttacagaatggcaaaggcaggaagtattttcatcataattctgacttctacattccaaaagccacactcaaagacagcggctcctacttctgcagggggcttgttgggagtaaaaatgtgtcttcagagactgtgaacatcacc

SEQ ID NO: 4090 - DNA, 51 bp, synthetic construct
  source 1..51: mol_type = other DNA
atcactcaaggtttggcagtgtcaaccatctcatcattctttccacctggc

SEQ ID NO: 4091 - DNA, 69 bp, synthetic construct
  source 1..69: mol_type = other DNA
taccaagtgtccttctgcctggtcatggtgctgctgttcgccgtggataccggcctgtacttcagcgtc

SEQ ID NO: 4092 - DNA, 75 bp, synthetic construct
  source 1..75: mol_type = other DNA
aagaccaacatccggtccagcaccagagactggaaggaccacaagttcaagtggcggaaggaccctcaggacaag

SEQ ID NO: 4093 - DNA, 714 bp, synthetic construct; identical to SEQ ID NO: 4059
  source 1..714: mol_type = other DNA

SEQ ID NO: 4094 - DNA, 447 bp, synthetic construct
  source 1..447: mol_type = other DNA
atcggctggctgttgctccaggcccctcggtgggtgttcaaggaggaagaccctattcacctgaggtgtcacagctggaagaacactgctctgcataaggtcacatatttacagaatggcaaaggcaggaagtattttcatcataattctgacttctacattccaaaagccacactcaaagacagcggctcctacttctgcagggggcttgttgggagtaaaaatgtgtcttcagagactgtgaacatcaccatcactcaaggtttggcagtgtcaaccatctcatcattctttccacctggctaccaagtgtccttctgcctggtcatggtgctgctgttcgccgtggataccggcctgtacttcagcgtcaagaccaacatccggtccagcaccagagactggaaggaccacaagttcaagtggcggaaggaccctcaggacaag

SEQ ID NO: 4095 - DNA, 195 bp, synthetic construct
  source 1..195: mol_type = other DNA
atcactcaaggtttggcagtgtcaaccatctcatcattctttccacctggctaccaagtgtccttctgcctggtcatggtgctgctgttcgccgtggataccggcctgtacttcagcgtcaagaccaacatccggtccagcaccagagactggaaggaccacaagttcaagtggcggaaggaccctcaggacaag

SEQ ID NO: 4096 - DNA, 267 bp, synthetic construct
  source 1..267: mol_type = other DNA
ggaatgaggactgaggatcttcccaaagctgtcgtctttctcgaaccccaatggtatcgggtgctcgaaaaagactctgtgacactgaaatgccaaggggcctactctcccgaggacaactccacacagtggtttcataatgagtccctcatcagctctcaggccagctcttatttcattgatgccgctacagtggacgactccggcgagtatcggtgtcagaccaatctgtctacactgtctgaccccgtgcagcttgaggtccac

SEQ ID NO: 4097 - DNA, 252 bp, synthetic construct
  source 1..252: mol_type = other DNA
attggatggttgctcttgcaagccccacgctgggttttcaaagaggaagatccaatccatctgcggtgccacagctggaaaaacaccgctctccacaaagtcacatacctgcaaaatggcaaaggacgcaaatacttccatcacaattccgatttttacattccgaaggctaccctgaaagacagcggcagctatttctgccggggactcgtcggctccaagaatgtgtcctccgaaaccgtgaatatcacg

SEQ ID NO: 4098 - DNA, 42 bp, synthetic construct
  source 1..42: mol_type = other DNA
attggatggttgctcttgcaagccccacgctgggttttcaaa

SEQ ID NO: 4099 - DNA, 210 bp, synthetic construct
  source 1..210: mol_type = other DNA
gaggaagatccaatccatctgcggtgccacagctggaaaaacaccgctctccacaaagtcacatacctgcaaaatggcaaaggacgcaaatacttccatcacaattccgatttttacattccgaaggctaccctgaaagacagcggcagctatttctgccggggactcgtcggctccaagaatgtgtcctccgaaaccgtgaatatcacg

SEQ ID NO: 4100 - DNA, 51 bp, synthetic construct
  source 1..51: mol_type = other DNA
attacccaaggactggctgtgcctacaatctctagcttctttccgcctgga

SEQ ID NO: 4101 - DNA, 69 bp, synthetic construct
  source 1..69: mol_type = other DNA
taccaagtctccttctgtcttgtgatggtcctcctgtttgctgtggacacaggactgtacttttccgtg

SEQ ID NO: 4102 - DNA, 75 bp, synthetic construct
  source 1..75: mol_type = other DNA
aaaacgaacatccgcagctccacacgcgattggaaagatcacaagtttaaatggcgcaaagatccccaggacaag

SEQ ID NO: 4103 - DNA, 714 bp, synthetic construct; identical to SEQ ID NO: 3896
  source 1..714: mol_type = other DNA

SEQ ID NO: 4104 - DNA, 447 bp, synthetic construct
  source 1..447: mol_type = other DNA
attggatggttgctcttgcaagccccacgctgggttttcaaagaggaagatccaatccatctgcggtgccacagctggaaaaacaccgctctccacaaagtcacatacctgcaaaatggcaaaggacgcaaatacttccatcacaattccgatttttacattccgaaggctaccctgaaagacagcggcagctatttctgccggggactcgtcggctccaagaatgtgtcctccgaaaccgtgaatatcacgattacccaaggactggctgtgcctacaatctctagcttctttccgcctggataccaagtctccttctgtcttgtgatggtcctcctgtttgctgtggacacaggactgtacttttccgtgaaaacgaacatccgcagctccacacgcgattggaaagatcacaagtttaaatggcgcaaagatccccaggacaag

SEQ ID NO: 4105 - DNA, 195 bp, synthetic construct
  source 1..195: mol_type = other DNA
attacccaaggactggctgtgcctacaatctctagcttctttccgcctggataccaagtctccttctgtcttgtgatggtcctcctgtttgctgtggacacaggactgtacttttccgtgaaaacgaacatccgcagctccacacgcgattggaaagatcacaagtttaaatggcgcaaagatccccaggacaag

SEQ ID NO: 4106 - DNA, 267 bp, synthetic construct
  source 1..267: mol_type = other DNA
ggcatgagaaccgaggacctgcctaaggccgtggtgttcctggaaccccagtggtacagagtgctggaaaaggacagcgtgaccctgaagtgccagggcgcctacagccccgaggacaatagcacccagtggttccacaacgagagcctgatctccagccaggccagcagctacttcatcgacgccgccaccgtggacgacagcggcgagtatagatgccagaccaacctgagcaccctgagcgaccccgtgcagctggaagtgcac

SEQ ID NO: 4107 - DNA, 252 bp, synthetic construct
  source 1..252: mol_type = other DNA
atcggatggctgctgctgcaggcccccagatgggtgttcaaagaagaggaccccatccacctgagatgccactcttggaagaacaccgccctgcacaaagtgacctacctgcagaacggcaagggcagaaagtacttccaccacaacagcgacttctacatccccaaggccaccctgaaggactccggctcctacttctgcagaggcctcgtgggcagcaagaacgtgtccagcgagacagtgaacatcacc

SEQ ID NO: 4108 - DNA, 42 bp, synthetic construct
  source 1..42: mol_type = other DNA
atcggatggctgctgctgcaggcccccagatgggtgttcaaa

SEQ ID NO: 4109 - DNA, 210 bp, synthetic construct
  source 1..210: mol_type = other DNA
gaagaggaccccatccacctgagatgccactcttggaagaacaccgccctgcacaaagtgacctacctgcagaacggcaagggcagaaagtacttccaccacaacagcgacttctacatccccaaggccaccctgaaggactccggctcctacttctgcagaggcctcgtgggcagcaagaacgtgtccagcgagacagtgaacatcacc

SEQ ID NO: 4110 - DNA, 51 bp, synthetic construct
  source 1..51: mol_type = other DNA
atcacccagggcctggccgtgtctaccatcagcagctttttcccacccggc

SEQ ID NO: 4111 - DNA, 69 bp, synthetic construct
  source 1..69: mol_type = other DNA
taccaggtgtccttctgcctcgtgatggtgctgctgttcgccgtggacaccggcctgtacttcagcgtg

SEQ ID NO: 4112 - DNA, 75 bp, synthetic construct
  source 1..75: mol_type = other DNA
aaaacaaacatccggtccagcaccagagactggaaggaccacaagttcaagtggcggaaggacccccaggacaag

SEQ ID NO: 4113 - DNA, 714 bp, synthetic construct; identical to SEQ ID NO: 4060
  source 1..714: mol_type = other DNA

SEQ ID NO: 4114 - DNA, 447 bp, synthetic construct
  source 1..447: mol_type = other DNA
atcggatggctgctgctgcaggcccccagatgggtgttcaaagaagaggaccccatccacctgagatgccactcttggaagaacaccgccctgcacaaagtgacctacctgcagaacggcaagggcagaaagtacttccaccacaacagcgacttctacatccccaaggccaccctgaaggactccggctcctacttctgcagaggcctcgtgggcagcaagaacgtgtccagcgagacagtgaacatcaccatcacccagggcctggccgtgtctaccatcagcagctttttcccacccggctaccaggtgtccttctgcctcgtgatggtgctgctgttcgccgtggacaccggcctgtacttcagcgtgaaaacaaacatccggtccagcaccagagactggaaggaccacaagttcaagtggcggaaggacccccaggacaag

SEQ ID NO: 4115 - DNA, 195 bp, synthetic construct
  source 1..195: mol_type = other DNA
atcacccagggcctggccgtgtctaccatcagcagctttttcccacccggctaccaggtgtccttctgcctcgtgatggtgctgctgttcgccgtggacaccggcctgtacttcagcgtgaaaacaaacatccggtccagcaccagagactggaaggaccacaagttcaagtggcggaaggacccccaggacaag

SEQ ID NO: 4116 - DNA, 291 bp, synthetic construct
  source 1..291: mol_type = other DNA
gtggccgagggcaagaccgacaaccagtacaccctgtttgtggctggcggcacagttctgctgctgctgttcgtgatctccatcacgactatcatcgtgatctttctgaaccggcggaggcggagagagcggagggatctgtttacagagagctgggacacccagaaggcccctaacaactacagaagccccatcagcaccggccagcctaccaaccagagcatggacgatacccgcgaggacatctacgtgaactaccctaccttcagcagacggcccaagacaagagtt

SEQ ID NO: 4117 - DNA, 45 bp, synthetic construct
  source 1..45: mol_type = other DNA
gtggccgagggcaagaccgacaaccagtacaccctgtttgtggct

SEQ ID NO: 4118 - DNA, 63 bp, synthetic construct
  source 1..63: mol_type = other DNA
ggcggcacagttctgctgctgctgttcgtgatctccatcacgactatcatcgtgatctttctg

SEQ ID NO: 4119 - DNA, 183 bp, synthetic construct
  source 1..183: mol_type = other DNA
aaccggcggaggcggagagagcggagggatctgtttacagagagctgggacacccagaaggcccctaacaactacagaagccccatcagcaccggccagcctaccaaccagagcatggacgatacccgcgaggacatctacgtgaactaccctaccttcagcagacggcccaagacaagagtt

SEQ ID NO: 4120 - DNA, 291 bp, synthetic construct
  source 1..291: mol_type = other DNA
gtggctgaaggcaaaacagataatcagtacacactcttcgttgccggcggaaccgtgctgctcctgctctttgtgattagcatcacaacgattatcgtcatcttcctcaaccgcaggcggagaagagagaggcgcgatctgttcaccgagtcttgggatacacagaaagctccgaacaactatcggagccctatctccaccggacagcccacaaatcagtctatggacgacacacgcgaggacatctatgtcaattaccccactttttctaggcggcctaagaccagagtg

SEQ ID NO: 4121 - DNA, 45 bp, synthetic construct
  source 1..45: mol_type = other DNA
gtggctgaaggcaaaacagataatcagtacacactcttcgttgcc

SEQ ID NO: 4122 - DNA, 63 bp, synthetic construct
  source 1..63: mol_type = other DNA
ggcggaaccgtgctgctcctgctctttgtgattagcatcacaacgattatcgtcatcttcctc

SEQ ID NO: 4123 - DNA, 183 bp, synthetic construct
  source 1..183: mol_type = other DNA
aaccgcaggcggagaagagagaggcgcgatctgttcaccgagtcttgggatacacagaaagctccgaacaactatcggagccctatctccaccggacagcccacaaatcagtctatggacgacacacgcgaggacatctatgtcaattaccccactttttctaggcggcctaagaccagagtg

SEQ ID NO: 4124 - DNA, 1008 bp, synthetic construct
  source 1..1008: mol_type = other DNA
atggactaccccacactgctgctggctctgctgcatgtgtatagagccctgtgcgaagaggtgctgtggcacacctctgtgcccttcgccgagaacatgagcctggaatgcgtgtaccccagcatgggcatcctgacacaggtggaatggttcaagatcggcacccagcaggactctatcgccatcttcagccccacacacggcatggtcatcagaaagccttacgccgagcgggtgtacttcctgaacagcacaatggcctccaacaacatgaccctgttcttcagaaacgccagcgaggacgacgtgggctactacagctgttccctgtacacataccctcaaggcacctggcagaaagtgatccaggtggtgcagagcgacagcttcgaggctgccgtgcctagcaatagccacatcgtgtctgagcccggcaagaacgtgaccctgacttgccagcctcagatgacctggcctgtgcaggccgttagatgggagaagatccagcctcggcagatcgacctgctgacctactgcaatctggtgcacggcagaaacttcaccagcaagttccccagacagatcgtgtccaactgctcccacggacgttggagcgtgatcgtgatccctgatgtgaccgtgtccgacagcggcctgtatcggtgttacctgcaagcctctgccggcgagaacgagacattcgtgatgagactgacagtggccgagggcaagaccgacaaccagtacaccctgtttgtggctggcggcacagttctgctgctgctgttcgtgatctccatcacgactatcatcgtgatctttctgaaccggcggaggcggagagagcggagggatctgtttacagagagctgggacacccagaaggcccctaacaactacagaagccccatcagcaccggccagcctaccaaccagagcatggacgatacccgcgaggacatctacgtgaactaccctaccttcagcagacggcccaagacaagagtt

SEQ ID NO: 4125 - DNA, 954 bp, synthetic construct
  source 1..954: mol_type = other DNA
gaagaggtgctgtggcacacctctgtgcccttcgccgagaacatgagcctggaatgcgtgtaccccagcatgggcatcctgacacaggtggaatggttcaagatcggcacccagcaggactctatcgccatcttcagccccacacacggcatggtcatcagaaagccttacgccgagcgggtgtacttcctgaacagcacaatggcctccaacaacatgaccctgttcttcagaaacgccagcgaggacgacgtgggctactacagctgttccctgtacacataccctcaaggcacctggcagaaagtgatccaggtggtgcagagcgacagcttcgaggctgccgtgcctagcaatagccacatcgtgtctgagcccggcaagaacgtgaccctgacttgccagcctcagatgacctggcctgtgcaggccgttagatgggagaagatccagcctcggcagatcgacctgctgacctactgcaatctggtgcacggcagaaacttcaccagcaagttccccagacagatcgtgtccaactgctcccacggacgttggagcgtgatcgtgatccctgatgtgaccgtgtccgacagcggcctgtatcggtgttacctgcaagcctctgccggcgagaacgagacattcgtgatgagactgacagtggccgagggcaagaccgacaaccagtacaccctgtttgtggctggcggcacagttctgctgctgctgttcgtgatctccatcacgactatcatcgtgatctttctgaaccggcggaggcggagagagcggagggatctgtttacagagagctgggacacccagaaggcccctaacaactacagaagccccatcagcaccggccagcctaccaaccagagcatggacgatacccgcgaggacatctacgtgaactaccctaccttcagcagacggcccaagacaagagtt

SEQ ID NO: 4126 - DNA, 1008 bp, synthetic construct
  source 1..1008: mol_type = other DNA
atggattaccctactctgcttctcgccctcctgcacgtgtaccgggcactttgtgaagaagtgctctggcataccagcgtgccatttgccgagaatatgtcccttgagtgtgtgtacccctctatggggattctgacccaagtcgagtggtttaagattgggacgcagcaagacagcattgccatcttctctccaactcacggaatggttattcggaagccctatgccgagagagtctatttcctgaactctacgatggcaagcaacaatatgacgctgttttttcggaacgcctccgaggatgatgtggggtactattcctgtagcctgtacacctatccacaaggcacatggcaaaaagtcattcaagtggtccagtccgactccttcgaggccgcagttccaagcaactcccacatcgttagcgagcctgggaagaatgtcacactgacctgtcagccccaaatgacatggcccgtccaagctgtccgctgggagaaaattcagccaagacagattgatctcctcacctactgtaacctggttcatggccggaatttcacctccaagtttccacggcagattgtcagcaactgtagccacggacgttggagtgtcattgtgattccagacgtgacagtgtctgactccgggctgtacagatgctatctgcaagccagcgcaggcgaaaacgaaacctttgtgatgcggctgaccgtggctgaaggcaaaacagataatcagtacacactcttcgttgccggcggaaccgtgctgctcctgctctttgtgattagcatcacaacgattatcgtcatcttcctcaaccgcaggcggagaagagagaggcgcgatctgttcaccgagtcttgggatacacagaaagctccgaacaactatcggagccctatctccaccggacagcccacaaatcagtctatggacgacacacgcgaggacatctatgtcaattaccccactttttctaggcggcctaagaccagagtg

SEQ ID NO: 4127 - DNA, 954 bp, synthetic construct
  source 1..954: mol_type = other DNA
gaagaagtgctctggcataccagcgtgccatttgccgagaatatgtcccttgagtgtgtgtacccctctatggggattctgacccaagtcgagtggtttaagattgggacgcagcaagacagcattgccatcttctctccaactcacggaatggttattcggaagccctatgccgagagagtctatttcctgaactctacgatggcaagcaacaatatgacgctgttttttcggaacgcctccgaggatgatgtggggtactattcctgtagcctgtacacctatccacaaggcacatggcaaaaagtcattcaagtggtccagtccgactccttcgaggccgcagttccaagcaactcccacatcgttagcgagcctgggaagaatgtcacactgacctgtcagccccaaatgacatggcccgtccaagctgtccgctgggagaaaattcagccaagacagattgatctcctcacctactgtaacctggttcatggccggaatttcacctccaagtttccacggcagattgtcagcaactgtagccacggacgttggagtgtcattgtgattccagacgtgacagtgtctgactccgggctgtacagatgctatctgcaagccagcgcaggcgaaaacgaaacctttgtgatgcggctgaccgtggctgaaggcaaaacagataatcagtacacactcttcgttgccggcggaaccgtgctgctcctgctctttgtgattagcatcacaacgattatcgtcatcttcctcaaccgcaggcggagaagagagaggcgcgatctgttcaccgagtcttgggatacacagaaagctccgaacaactatcggagccctatctccaccggacagcccacaaatcagtctatggacgacacacgcgaggacatctatgtcaattaccccactttttctaggcggcctaagaccagagtg

SEQ ID NO: 4128 - DNA, 954 bp, synthetic construct
  source 1..954: mol_type = other DNA
gccgctctgggcaaagacacaatcccttggctgggccatctgcttgtgggactgtctggcgctttcggcttcatcatcctggtgtacctgctcatcaactgccggaacaccggaccttggctgaagaaagtgctgaagtgcaacacccctgatccgagcaagttctttagccagctgagcagcgagcatggcggcgacgttcagaaatggctgtctagcccatttcctagcagcagcttcagccctggtggactggcccctgagattagccctctggaagtgctggaacgggacaaagtgacccagctgctcctccagcaggataaggtgccagaacctgccagcctgtccagcaatcacagcctgaccagctgctttaccaaccagggctacttcttcttccatctgcctgacgcactggaaatcgaagcctgccaggtgtacttcacctacgatccctacagcgaagaggaccccgatgaaggtgttgccggtgctcctaccggaagctctcctcaacctctccaacctctgagcggcgaggatgacgcctactgcacattccccagcagagatgacctgctgctgttcagcccttctctgctcggtggaccttctccaccttctacagcacctggcggatctggcgctggcgaggaaagaatgcctccatctctgcaagagcgggtgcccagagattgggaccctcaaccacttggccctccaacacctggtgtccccgacctggttgatttccagcctcctcctgaactggtgctgagagaagccggcgaagaagtgccagacgccggacctagagagggcgttagctttccttggagcagacctcctggacaaggcgagttcagagccctgaatgccagactgcctctgaacaccgatgcctacctgagtctgcaagaactgcaaggacaggaccccactcacctggtt

SEQ ID NO: 4129 - DNA, 348 bp, synthetic construct
  source 1..348: mol_type = other DNA
aaccccttcctgttcgccctggaagccgtggttatcagcgtgggctctatgggcctgattatctccctgctgtgcgtgtacttctggctggaacggaccatgccaagaatccccacactgaagaaccttgaggacctggtcaccgagtaccacggcaacttttctgcttggagcggcgtgtccaaaggactggccgaatctctccagcctgactacagcgagagactgtgcctggtgtctgagatccctcctaaaggcggagccctcggagaaggacctggcgcttctccatgtaaccagcacagcccttactgggctcctccttgctacaccctgaagcctgagaca

SEQ ID NO: 4130 - DNA, 324 bp, synthetic construct; identical to SEQ ID NO: 4015
  source 1..324: mol_type = other DNA

SEQ ID NO: 4131 - DNA, 324 bp, synthetic construct; identical to SEQ ID NO: 4021
  source 1..324: mol_type = other DNA

SEQ ID NO: 4132 - DNA, 297 bp, synthetic construct; identical to SEQ ID NO: 4028
  source 1..297: mol_type = other DNA

SEQ ID NO: 4133 - DNA, 189 bp, synthetic construct; identical to SEQ ID NO: 4031
  source 1..189: mol_type = other DNA

SEQ ID NO: 4134 - DNA, 291 bp, synthetic construct; identical to SEQ ID NO: 4043
  source 1..291: mol_type = other DNA

SEQ ID NO: 4135 - DNA, 249 bp, synthetic construct; identical to SEQ ID NO: 4045
  source 1..249: mol_type = other DNA

SEQ ID NO: 4136 - DNA, 570 bp, synthetic construct
  source 1..570: mol_type = other DNA
cagcagcagacactgcccaagcctttcatttgggccgagcctcacttcatggtgcccaaagaaaagcaagtgaccatctgctgccagggcaactacggcgctgtggaataccagctgcacttcgagggaagcctgttcgccgtggacagacctaagcctcctgagcggatcaacaaggtgcagttctacatccccgacatgaacagccggatggccggacagtacagctgcatctatagagtgggcgagctttggagcgagcccagcaatctgctggatctggtggtcaccgagatgtacgacacccctacactgagcgtgcaccccggacctgaagtgatctctggcgagaaagtgaccttctactgtcggctggataccgccaccagcatgtttctgctgctcaaagaaggccggtccagccacgtgcagcgcggatatggaaaagtgcaggccgagtttcccctgggacctgtgacaacagcccacagaggcacctacagatgcttcggcagctacaacaaccacgcttggagcttccctagcgagcccgtgaagttgcttgtgacc

SEQ ID NO: 4137 - DNA, 291 bp, synthetic construct; identical to SEQ ID NO: 4053
  source 1..291: mol_type = other DNA

SEQ ID NO: 4138 - DNA, 249 bp, synthetic construct; identical to SEQ ID NO: 4055
  source 1..249: mol_type = other DNA

SEQ ID NO: 4139 - DNA, 570 bp, synthetic construct
  source 1..570: mol_type = other DNA
caacaacagaccctgcctaaaccattcatctgggctgaaccccactttatggttccgaaagagaaacaagtcacgatttgttgccaagggaattacggggccgtcgagtatcagctccactttgagggctccctgtttgctgtggatcggcccaagccacctgaaagaatcaacaaagtccaattctatattcctgatatgaactcccgcatggcaggccagtattcatgtatctaccgcgtgggagaactttggagtgaaccctctaacctgctggacctcgtcgtgacagagatgtatgatacacccacactgtctgtgcaccctgggccagaagttatcagcggagaaaaagttaccttttattgccgcctcgataccgctacctctatgttcctcttgctgaaagagggccgcagctctcacgtgcagcgaggctacggaaaggtccaagctgagtttcctctcggccccgtgaccaccgctcacaggggcacatatagatgttttggctcttataacaatcatgcctggtcattcccatccgagcctgtgaaactgctggtcaca

SEQ ID NO: 4140 - DNA, 267 bp, synthetic construct; identical to SEQ ID NO: 4086
  source 1..267: mol_type = other DNA

SEQ ID NO: 4141 - DNA, 252 bp, synthetic construct; identical to SEQ ID NO: 4087
  source 1..252: mol_type = other DNA

SEQ ID NO: 4142 - DNA, 210 bp, synthetic construct; identical to SEQ ID NO: 4089
  source 1..210: mol_type = other DNA

SEQ ID NO: 4143 - DNA, 519 bp, synthetic construct
  source 1..519: mol_type = other DNA
ggcatgcggactgaagacctcccaaaggctgtggtgttcctggagcctcaatggtacagggtgctggagaaggacagtgtgactctgaagtgccagggagcctactcccctgaggacaattccacacagtggtttcacaatgagagcctcatctcaagccaggcctccagctacttcattgacgctgccacagtggacgacagtggagagtacaggtgccagacaaacctctccaccctcagtgacccggtgcagctagaagtccatatcggctggctgttgctccaggcccctcggtgggtgttcaaggaggaagaccctattcacctgaggtgtcacagctggaagaacactgctctgcataaggtcacatatttacagaatggcaaaggcaggaagtattttcatcataattctgacttctacattccaaaagccacactcaaagacagcggctcctacttctgcagggggcttgttgggagtaaaaatgtgtcttcagagactgtgaacatcacc

SEQ ID NO: 4144 - DNA, 267 bp, synthetic construct; identical to SEQ ID NO: 4096
  source 1..267: mol_type = other DNA

SEQ ID NO: 4145 - DNA, 252 bp, synthetic construct; identical to SEQ ID NO: 4097
  source 1..252: mol_type = other DNA

SEQ ID NO: 4146 - DNA, 42 bp, synthetic construct; identical to SEQ ID NO: 4098
  source 1..42: mol_type = other DNA

SEQ ID NO: 4147 - DNA, 210 bp, synthetic construct; identical to SEQ ID NO: 4099
  source 1..210: mol_type = other DNA

SEQ ID NO: 4148 - DNA, 519 bp, synthetic construct
  source 1..519: mol_type = other DNA
ggaatgaggactgaggatcttcccaaagctgtcgtctttctcgaaccccaatggtatcgggtgctcgaaaaagactctgtgacactgaaatgccaaggggcctactctcccgaggacaactccacacagtggtttcataatgagtccctcatcagctctcaggccagctcttatttcattgatgccgctacagtggacgactccggcgagtatcggtgtcagaccaatctgtctacactgtctgaccccgtgcagcttgaggtccacattggatggttgctcttgcaagccccacgctgggttttcaaagaggaagatccaatccatctgcggtgccacagctggaaaaacaccgctctccacaaagtcacatacctgcaaaatggcaaaggacgcaaatacttccatcacaattccgatttttacattccgaaggctaccctgaaagacagcggcagctatttctgccggggactcgtcggctccaagaatgtgtcctccgaaaccgtgaatatcacg

SEQ ID NO: 4149 - DNA, 267 bp, synthetic construct; identical to SEQ ID NO: 4106
  source 1..267: mol_type = other DNA

SEQ ID NO: 4150 - DNA, 252 bp, synthetic construct; identical to SEQ ID NO: 4107
  source 1..252: mol_type = other DNA

SEQ ID NO: 4151 - DNA, 42 bp, synthetic construct; identical to SEQ ID NO: 4108
  source 1..42: mol_type = other DNA

SEQ ID NO: 4152 - DNA, 210 bp, synthetic construct; identical to SEQ ID NO: 4109
  source 1..210: mol_type = other DNA

SEQ ID NO: 4153 - DNA, 519 bp, synthetic construct
  source 1..519: mol_type = other DNA
ggcatgagaaccgaggacctgcctaaggccgtggtgttcctggaaccccagtggtacagagtgctggaaaaggacagcgtgaccctgaagtgccagggcgcctacagccccgaggacaatagcacccagtggttccacaacgagagcctgatctccagccaggccagcagctacttcatcgacgccgccaccgtggacgacagcggcgagtatagatgccagaccaacctgagcaccctgagcgaccccgtgcagctggaagtgcacatcggatggctgctgctgcaggcccccagatgggtgttcaaagaagaggaccccatccacctgagatgccactcttggaagaacaccgccctgcacaaagtgacctacctgcagaacggcaagggcagaaagtacttccaccacaacagcgacttctacatccccaaggccaccctgaaggactccggctcctacttctgcagaggcctcgtgggcagcaagaacgtgtccagcgagacagtgaacatcacc

SEQ ID NO: 4154 - DNA, 15 bp, synthetic construct
  source 1..15: mol_type = other DNA
ctgggagagcctcag

SEQ ID NO: 4155 - DNA, 15 bp, synthetic construct
  source 1..15: mol_type = other DNA
ctcggagaaccacag

SEQ ID NO: 4156 - DNA, 90 bp, synthetic construct; identical to SEQ ID NO: 3843
  source 1..90: mol_type = other DNA

SEQ ID NO: 4157 - DNA, 90 bp, synthetic construct; identical to SEQ ID NO: 3849
  source 1..90: mol_type = other DNA

SEQ ID NO: 4158 - DNA, 90 bp, synthetic construct; identical to SEQ ID NO: 3997
  source 1..90: mol_type = other DNA

SEQ ID NO: 4159 - DNA, 90 bp, synthetic construct; identical to SEQ ID NO: 3998
  source 1..90: mol_type = other DNA

SEQ ID NO: 4160 - DNA, 78 bp, synthetic construct
  source 1..78: mol_type = other DNA
ctgggagagcctcagctgtgctatatcctggacgccatcctgtttctgtacggcatcgtgctgaccctgctgtactgc

SEQ ID NO: 4161 - DNA, 78 bp, synthetic construct
  source 1..78: mol_type = other DNA
ctcggagaaccacagctctgttacattctggatgctatcctgttcctctatgggatcgtcctgacactcctgtattgc

SEQ ID NO: 4162 - DNA, 78 bp, synthetic construct
  source 1..78: mol_type = other DNA
ctgggagagcctcagctgagctatatcctggacgccatcctgtttctgtacggcatcgtgctgaccctgctgtactgc

SEQ ID NO: 4163 - DNA, 78 bp, synthetic construct
  source 1..78: mol_type = other DNA
ctcggagaaccacagctctcttacattctggatgctatcctgttcctctatgggatcgtcctgacactcctgtattgc

SEQ ID NO: 4164 - DNA, 63 bp, synthetic construct; identical to SEQ ID NO: 4017
  source 1..63: mol_type = other DNA

SEQ ID NO: 4165 - DNA, 63 bp, synthetic construct; identical to SEQ ID NO: 4023
  source 1..63: mol_type = other DNA

SEQ ID NO: 4166 - DNA, 63 bp, synthetic construct; identical to SEQ ID NO: 4030
  source 1..63: mol_type = other DNA

SEQ ID NO: 4167 - DNA, 63 bp, synthetic construct; identical to SEQ ID NO: 4037
  source 1..63: mol_type = other DNA

SEQ ID NO: 4168 - DNA, 63 bp, synthetic construct; identical to SEQ ID NO: 4047
  source 1..63: mol_type = other DNA

SEQ ID NO: 4169 - DNA, 63 bp, synthetic construct; identical to SEQ ID NO: 4057
  source 1..63: mol_type = other DNA

SEQ ID NO: 4170 - DNA, 93 bp, synthetic construct; identical to SEQ ID NO: 4076
  source 1..93: mol_type = other DNA

SEQ ID NO: 4171 - DNA, 93 bp, synthetic construct; identical to SEQ ID NO: 4080
  source 1..93: mol_type = other DNA

SEQ ID NO: 4172 - DNA, 69 bp, synthetic construct; identical to SEQ ID NO: 4091
  source 1..69: mol_type = other DNA

SEQ ID NO: 4173 - DNA, 69 bp, synthetic construct; identical to SEQ ID NO: 4101
  source 1..69: mol_type = other DNA

SEQ ID NO: 4174 - DNA, 69 bp, synthetic construct; identical to SEQ ID NO: 4111
  source 1..69: mol_type = other DNA

SEQ ID NO: 4175 - DNA, 63 bp, synthetic construct; identical to SEQ ID NO: 4118
  source 1..63: mol_type = other DNA

SEQ ID NO: 4176 - DNA, 63 bp, synthetic construct
  source 1..63: mol_type = other DNA
ctgagctatatcctggacgccatcctgtttctgtacggcatcgtgctgaccctgctgtactgc

SEQ ID NO: 4177 - DNA, 63 bp, synthetic construct
  source 1..63: mol_type = other DNA
ctctgttacattctggatgctatcctgttcctctatgggatcgtcctgacactcctgtattgc

SEQ ID NO: 4178 - DNA, 60 bp, synthetic construct; identical to SEQ ID NO: 3956
  source 1..60: mol_type = other DNA

SEQ ID NO: 4179 - DNA, 27 bp, synthetic construct
  source 1..27: mol_type = other DNA
gtggaaaaagagcaccctcagctcgga

SEQ ID NO: 4180 - DNA, 27 bp, synthetic construct
  source 1..27: mol_type = other DNA
gtcgagaaagaacatccacagcttggc

SEQ ID NO: 4181 - DNA, 216 bp, synthetic construct; identical to SEQ ID NO: 4029
  source 1..216: mol_type = other DNA

SEQ ID NO: 4182 - DNA, 216 bp, synthetic construct; identical to SEQ ID NO: 4036
  source 1..216: mol_type = other DNA

SEQ ID NO: 4183 - DNA, 141 bp, synthetic construct; identical to SEQ ID NO: 4046
  source 1..141: mol_type = other DNA

SEQ ID NO: 4184 - DNA, 141 bp, synthetic construct; identical to SEQ ID NO: 4056
  source 1..141: mol_type = other DNA

SEQ ID NO: 4185 - DNA, 144 bp, synthetic construct; identical to SEQ ID NO: 4075
  source 1..144: mol_type = other DNA

SEQ ID NO: 4186 - DNA, 144 bp, synthetic construct; identical to SEQ ID NO: 4079
  source 1..144: mol_type = other DNA

SEQ ID NO: 4187 - DNA, 144 bp, synthetic construct; identical to SEQ ID NO: 4083
  source 1..144: mol_type = other DNA

SEQ ID NO: 4188 - DNA, 144 bp, synthetic construct; identical to SEQ ID NO: 4085
  source 1..144: mol_type = other DNA

SEQ ID NO: 4189 - DNA, 51 bp, synthetic construct; identical to SEQ ID NO: 4090
  source 1..51: mol_type = other DNA

SEQ ID NO: 4190 - DNA, 51 bp, synthetic construct; identical to SEQ ID NO: 4100
  source 1..51: mol_type = other DNA

SEQ ID NO: 4191 - DNA, 51 bp, synthetic construct; identical to SEQ ID NO: 4110
  source 1..51: mol_type = other DNA

SEQ ID NO: 4192 - DNA, 45 bp, synthetic construct; identical to SEQ ID NO: 4117
  source 1..45: mol_type = other DNA

SEQ ID NO: 4193 - DNA, 30 bp, synthetic construct; identical to SEQ ID NO: 3950
  source 1..30: mol_type = other DNA

SEQ ID NO: 4194 - DNA, 136 bp, synthetic construct; identical to SEQ ID NO: 4018
  source 1..136: mol_type = other DNA

SEQ ID NO: 4195 - DNA, 135 bp, synthetic construct; identical to SEQ ID NO: 4024
  source 1..135: mol_type = other DNA

SEQ ID NO: 4196 - DNA, 189 bp, synthetic construct; identical to SEQ ID NO: 4031
  source 1..189: mol_type = other DNA

SEQ ID NO: 4197 - DNA, 189 bp, synthetic construct; identical to SEQ ID NO: 4038
  source 1..189: mol_type = other DNA

SEQ ID NO: 4198 - DNA, 75 bp, synthetic construct; identical to SEQ ID NO: 4048
  source 1..75: mol_type = other DNA

SEQ ID NO: 4199 - DNA, 75 bp, synthetic construct; identical to SEQ ID NO: 4058
  source 1..75: mol_type = other DNA

SEQ ID NO: 4200 - DNA, 75 bp, synthetic construct; identical to SEQ ID NO: 4092
  source 1..75: mol_type = other DNA

SEQ ID NO: 4201 - DNA, 75 bp, synthetic construct; identical to SEQ ID NO: 4102
  source 1..75: mol_type = other DNA

SEQ ID NO: 4202 - DNA, 75 bp, synthetic construct; identical to SEQ ID NO: 4112
  source 1..75: mol_type = other DNA

SEQ ID NO: 4203 - DNA, 183 bp, synthetic construct; identical to SEQ ID NO: 4119
  source 1..183: mol_type = other DNA

SEQ ID NO: 4204 - DNA, 126 bp, synthetic construct
  source 1..126: mol_type = other DNA
cggctgaagatccaagtgcggaaggccgccatcaccagctacgagaaatccgacggcgtgtacaccggcctgagcaccagaaatcaagagacatacgagacactgaagcacgaaaagcctccacaa

SEQ ID NO: 4205 - DNA, 126 bp, synthetic construct
  source 1..126: mol_type = other DNA
agactcaaaattcaagttcgcaaagccgccattacctcttacgagaagagtgatggggtgtacacaggactgtctacccggaatcaagaaacctacgaaaccctcaaacatgagaagccacctcag

SEQ ID NO: 4206 - DNA, 339 bp, synthetic construct; identical to SEQ ID NO: 3850
  source 1..339: mol_type = other DNA

SEQ ID NO: 4207 - DNA, 339 bp, synthetic construct
  source 1..339: mol_type = other DNA
agagtgaagttcagcagaagcgccgacgcccctgcctaccagcagggacagaaccaactgtacaacgagctgaacctgggcagacgggaagagtacgacgtgctggacaagcggagaggcagggaccctgagatgggcggaaagccccagcggagaaagaacccccaggaaggactgtataacgaactccagaaagacaagatggccgaagcctacagcgagatcggcatgaagggcgagcggagaagaggcaagggccacgatggcctgtaccagggcctgagcaccgccaccaaggacacctatgacgccctgcacatgcaggccctgcctccaaga

SEQ ID NO: 4208 - DNA, 339 bp, synthetic construct; identical to SEQ ID NO: 3850
  source 1..339: mol_type = other DNA

SEQ ID NO: 4209 - DNA, 108 bp, synthetic construct; identical to SEQ ID NO: 3999
  source 1..108: mol_type = other DNA

SEQ ID NO: 4210 - DNA, 108 bp, synthetic construct; identical to SEQ ID NO: 4000
  source 1..108: mol_type = other DNA

SEQ ID NO: 4211 - DNA, 360 bp, synthetic construct; identical to SEQ ID NO: 4071
  source 1..360: mol_type = other DNA

SEQ ID NO: 4212 - DNA, 360 bp, synthetic construct; identical to SEQ ID NO: 4073
  source 1..360: mol_type = other DNA

SEQ ID NO: 4213 - DNA, 123 bp, synthetic construct; identical to SEQ ID NO: 3846
  source 1..123: mol_type = other DNA

SEQ ID NO: 4214 - DNA, 126 bp, synthetic construct; identical to SEQ ID NO: 3847
  source 1..126: mol_type = other DNA

SEQ ID NO: 4215 - DNA, 123 bp, synthetic construct; identical to SEQ ID NO: 3852
  source 1..123: mol_type = other DNA

SEQ ID NO: 4216 - DNA, 126 bp, synthetic construct; identical to SEQ ID NO: 3853
  source 1..126: mol_type = other DNA

SEQ ID NO: 4217 - DNA, 696 bp, synthetic construct
  source 1..696: mol_type = other DNA
ctgcaagacccttgctctaattgccctgccggcaccttctgcgacaacaaccggaaccagatttgctccccttgtcctcctaacagcttcagctctgccggcggacagagaacctgcgacatctgtagacagtgcaagggcgtgttcagaacccggaaagagtgcagcagcacctccaacgccgagtgcgattgcacacctggcttccattgtctcggagccggctgttctatgtgcgagcaggattgcaagcagggccaagagctgaccaagaagggctgcaaggattgctgcttcggcacctttaacgaccagaagagaggcatctgccggccttggaccaactgtagcctggatggcaagagcgtgctggtcaacggcaccaaagaacgggatgtcgtgtgcggaccttctccagccgatttgtctcctggcgcttctagcgtgacacctcctgctccagctagagagcctggacacagccctcagatcatctcattctttctggccctgacctctacagccctgctgtttctgctgttcttcctgacactgcggttcagcgtggtcaagcggggcagaaagaagctgctgtacatcttcaagcagcctttcatgcggcccgtgcagaccacacaagaagaggacggctgctcctgtcggttccccgaggaagaggaaggcggttgcgaactt

SEQ ID NO: 4218 - DNA, 696 bp, synthetic construct
  source 1..696: mol_type = other DNA
cttcaggacccttgcagcaactgtccagccggaaccttttgtgataacaacagaaatcagatatgcagcccctgtccgccaaactcctttagcagtgctggcggccagcggacatgtgacatttgtcggcagtgcaaaggggttttccgcaccagaaaagagtgctcctccaccagcaatgccgagtgtgactgtaccccaggctttcactgtctcggcgctggatgtagcatgtgtgaacaggactgtaaacaggggcaagaactcacgaagaaagggtgcaaagactgctgttttgggacgttcaacgatcagaagcggggaatctgtaggccctggacaaactgttctctggacggcaagtccgtgctcgtgaatggaacaaaagagcgggacgttgtctgcggcccaagtcctgctgatcttagcccaggcgcttcctctgtgactcctccagctcctgcacgcgaacctggacactctccccagatcatctcattttttctcgctctcacatcaaccgctttgctgttcctgctcttttttctcaccctccggttctccgtggttaagagaggccggaaaaaactcctctatatctttaaacagccctttatgcgcccggtccaaacaacccaagaggaagatggctgctcttgcagattcccggaagaggaagaaggcggctgcgagctg

SEQ ID NO: 4219 - DNA, 606 bp, synthetic construct
  source 1..606: mol_type = other DNA
aacaagatcctggtcaagcagagccctatgctggtggcctacgacaacgccgtgaacctgagctgcaagtacagctacaacctgttcagcagagagttccgggccagcctgcacaaaggactggattctgctgtggaagtgtgcgtggtgtacggcaactacagccagcagctccaggtgtacagcaagaccggcttcaactgcgacggcaagctgggcaatgagagcgtgaccttctacctgcaaaacctgtacgtgaaccagaccgacatctatttctgcaagatcgaagtgatgtacccgcctccttacctggacaacgagaagtccaacggcaccatcatccacgtgaagggcaagcacctgtgtccttctccactgttccccggacctagcaagcctttctgggtgctcgttgttgttggcggcgtgctggcctgttatagcctgctggttaccgtggccttcatcatcttttgggtccgaagcaagcggagccggctgctgcacagcgactacatgaacatgacccctagacggcccggaccaaccagaaagcactaccagccttacgctcctcctagagacttcgccgcctatagaagt

SEQ ID NO: 4220 - DNA, 606 bp, synthetic construct
  source 1..606: mol_type = other DNA
aacaaaattcttgtgaagcagtccccaatgctcgtcgcctatgataatgccgtgaatctgtcctgcaaatactcctacaatctgtttagccgcgagtttagggcctcactgcacaagggccttgacagcgccgtggaagtctgtgtggtctatggaaattactcccagcaactgcaagtgtactctaagacggggttcaactgtgatggaaaactgggaaacgagtccgtgacgttttacctccaaaatctctatgtcaatcaaacggacatctatttctgcaaaattgaagtcatgtatcctccgccgtacctcgataacgagaaaagcaatgggacgatcattcacgtcaagggaaaacatctctgccccagtcctctgttccctgggccttccaaaccattttgggttctcgtcgtcgtcggcggagtcctggcttgttattctctgcttgtgacagtcgcctttatcatattctgggtccgctccaagagaagcagactgctccactccgattatatgaatatgacacccaggcggccagggcctacacggaaacactatcaaccctacgctccacctcgggatttcgctgcctacagatca

SEQ ID NO: 4221 - DNA, 747 bp, synthetic construct
  source 1..747: mol_type = other DNA
ctgcattgcgtgggcgacacataccccagcaacgacagatgctgccacgaatgcagacccggcaatggcatggtgtccagatgcagcagatcccagaacaccgtgtgcagaccttgcggccctggcttctacaacgacgtggtgtctagcaagccctgcaagccttgcacctggtgtaacctgagaagcggcagcgagagaaagcagctgtgtaccgccacacaggataccgtgtgccggtgtagagctggcacacagcctctggacagctacaaacctggcgtggactgtgccccttgtcctcctggacactttagccctggcgacaaccaggcttgcaaaccctggaccaactgtaccctggccggcaagcacacactgcaacctgccagcaatagcagcgacgccatctgcgaggacagagatcctcctgccacacagccccaagagacacaaggacctccagccagacctatcaccgtgcagcctacagaagcctggcctagaacaagccagggacctagcaccagacctgtggaagttcctggtggcagagccgtggccgccattcttggtcttggactggtgctgggactgctcggacctctggctattctgctggccctgtacctgctgagaagggaccaaagactgcctcctgacgctcacaaacctccaggcggaggcagcttcagaacccctatccaagaggaacaggctgacgcccacagcaccctggcaaaaatt

SEQ ID NO: 4222 - DNA, 747 bp, synthetic construct
  source 1..747: mol_type = other DNA
ctgcactgtgtcggcgacacctatccatccaacgatcggtgctgccatgagtgccggcctggcaacggaatggtgtctcgatgttctcggagtcagaataccgtctgtaggccatgcggacccggcttttacaatgatgtcgtgtcctccaaaccttgcaagccatgtacttggtgcaatctgcggagcggctctgagcggaaacagctgtgcactgctacccaggacacagtgtgtagatgcagagccggaactcagcccctggactcttataagcccggcgttgactgcgctccatgtccaccagggcacttttccccaggcgacaatcaagcctgtaaaccgtggacaaattgcacactggccgggaaacacaccttgcagccagccagcaattcctccgatgccatctgtgaagatcgggacccaccagccactcagcctcaagaaactcaggggcctcctgctaggcccattacagtgcaacctaccgaggcttggccccggacatctcagggaccttctacaaggccagtggaagtgccaggcggtagagctgtggctgctatccttggattgggcctcgttctcggactgttgggaccacttgcaatcctgctggctctctatctgctgcggcgggatcagagactccctccagatgctcataagccacctggcggcggatctttcaggaccccaattcaagaagaacaagccgacgctcactctaccctggctaagatc

SEQ ID NO: 4223 - DNA, 1038 bp, synthetic construct
  source 1..1038: mol_type = other DNA
aagggctgtcagggctctgccgatcacgtggtgtctatcagcggagtgcctctccagctccagcctaacagcatccagaccaaggtggactctatcgcctggaagaagctgctgcccagccagaatggcttccaccacatcctgaagtgggagaacggcagcctgcctagcaacaccagcaacgacagattcagcttcatcgtgaagaacctgagcctgctgattaaggccgctcagcagcaggatagcggcctgtactgtctggaagtgaccagcatcagcggcaaggtgcagaccgccacctttcaggtgttcgtgttcgacaaggtggaaaagccccggctgcaaggccagggcaagatccttgatagaggcagatgccaggtggccctgagctgtctggtttccagagatggcaacgtgtcctacgcctggtacagaggcagcaagctgatccagacagccggcaacctgacctacctggacgaggaagtggacatcaacggcacccacacctacacctgtaatgtgtctaaccccgtgtcctgggagagccacacactgaatctgacccaggactgccagaacgcccaccaagagttcagattctggcccttcctggtcatcatcgtgatcctgagcgccctgttcctgggcaccctggcctgtttttgcgtgtggcgcagaaagcgcaaagagaagcagagcgagacaagccccaaagagttcctgaccatctacgaggacgtgaaggatctgaaaacccggcggaaccacgaacaagagcagacctttcctggcggcggaagcaccatctacagcatgatccagagccagagcagcgcccctacaagccaagagccagcctacacactgtactccctgatccagcctagcagaaagagcggcagccggaagagaaatcacagccccagcttcaacagcacgatctacgaagtgatcggaaagtcccagcctaaggctcagaaccccgccagactgagccggaaagagctggaaaacttcgacgtgtacagc

SEQ ID NO: 4224 - DNA, 1038 bp, synthetic construct
  source 1..1038: mol_type = other DNA
aaaggatgccagggaagcgccgaccatgtggtgtcaatttctggcgtgcccctgcaactccagccaaactctattcagaccaaagtcgatagcattgcctggaaaaaattgctgccctctcagaacgggtttcaccacattctcaaatgggaaaatggctctctgccctccaacacctccaacgatcggtttagctttatcgtcaagaatctgtccctgctcatcaaagcagcccagcagcaagactccggcctgtattgcctcgaagtcacctccatctccgggaaagtgcagacagctacattccaagtgttcgtctttgataaggtcgagaagcctagactccaaggacaggggaagattctggacagaggacggtgtcaggtggcactgtcttgccttgtcagccgcgacggcaatgtgtcttatgcttggtatcggggctccaagctgattcaaaccgctgggaatctgacatacctcgatgaagaggttgacatcaatgggacgcacacgtatacttgcaatgtctccaatcctgtcagctgggagtctcataccctgaacctgacacaggattgtcaaaatgcacatcaagagttccggttttggccgtttcttgtgattatcgtgattctgtctgccctcttcctcggaactctggcttgcttctgtgtctggcggcgcaaacggaaagagaaacagtctgagacttccccgaaagagtttctcacgatatacgaagatgtcaaggacctcaagacccgccgcaaccatgagcaagaacagacattcccaggcggaggctccacaatctactccatgattcagtcccagtctagcgccccaacctctcaagagcctgcttataccctgtacagtctgattcagccctccagaaagtccggctctcggaagaggaaccactctcctagcttcaactccaccatatatgaagtcattggcaagtctcagcccaaagcacagaatcctgccaggctgagcagaaaagaacttgagaatttcgacgtctactcc

SEQ ID NO: 4225 - DNA, 804 bp, synthetic construct
  source 1..804: mol_type = other DNA
acaccagccgctcctccaaaggccgtgctgaaactggaaccccagtggatcaacgtgctgcaagaggacagcgtgaccctgacctgtagaggcacacacagccctgagagcgacagcatccagtggttccacaacggcaatctgatccccacacacacccagcctagctacagattcaaggccaacaacaacgacagcggcgagtacacctgtcagaccggccagacaagcctgagcgatcctgtgcatctgaccgtgctgtctgagtggctggtgctgcagacaccccacctggaatttcaagagggcgagacaatcgtgctgcggtgccacagctggaaggacaagcctctggtcaaagtgacattcttccagaacgggaagtccaagaagttcagcagaagcgaccccaacttcagcatccctcaggccaatcacagccactccggcgattaccactgcaccggcaatatcggctacaccctgtacagcagcaagcccgtgaccatcacagtgcaggcccctagcagtagccctatgggaatcatcgtggccgtggtcacaggcattgccgtggctgctattgtggctgcagtggtggccctgatctactgccggaagaagagaatctctgccctgcctggctaccccgagtgtagagagatgggagagacactgcccgagaagcccgccaatcctaccaatcctgacgaggccgacaaagtgggagccgagaacaccatcacctacagcctgctgatgcaccccgacgcactggaagaacccgacgaccagaatagaatc

SEQ ID NO: 4226 - DNA, 804 bp, synthetic construct
  source 1..804: mol_type = other DNA
actccagctgctccacctaaagctgtcctgaagctcgaacctcaatggattaacgtcctccaagaagattctgtcaccctgacatgccggggcacccactctccagagtctgattccattcagtggtttcataatgggaacctgattccgactcacacgcagcccagctatcggtttaaagctaacaacaatgactccggggagtatacttgccagacaggacagaccagcctgtctgacccagtgcacctgacagttctgagcgaatggctcgtcctgcagacccctcatcttgagttccaagagggcgaaaccattgtcctgagatgccactcctggaaagataagccccttgtgaaagtcacattttttcagaatggcaagagcaagaagttttctcggagcgatccgaatttcagtattccccaggccaaccactctcacagcggagactatcactgtacaggcaacatcgggtatacactctacagctctaagcccgtcacaattaccgttcaggctcccagcagctccccaatgggcattattgtggccgtcgtgaccggaattgctgtggccgcaatcgtggcagctgtcgtcgctctgatctattgcagaaagaagcggatcagcgccctgccagggtatcctgagtgccgcgaaatgggcgaaactctgcctgagaaacctgctaaccccacaaatcccgatgaagctgacaaagtcggcgctgaaaacacgatcacatactccctgctcatgcatcctgacgctcttgaggaacctgacgatcagaaccggatc

SEQ ID NO: 4227 - DNA, 1080 bp, synthetic construct
  source 1..1080: mol_type = other DNA
caggtggtggataccaccaaggccgtgattaccctccagcctccttgggtgtccgtgttccaagaggaaaccgtgacactgcactgcgaggtgctgcatctgcctggctctagcagcacccagtggtttctgaatggcaccgccacacagaccagcacacccagctacagaatcaccagcgccagcgtgaacgacagcggcgagtacagatgccagagaggactgagcggcagaagcgaccccattcagctggaaatccacagaggctggctgctgctccaggtgtccagcagagtgtttacagagggcgagcccctggctctgagatgtcacgcctggaaggacaagctggtgtacaacgtgctgtactaccggaacggcaaagccttcaagttcttccactggaacagcaacctgaccatcctcaagaccaacatcagccacaacggcacctaccactgtagcggcatgggcaagcacagatacacaagcgccggcatcagcgtgaccgtgaaagagctgtttcccgctcctgtgctgaacgcctctgtgacaagtccactgctggaaggcaaccttgtgaccctgagctgcgagacaaagctgctgctgcaaagacctggcctccagctgtacttcagcttctacatgggcagcaagaccctgcggggcagaaataccagctccgagtaccagatcctgaccgccagaagagaggacagcggcctgtattggtgcgaagccgccaccgaggatggcaatgtgctgaagagaagccccgagctggaactccaggtgctgggactgcaactgcctacacctgtgtggttccacgtgctgttttacctggccgtgggcatcatgtttctggtcaacaccgtcctgtgggtcaccatcagaaaagagctgaagcggaagaagaagtgggacctcgaaatcagcctggactccggccacgaaaagaaagtgatctccagcctgcaagaggaccggcacctggaagaggaactgaagtgccaagagcagaaagaggaacagctgcaagaaggcgtgcaccgcaaagaacctcaaggcgctaca

SEQ ID NO: 4228 - DNA, 1080 bp, synthetic construct
  source 1..1080: mol_type = other DNA
caagtggtggacacaacaaaagccgtcatcaccctgcaaccaccttgggtttcagtctttcaagaagagacagttaccctgcactgtgaagtcctgcacttgcccggaagcagctccacacagtggttcctcaacggcacagctacccagacaagcaccccttcctaccggatcacatctgcctccgtgaacgattccggcgagtataggtgtcagaggggcctgtctggccgcagcgatcctatccagcttgagattcatcgtggatggttgctcctccaagtgtcctccagggtgttcaccgaaggcgaacctctggcactgaggtgccatgcttggaaagataagctcgtctacaatgtcctctactaccgcaatggcaaggcttttaagttttttcattggaactctaatctcacgatcctgaaaacgaacatctcccacaatgggacataccactgctctggcatgggaaaacatcggtacacctctgccggcatctctgtcacagtcaaagaactgttccctgcaccagtcctgaacgcttccgtgacctctccactgcttgagggaaatctggtcaccctgtcctgcgaaactaagttgctgcttcagaggcccggactccagctctacttttcattctatatgggctctaagaccctgagaggccggaacaccagcagcgaatatcagattctgacagctcggcgcgaggactccgggctctattggtgtgaagctgctacagaggacggaaacgtgctgaaacggtcccctgaactggaactgcaagtcctgggccttcagctgccaactccagtgtggtttcatgtcctgttctatctggctgtggggattatgttccttgtgaataccgtgctctgggttaccattcggaaagaactcaagcgcaagaaaaaatgggatcttgagataagcctggacagcgggcatgagaagaaagtcatcagttcccttcaagaggacagacatctcgaagaggaactcaaatgtcaagaacaaaaagaagaacaactccaagagggtgtccatcggaaagagccacagggcgctaca

SEQ ID NO: 4229 - DNA, 441 bp, synthetic construct
  source 1..441: mol_type = other DNA
aacatctatgatgcctttgttatctactcaagccaggatgaggactgggtaaggaatgagctagtaaagaatttagaagaaggggtgcctccatttcagctctgccttcactacagagactttattcccggtgtggccattgctgccaacatcatccatgaaggtttccataaaagccgaaaggtgattgttgtggtgtcccagcacttcatccagagccgctggtgtatctttgaatatgagattgctcagacctggcagtttctgagcagtcgtgctggtatcatcttcattgtcctgcagaaggtggagaagaccctgctcaggcagcaggtggagctgtaccgccttctcagcaggaacacttacctggagtgggaggacagtgtcctggggcggcacatcttctggagacgactcagaaaagccctgctggatggt

SEQ ID NO: 4230 - DNA, 27 bp, synthetic construct
  source 1..27: mol_type = other DNA
ggggggggggggggggggggggggggg

SEQ ID NO: 4231 - DNA, 675 bp, synthetic construct
  source 1..675: mol_type = other DNA
atgtaccggatgcagctgctgagctgtatcgccctgtctctggccctggtcacaaatagcgcccctaccagcagcagcaccaagaaaacccagctgcaactggaacacctcctgctggacctccagatgatcctgaacggcatcaacaactacaagaaccccaagctgaccgccatgctgaccaagaagttctacatgcccaagaaggccaccgagctgaagcacctccagtgcctggaagaggaactgaagcccctggaagaagtgctgaatctggcccagagcaagaacttccacctgaggccaagggacctgatctccaacatcaacgtgatcgtgctggaactgaaaggcagcgagacaaccttcatgtgcgagtacgccgacgagacagctaccatcgtggaatttctgaatcggtggatcaccttctgcgccagcatcatcagcaccctgacaaagatcgaagtgatgtaccctcctccttacctggacaacgagaagtccaacggcaccatcatccacgtgaagggcaagcacctgtgtccttctccactgttccccggacctagcaagcctttctgggtgctcgttgttgttggcggcgtgctggcctgttacagcctgctggttaccgtggccttcatcatcttttgggtccgaagcaagcggagc

SEQ ID NO: 4232 - DNA, 675 bp, synthetic construct
  source 1..675: mol_type = other DNA
atgtaccggatgcagctgctgagctgtatcgccctgtctctggccctggtcacaaatagcgcccctaccagcagcagcaccaagaaaacccagctgcaactggaacacctcctgctggacctccagatgatcctgaacggcatcaacaactacaagaaccccaagctgaccgagatgctgaccgccaagttctacatgcccaagaaggccaccgagctgaagcacctccagtgcctggaagaggaactgaagcccctggaagaagtgctgaatctggcccagagcaagaacttccacctgaggccaagggacctgatctccaacatcaacgtgatcgtgctggaactgaaaggcagcgagacaaccttcatgtgcgagtacgccgacgagacagctaccatcgtggaatttctgaatcggtggatcaccttctgccagagcatcatcagcaccctgacaaagatcgaagtgatgtaccctcctccttacctggacaacgagaagtccaacggcaccatcatccacgtgaagggcaagcacctgtgtccttctccactgttccccggacctagcaagcctttctgggtgctcgttgttgttggcggcgtgctggcctgttacagcctgctggttaccgtggccttcatcatcttttgggtccgaagcaagcggagc

SEQ ID NO: 4233 - DNA, 675 bp, synthetic construct
  source 1..675: mol_type = other DNA
atgtaccggatgcagctgctgagctgtatcgccctgtctctggccctggtcacaaatagcgcccctaccagcagcagcaccaagaaaacccagctgcaactggaacacctcctgctggacctccagatgatcctgaacggcatcaacaactacaagaaccccaagctgaccgagatgctgaccgccaagttctacatgcccaagaaggccaccgagctgaagcacctccagtgcctggaagaggaactgaagcccctggaagaagtgctgaatctggcccagagcaagaacttccacctgaggccaagggacctgatctccaacatcaacgtggccgtgctggaactgaaaggcagcgagacaaccttcatgtgcgagtacgccgacgagacagctaccatcgtggaatttctgaatcggtggatcaccttctgccagagcatcatcagcaccctgacaaagatcgaagtgatgtaccctcctccttacctggacaacgagaagtccaacggcaccatcatccacgtgaagggcaagcacctgtgtccttctccactgttccccggacctagcaagcctttctgggtgctcgttgttgttggcggcgtgctggcctgttacagcctgctggttaccgtggccttcatcatcttttgggtccgaagcaagcggagc

SEQ ID NO: 4234 - DNA, 675 bp, synthetic construct
  source 1..675: mol_type = other DNA
atgtaccggatgcagctgctgagctgtatcgccctgtctctggccctggtcacaaatagcgcccctgccagcagcagcaccaagaaaacccagctgcaactggaacacctcctgctggacctccagatgatcctgaacggcatcaacaactacaagaaccccaagctgacccggatgctgaccgccaagttcgccatgcccaagaaggccaccgagctgaagcacctccagtgcctggaagaggaactgaagcccctggaagaagtgctgaatggggcccagagcaagaacttccacctgaggccaagggacctgatctccaacatcaacgtgatcgtgctggaactgaaaggcagcgagacaaccttcatgtgcgagtacgccgacgagacagctaccatcgtggaatttctgaatcggtggatcaccttcggccagagcatcatcagcaccctgacaaagatcgaagtgatgtaccctcctccttacctggacaacgagaagtccaacggcaccatcatccacgtgaagggcaagcacctgtgtccttctccactgttccccggacctagcaagcctttctgggtgctcgttgttgttggcggcgtgctggcctgttacagcctgctggttaccgtggccttcatcatcttttgggtccgaagcaagcggagc

SEQ ID NO: 4235 - DNA, 618 bp, synthetic construct
  source 1..618: mol_type = other DNA
atgtaccggatgcagctgctgagctgtatcgccctgtctctggccctggtcacaaatagcaactgggttaacgtgatctccgacctgaagaagatcgaggacctgatccagtccatgcacatcgacgccacactgtacaccgagagcgacgtgcaccctagctgtaaagtgaccgccatgaagtgctttctgctggaactgcaagtgatctccctggaaagcggcgacgccagcatccacgacaccgtgaagaacctgattatcctggctaacaacagcctgagcagcaacggcaacgtgaccgagtccggctgtaaagagtgcgaggaactggaagagaagaatatcaaagagttcctccagagcttcgtgcacatcgtgcagatgttcatcaacaccagcaagatcgaagtgatgtaccctcctccttacctggacaacgagaagtccaacggcaccatcatccacgtgaagggcaagcacctgtgtccttctccactgttccccggacctagcaagcctttctgggtgctcgttgttgttggcggcgtgctggcctgttacagcctgctggttaccgtggccttcatcatcttttgggtccgaagcaagcggagc

SEQ ID NO: 4236 - DNA, 618 bp, synthetic construct
  source 1..618: mol_type = other DNA
atgtaccggatgcagctgctgagctgtatcgccctgtctctggccctggtcacaaatagcaactgggttaacgtgatctccagcctgaagaagatcgaggacctgatccagtccatgcacatcgacgccacactgtacaccgagagcgacgtgcaccctagctgtaaagtgaccgccatgaagtgctttctgctggaactgcaagtgatctccctggaaagcggcgacgccagcatccacgacaccgtggaaaacctgattatcctggctaacaacagcctgagcagcaacggcaacgtgaccgagtccggctgtaaagagtgcgaggaactggaagagaagaatatcaaagagttcctccagagcttcgtgcacatcgtgcagatgttcatcaacaccagcaagatcgaagtgatgtaccctcctccttacctggacaacgagaagtccaacggcaccatcatccacgtgaagggcaagcacctgtgtccttctccactgttccccggacctagcaagcctttctgggtgctcgttgttgttggcggcgtgctggcctgttacagcctgctggttaccgtggccttcatcatcttttgggtccgaagcaagcggagc

SEQ ID NO: 4237 - DNA, 618 bp, synthetic construct
  source 1..618: mol_type = other DNA
atgtaccggatgcagctgctgagctgtatcgccctgtctctggccctggtcacaaatagcaactgggttaacgtgatctccgacctgaagaagatcgaggacctgatccagtccatgcacatcgacgccacactgtacaccgagagcgacgtgcaccctagctgtaaagtgaccgccatgaagtgctttctgctggaactgcaagtgatctccctggaaagcggcgacgccagcatccacgacaccgtggaaaacctgattatccgggctaacaacagcctgagcagcaacggcaacgtgaccgagtccggctgtaaagagtgcgaggaactggaagagaagaatatcaaagagttcctccagagcttcgtgcacatcgtgcagatgttcatcaacaccagcaagatcgaagtgatgtaccctcctccttacctggacaacgagaagtccaacggcaccatcatccacgtgaagggcaagcacctgtgtccttctccactgttccccggacctagcaagcctttctgggtgctcgttgttgttggcggcgtgctggcctgttacagcctgctggttaccgtggccttcatcatcttttgggtccgaagcaagcggagc

SEQ ID NO: 4238 - DNA, 459 bp, synthetic construct
  source 1..459: mol_type = other DNA
atgtaccggatgcagctgctgagctgtatcgccctgtctctggccctggtcacaaatagcgcccctaccagcagcagcaccaagaaaacccagctgcaactggaacacctcctgctggacctccagatgatcctgaacggcatcaacaactacaagaaccccaagctgacccggatgctgaccttcaagttctacatgcccaagaaggccaccgagctgaagcacctccagtgcctggaagaggaactgaagcccctggaagaagtgctgaatctggcccagagcaagaacttccacctgaggccaagggacctgatctccaacatcaacgtgatcgtgctggaactgaaaggcagcgagacaaccttcatgtgcgagtacgccgacgagacagctaccatcgtggaatttctgaatcggtggatcaccttctgccagagcatcatcagcaccctgaca

SEQ ID NO: 4239 - DNA, 459 bp, synthetic construct
  source 1..459: mol_type = other DNA
atgtaccggatgcagctgctgagctgtatcgccctgtctctggccctggtcacaaatagcgcccctaccagcagcagcaccaagaaaacccagctgcaactggaacacctcctgctggacctccagatgatcctgaacggcatcaacaactacaagaaccccaagctgaccgccatgctgaccaagaagttctacatgcccaagaaggccaccgagctgaagcacctccagtgcctggaagaggaactgaagcccctggaagaagtgctgaatctggcccagagcaagaacttccacctgaggccaagggacctgatctccaacatcaacgtgatcgtgctggaactgaaaggcagcgagacaaccttcatgtgcgagtacgccgacgagacagctaccatcgtggaatttctgaatcggtggatcaccttctgcgccagcatcatcagcaccctgaca

SEQ ID NO: 4240 - DNA, 459 bp, synthetic construct
  source 1..459: mol_type = other DNA
atgtaccggatgcagctgctgagctgtatcgccctgtctctggccctggtcacaaatagcgcccctaccagcagcagcaccaagaaaacccagctgcaactggaacacctcctgctggacctccagatgatcctgaacggcatcaacaactacaagaaccccaagctgaccgagatgctgaccgccaagttctacatgcccaagaaggccaccgagctgaagcacctccagtgcctggaagaggaactgaagcccctggaagaagtgctgaatctggcccagagcaagaacttccacctgaggccaagggacctgatctccaacatcaacgtgatcgtgctggaactgaaaggcagcgagacaaccttcatgtgcgagtacgccgacgagacagctaccatcgtggaatttctgaatcggtggatcaccttctgccagagcatcatcagcaccctgaca

SEQ ID NO: 4241 - DNA, 459 bp, synthetic construct
  source 1..459: mol_type = other DNA
atgtaccggatgcagctgctgagctgtatcgccctgtctctggccctggtcacaaatagcgcccctaccagcagcagcaccaagaaaacccagctgcaactggaacacctcctgctggacctccagatgatcctgaacggcatcaacaactacaagaaccccaagctgaccgagatgctgaccgccaagttctacatgcccaagaaggccaccgagctgaagcacctccagtgcctggaagaggaactgaagcccctggaagaagtgctgaatctggcccagagcaagaacttccacctgaggccaagggacctgatctccaacatcaacgtggccgtgctggaactgaaaggcagcgagacaaccttcatgtgcgagtacgccgacgagacagctaccatcgtggaatttctgaatcggtggatcaccttctgccagagcatcatcagcaccctgaca

SEQ ID NO: 4242 - DNA, 459 bp, synthetic construct
  source 1..459: mol_type = other DNA
atgtaccggatgcagctgctgagctgtatcgccctgtctctggccctggtcacaaatagcgcccctgccagcagcagcaccaagaaaacccagctgcaactggaacacctcctgctggacctccagatgatcctgaacggcatcaacaactacaagaaccccaagctgacccggatgctgaccgccaagttcgccatgcccaagaaggccaccgagctgaagcacctccagtgcctggaagaggaactgaagcccctggaagaagtgctgaatggggcccagagcaagaacttccacctgaggccaagggacctgatctccaacatcaacgtgatcgtgctggaactgaaaggcagcgagacaaccttcatgtgcgagtacgccgacgagacagctaccatcgtggaatttctgaatcggtggatcaccttcggccagagcatcatcagcaccctgaca

SEQ ID NO: 4243 - DNA, 486 bp, synthetic construct
  source 1..486: mol_type = other DNA
atgagaatcagcaagccccacctgagatccatcagcatccagtgctacctgtgcctgctgctgaacagccactttctgacagaggccggcatccacgtgttcatcctgggctgtttttctgccggcctgcctaagaccgaggccaactgggttaacgtgatctccgacctgaagaagatcgaggacctgatccagtccatgcacatcgacgccacactgtacaccgagagcgacgtgcaccctagctgtaaagtgaccgccatgaagtgctttctgctggaactgcaagtgatctccctggaaagcggcgacgccagcatccacgacaccgtggaaaacctgattatcctggctaacaacagcctgagcagcaacggcaacgtgaccgagtccggctgtaaagagtgcgaggaactggaagagaagaatatcaaagagttcctccagagcttcgtgcacatcgtgcagatgttcatcaacaccagc

SEQ ID NO: 4244 - DNA, 402 bp, synthetic construct
  source 1..402: mol_type = other DNA
atgtaccggatgcagctgctgagctgtatcgccctgtctctggccctggtcacaaatagcaactgggttaacgtgatctccgacctgaagaagatcgaggacctgatccagtccatgcacatcgacgccacactgtacaccgagagcgacgtgcaccctagctgtaaagtgaccgccatgaagtgctttctgctggaactgcaagtgatctccctggaaagcggcgacgccagcatccacgacaccgtgaagaacctgattatcctggctaacaacagcctgagcagcaacggcaacgtgaccgagtccggctgtaaagagtgcgaggaactggaagagaagaatatcaaagagttcctccagagcttcgtgcacatcgtgcagatgttcatcaacaccagc

SEQ ID NO: 4245 - DNA, 402 bp, synthetic construct
  source 1..402: mol_type = other DNA
atgtaccggatgcagctgctgagctgtatcgccctgtctctggccctggtcacaaatagcaactgggttaacgtgatctccagcctgaagaagatcgaggacctgatccagtccatgcacatcgacgccacactgtacaccgagagcgacgtgcaccctagctgtaaagtgaccgccatgaagtgctttctgctggaactgcaagtgatctccctggaaagcggcgacgccagcatccacgacaccgtggaaaacctgattatcctggctaacaacagcctgagcagcaacggcaacgtgaccgagtccggctgtaaagagtgcgaggaactggaagagaagaatatcaaagagttcctccagagcttcgtgcacatcgtgcagatgttcatcaacaccagc

SEQ ID NO: 4246 - DNA, 402 bp, synthetic construct
  source 1..402: mol_type = other DNA
atgtaccggatgcagctgctgagctgtatcgccctgtctctggccctggtcacaaatagcaactgggttaacgtgatctccgacctgaagaagatcgaggacctgatccagtccatgcacatcgacgccacactgtacaccgagagcgacgtgcaccctagctgtaaagtgaccgccatgaagtgctttctgctggaactgcaagtgatctccctggaaagcggcgacgccagcatccacgacaccgtggaaaacctgattatccgggctaacaacagcctgagcagcaacggcaacgtgaccgagtccggctgtaaagagtgcgaggaactggaagagaagaatatcaaagagttcctccagagcttcgtgcacatcgtgcagatgttcatcaacaccagc

SEQ ID NO: 4247 - DNA, 534 bp, synthetic construct
  source 1..534: mol_type = other DNA
atggccttaccagtgaccgccttgctcctgccgctggccttgctgctccacgccgccaggccgtacttcggcaagctggaaagcaagctgtccgtgattcggaacctgaacgaccaggtgctgttcatcgaccagggcaacagacccctgttcgaggacatgaccgacagcgactgtagagacaacgcccctcggaccatcttcatcatcagcatgtacaaggacagccagcctagaggcatggccgtgaccatctctgtgaagtgcgagaagatcagcaccctgagctgcgagaacaagatcatcagcttcaaagagatgaacccgccggacaacatcaaggacaccaagagcgacatcatattcttccagcggagcgtgcccggccacgacaacaagatgcagtttgagagcagcagctacgagggctacttcctggcctgcgagaaagagcgggacctgttcaagctgatcctgaagaaagaggacgaactgggcgaccgcagcatcatgttcaccgtgcagaacgaggac

SEQ ID NO: 4248 - DNA, 699 bp, synthetic construct
  source 1..699: mol_type = other DNA
atgtaccggatgcagctgctgagctgtatcgccctgtctctggccctggtcacaaatagcgcccctaccagcagcagcaccaagaaaacccagctgcaactggaacacctcctgctggacctccagatgatcctgaacggcatcaacaactacaagaaccccaagctgacccggatgctgaccttcaagttctacatgcccaagaaggccaccgagctgaagcacctccagtgcctggaagaggaactgaagcccctggaagaagtgctgaatctggcccagagcaagaacttccacctgaggccaagggacctgatctccaacatcaacgtgatcgtgctggaactgaaaggcagcgagacaaccttcatgtgcgagtacgccgacgagacagctaccatcgtggaatttctgaatcggtggatcaccttctgccagagcatcatcagcaccctgacacatatgttgcagatggctgggcagtgctcccaaaatgaatattttgacagtttgttgcatgcttgcataccttgtcaacttcgatgttcttctaatactcctcctctaacatgtcagcgttattgtaatgcaagtgtgaccaattcagtgaaaggaacgaatgcgattctctggacctgtttgggactgagcttaataatttctttggcagttttcgtgctaatgtttttgctaaggaag

SEQ ID NO: 4249 - DNA, 699 bp, synthetic construct
  source 1..699: mol_type = other DNA
atgtaccggatgcagctgctgagctgtatcgccctgtctctggccctggtcacaaatagcgcccctaccagcagcagcaccaagaaaacccagctgcaactggaacacctcctgctggacctccagatgatcctgaacggcatcaacaactacaagaaccccaagctgaccgccatgctgaccaagaagttctacatgcccaagaaggccaccgagctgaagcacctccagtgcctggaagaggaactgaagcccctggaagaagtgctgaatctggcccagagcaagaacttccacctgaggccaagggacctgatctccaacatcaacgtgatcgtgctggaactgaaaggcagcgagacaaccttcatgtgcgagtacgccgacgagacagctaccatcgtggaatttctgaatcggtggatcaccttctgcgccagcatcatcagcaccctgacacatatgttgcagatggctgggcagtgctcccaaaatgaatattttgacagtttgttgcatgcttgcataccttgtcaacttcgatgttcttctaatactcctcctctaacatgtcagcgttattgtaatgcaagtgtgaccaattcagtgaaaggaacgaatgcgattctctggacctgtttgggactgagcttaataatttctttggcagttttcgtgctaatgtttttgctaaggaag

SEQ ID NO: 4250 - DNA, 699 bp, synthetic construct
  source 1..699: mol_type = other DNA
atgtaccggatgcagctgctgagctgtatcgccctgtctctggccctggtcacaaatagcgcccctaccagcagcagcaccaagaaaacccagctgcaactggaacacctcctgctggacctccagatgatcctgaacggcatcaacaactacaagaaccccaagctgaccgagatgctgaccgccaagttctacatgcccaagaaggccaccgagctgaagcacctccagtgcctggaagaggaactgaagcccctggaagaagtgctgaatctggcccagagcaagaacttccacctgaggccaagggacctgatctccaacatcaacgtgatcgtgctggaactgaaaggcagcgagacaaccttcatgtgcgagtacgccgacgagacagctaccatcgtggaatttctgaatcggtggatcaccttctgccagagcatcatcagcaccctgacacatatgttgcagatggctgggcagtgctcccaaaatgaatattttgacagtttgttgcatgcttgcataccttgtcaacttcgatgttcttctaatactcctcctctaacatgtcagcgttattgtaatgcaagtgtgaccaattcagtgaaaggaacgaatgcgattctctggacctgtttgggactgagcttaataatttctttggcagttttcgtgctaatgtttttgctaaggaag

SEQ ID NO: 4251 - DNA, 699 bp, synthetic construct
  source 1..699: mol_type = other DNA
atgtaccggatgcagctgctgagctgtatcgccctgtctctggccctggtcacaaatagcgcccctaccagcagcagcaccaagaaaacccagctgcaactggaacacctcctgctggacctccagatgatcctgaacggcatcaacaactacaagaaccccaagctgaccgagatgctgaccgccaagttctacatgcccaagaaggccaccgagctgaagcacctccagtgcctggaagaggaactgaagcccctggaagaagtgctgaatctggcccagagcaagaacttccacctgaggccaagggacctgatctccaacatcaacgtggccgtgctggaactgaaaggcagcgagacaaccttcatgtgcgagtacgccgacgagacagctaccatcgtggaatttctgaatcggtggatcaccttctgccagagcatcatcagcaccctgacacatatgttgcagatggctgggcagtgctcccaaaatgaatattttgacagtttgttgcatgcttgcataccttgtcaacttcgatgttcttctaatactcctcctctaacatgtcagcgttattgtaatgcaagtgtgaccaattcagtgaaaggaacgaatgcgattctctggacctgtttgggactgagcttaataatttctttggcagttttcgtgctaatgtttttgctaaggaag

SEQ ID NO: 4252 - DNA, 699 bp, synthetic construct
  source 1..699: mol_type = other DNA
atgtaccggatgcagctgctgagctgtatcgccctgtctctggccctggtcacaaatagcgcccctgccagcagcagcaccaagaaaacccagctgcaactggaacacctcctgctggacctccagatgatcctgaacggcatcaacaactacaagaaccccaagctgacccggatgctgaccgccaagttcgccatgcccaagaaggccaccgagctgaagcacctccagtgcctggaagaggaactgaagcccctggaagaagtgctgaatggggcccagagcaagaacttccacctgaggccaagggacctgatctccaacatcaacgtgatcgtgctggaactgaaaggcagcgagacaaccttcatgtgcgagtacgccgacgagacagctaccatcgtggaatttctgaatcggtggatcaccttcggccagagcatcatcagcaccctgacacatatgttgcagatggctgggcagtgctcccaaaatgaatattttgacagtttgttgcatgcttgcataccttgtcaacttcgatgttcttctaatactcctcctctaacatgtcagcgttattgtaatgcaagtgtgaccaattcagtgaaaggaacgaatgcgattctctggacctgtttgggactgagcttaataatttctttggcagttttcgtgctaatgtttttgctaaggaag

SEQ ID NO: 4253 - DNA, 726 bp, synthetic construct
  source 1..726: mol_type = other DNA
atgagaatcagcaagccccacctgagatccatcagcatccagtgctacctgtgcctgctgctgaacagccactttctgacagaggccggcatccacgtgttcatcctgggctgtttttctgccggcctgcctaagaccgaggccaactgggttaacgtgatctccgacctgaagaagatcgaggacctgatccagtccatgcacatcgacgccacactgtacaccgagagcgacgtgcaccctagctgtaaagtgaccgccatgaagtgctttctgctggaactgcaagtgatctccctggaaagcggcgacgccagcatccacgacaccgtggaaaacctgattatcctggctaacaacagcctgagcagcaacggcaacgtgaccgagtccggctgtaaagagtgcgaggaactggaagagaagaatatcaaagagttcctccagagcttcgtgcacatcgtgcagatgttcatcaacaccagccatatgttgcagatggctgggcagtgctcccaaaatgaatattttgacagtttgttgcatgcttgcataccttgtcaacttcgatgttcttctaatactcctcctctaacatgtcagcgttattgtaatgcaagtgtgaccaattcagtgaaaggaacgaatgcgattctctggacctgtttgggactgagcttaataatttctttggcagttttcgtgctaatgtttttgctaaggaag

SEQ ID NO: 4254 - DNA, 726 bp, synthetic construct
  source 1..726: mol_type = other DNA
atgagaatcagcaagccccacctgagatccatcagcatccagtgctacctgtgcctgctgctgaacagccactttctgacagaggccggcatccacgtgttcatcctgggctgtttttctgccggcctgcctaagaccgaggccaactgggttaacgtgatctccgacctgaagaagatcgaggacctgatccagtccatgcacatcgacgccacactgtacaccgagagcgacgtgcaccctagctgtaaagtgaccgccatgaagtgctttctgctggaactgcaagtgatctccctggaaagcggcgacgccagcatccacgacaccgtgaagaacctgattatcctggctaacaacagcctgagcagcaacggcaacgtgaccgagtccggctgtaaagagtgcgaggaactggaagagaagaatatcaaagagttcctccagagcttcgtgcacatcgtgcagatgttcatcaacaccagccatatgttgcagatggctgggcagtgctcccaaaatgaatattttgacagtttgttgcatgcttgcataccttgtcaacttcgatgttcttctaatactcctcctctaacatgtcagcgttattgtaatgcaagtgtgaccaattcagtgaaaggaacgaatgcgattctctggacctgtttgggactgagcttaataatttctttggcagttttcgtgctaatgtttttgctaaggaag

SEQ ID NO: 4255 - DNA, 1641 bp, synthetic construct
  source 1..1641: mol_type = other DNA
atgtaccggatgcagctgctgagctgtatcgccctgtctctggccctggtcacaaatagcgcccctaccagcagcagcaccaagaaaacccagctgcaactggaacacctcctgctggacctccagatgatcctgaacggcatcaacaactacaagaaccccaagctgacccggatgctgaccttcaagttctacatgcccaagaaggccaccgagctgaagcacctccagtgcctggaagaggaactgaagcccctggaagaagtgctgaatctggcccagagcaagaacttccacctgaggccaagggacctgatctccaacatcaacgtgatcgtgctggaactgaaaggcagcgagacaaccttcatgtgcgagtacgccgacgagacagctaccatcgtggaatttctgaatcggtggatcaccttctgccagagcatcatcagcaccctgacacatatgttcccacaggatcgacccttcgaggacacctgtcatggaaaccccagccactactatgacaaggctgtcaggaggtgctgttaccgctgccccatggggctgttcccgacacagcagtgcccacagaggcctactgactgcaggaagcagtgtgagcctgactactacctggatgaggccgaccgctgtacagcctgcgtgacttgttctcgagacgacctcgtggagaagacgccgtgtgcatggaactcctcccgtgtctgcgaatgtcgacccggcatgttctgttccacgtctgccgtcaactcctgtgcccgctgcttcttccattctgtctgtccggcagggatgattgtcaagttcccaggcacggcgcagaagaacacggtctgtgagccggcttccccaggggtcagccctgcctgtgccagcccagagaactgcaaggaaccctccagtggcaccatcccccaggccaagcccaccccggtgtccccagcaacctccagtgccagcaccatgcctgtaagagggggcacccgcctcgcccaggaagctgcttctaaactgacgagggctcccgactctccctcctctgtgggaaggcctagttcagatccaggtctgtccccaacacagccatgcccagaggggtctggtgattgcagaaagcagtgtgagcccgactactacctggacgaggccggccgctgcacggcctgcgtgagctgttctcgagatgaccttgtggagaagacgccatgtgcatggaactcctcccgcacctgcgaatgtcgacctggcatgatctgtgccacatcagccaccaactcctgtgcccgctgtgtcccctacccaatctgtgcagcagagacggtcaccaagccccaggatatggctgagaaggacaccacctttgaggcgccacccctggggacccagccggactgcaaccccaccccagagaatggcgaggcgcctgccagcaccagccccactcagagcttgctggtggactcccaggccagtaagacgctgcccatcccaaccagcgctcccgtcgctctctcctccacggggaagcccgttctggatgcagggccagtgctcttctgggtgatcctggtgttggttgtggtggtcggctccagcgccttcctcctgtgccaccggagg

SEQ ID NO: 4256 - DNA, 29 bp, synthetic construct
  source 1..29: mol_type = other DNA
ggggggggggggggggggggggggggggg

SEQ ID NO: 4257 - DNA, 669 bp, synthetic construct
  source 1..669: mol_type = other DNA
cagagcttcggcctgctggaccccaagctgtgctacctgctggatggcatcctgttcatctacggcgtgatcctgaccgccctgttcctgagagtgagattcagcagaagcgccgacgcccctgcctaccagcagggacagaaccaactgtacaacgagctgaacctgggcagacgggaagagtacgacgtgctggacagacggagaggcagggaccctgagatgggcggaaagccccagcggagaagaaacccccaggaaggactgtataacgaactccagagagacagaatggccgaagcctacagcgagatcggcatgagaggcgagcggagaagaggcaagggccacgatggcctgtaccagggcctgagcaccgccaccagagacacctatgacgccctgcacatgcaggccctgcctccaagagaattcggtggatctggattcaatgtgctgatggtgcacagaagaagccacaccggcgagaggcccttccagtgtaatcagtgcggagccagcttcacccagagaggcaatctgctgcggcacatcagactgcacacaggcgagcggcctttcagatgccacctgtgcaattacgcctgccagagaagagatgccctgaccgcctctgccgaggccagacatattagagccgaaatgggc

SEQ ID NO: 4258 - DNA, 666 bp, synthetic construct
  source 1..666: mol_type = other DNA
cagagttttgggttgttggaccctaaattgtgctatctgttggacggaatcctgttcatttacggagtgatcctgaccgcattgttcctgcgggttagattttccagatccgcagacgcacccgcttaccaacaagggcagaaccaactctacaatgaacttaatttggggcggagggaagagtacgacgttctggacagaaggaggggacgagatcccgagatgggcggaagacctcagcgaaggagaaatccgcaagaggggctttataacgaactccagagagatagaatggcagaagcctatagtgagattgggatgagaggagaaaggaggaggggtagaggtcacgatgggttgtaccaaggattgagcacagccactagagatacctatgatgcgctccacatgcaggccctgccgccaagagggcccggaggcagctttaacgttctgatggtccaccgccgcagccatacaggcgaaagacctttccaatgcaaccagtgcggggcctcttttacccagaggggaaacctgctgagacacattcggctgcacaccggggaaagacccttcaggtgtcacctgtgtaactatgcctgtcagcggcgggatgctctgacagcttctgctgaagcccgccacatcagagctgagatggga

SEQ ID NO: 4259 - DNA, 429 bp, synthetic construct
  source 1..429: mol_type = other DNA
cagagcttcggcctgctggaccccaagctgtgctacctgctggatggcatcctgttcatctacggcgtgatcctgaccgccctgttcctgagagtgagattcagcagaagcgccgacgcccctgcctaccagcagggacagaaccaactgtacaacgagctgaacctgggcagacgggaagagtacgacgtgctggacagacggagaggcagggaccctgagatgggcggaaagccccagcggagaagaaacccccaggaaggactgtataacgaactccagagagacagaatggccgaagcctacagcgagatcggcatgagaggcgagcggagaagaggcaagggccacgatggcctgtaccagggcctgagcaccgccaccagagacacctatgacgccctgcacatgcaggccctgcctccaaga

SEQ ID NO: 4260 - DNA, 429 bp, synthetic construct
  source 1..429: mol_type = other DNA
cagagttttgggttgttggaccctaaattgtgctatctgttggacggaatcctgttcatttacggagtgatcctgaccgcattgttcctgcgggttagattttccagatccgcagacgcacccgcttaccaacaagggcagaaccaactctacaatgaacttaatttggggcggagggaagagtacgacgttctggacagaaggaggggacgagatcccgagatgggcggaagacctcagcgaaggagaaatccgcaagaggggctttataacgaactccagagagatagaatggcagaagcctatagtgagattgggatgagaggagaaaggaggaggggtagaggtcacgatgggttgtaccaaggattgagcacagccactagagatacctatgatgcgctccacatgcaggccctgccgccaaga

SEQ ID NO: 4261 - DNA, 234 bp, synthetic construct
  source 1..234: mol_type = other DNA
ggtggatctggattcaatgtgctgatggtgcacagaagaagccacaccggcgagaggcccttccagtgtaatcagtgcggagccagcttcacccagagaggcaatctgctgcggcacatcagactgcacacaggcgagcggcctttcagatgccacctgtgcaattacgcctgccagagaagagatgccctgaccgcctctgccgaggccagacatattagagccgaaatgggc

SEQ ID NO: 4262 - DNA, 231 bp, synthetic construct
  source 1..231: mol_type = other DNA
ggaggcagctttaacgttctgatggtccaccgccgcagccatacaggcgaaagacctttccaatgcaaccagtgcggggcctcttttacccagaggggaaacctgctgagacacattcggctgcacaccggggaaagacccttcaggtgtcacctgtgtaactatgcctgtcagcggcgggatgctctgacagcttctgctgaagcccgccacatcagagctgagatggga

SEQ ID NO: 4263 - DNA, 231 bp, synthetic construct; identical to SEQ ID NO: 4262
  source 1..231: mol_type = other DNA

SEQ ID NO: 4264 - DNA, 327 bp, synthetic construct
  source 1..327: mol_type = other DNA
ggaggaggcgtccaagtcgaaaccattagtcccggcgatggcagaacatttcctaaaaggggacaaacatgtgtcgtccattatacaggcatgttggaggacggcaaaaaggtggacagtagtagagatcgcaataaacctttcaaattcatgttgggaaaacaagaagtcattaggggatgggaggagggcgtggctcaaatgtccgtcggccaacgcgctaagctcaccatcagccccgactacgcatacggcgctaccggacatcccggaattattccccctcacgctaccttggtgtttgacgtcgaactgttgaagctcggg

SEQ ID NO: 4265 - DNA, 444 bp, synthetic construct
  source 1..444: mol_type = other DNA
ctgggagagcctcagctgtgctatatcctggacgccatcctgtttctgtacggcatcgtgctgaccctgctgtactgcggtggatctggattcaatgtgctgatggtgcacagaagaagccacaccggcgagaggcccttccagtgtaatcagtgcggagccagcttcacccagagaggcaatctgctgcggcacatcagactgcacacaggcgagcggcctttcagatgccacctgtgcaattacgcctgccagagaagagatgccctgaccgcctctgccgaggccagacatattagagccgaaatgggctctggccggctgaagatccaagtgcggaaggccgccatcaccagctacgagaaatccgacggcgtgtacaccggcctgagcaccagaaatcaagagacatacgagacactgaagcacgaaaagcctccacaa

SEQ ID NO: 4266 - DNA, 435 bp, synthetic construct
  source 1..435: mol_type = other DNA
ctcggagaaccacagctctgttacattctggatgctatcctgttcctctatgggatcgtcctgacactcctgtattgcggaggcagctttaacgttctgatggtccaccgccgcagccatacaggcgaaagacctttccaatgcaaccagtgcggggcctcttttacccagaggggaaacctgctgagacacattcggctgcacaccggggaaagacccttcaggtgtcacctgtgtaactatgcctgtcagcggcgggatgctctgacagcttctgctgaagcccgccacatcagagctgagatgggaagactcaaaattcaagttcgcaaagccgccattacctcttacgagaagagtgatggggtgtacacaggactgtctacccggaatcaagaaacctacgaaaccctcaaacatgagaagccacctcag

SEQ ID NO: 4267 - DNA, 666 bp, synthetic construct
  source 1..666: mol_type = other DNA
cagagcttcggcctgctggaccccaagctgtgctacctgctggatggcatcctgttcatctacggcgtgatcctgaccgccctgttcctgagagtgagattcagcagaagcgccgacgcccctgcctaccagcagggacagaaccaactgtacaacgagctgaacctgggcagacgggaagagtacgacgtgctggacagacggagaggcagggaccctgagatgggcggaaagccccagcggagaagaaacccccaggaaggactgtataacgaactccagagagacagaatggccgaagcctacagcgagatcggcatgagaggcgagcggagaagaggcaagggccacgatggcctgtaccagggcctgagcaccgccaccagagacacctatgacgccctgcacatgcaggccctgcctccaagagaattcggaggcagctttaacgttctgatggtccaccgccgcagccatacaggcgaaagacctttccaatgcaaccagtgcggggcctcttttacccagaggggaaacctgctgagacacattcggctgcacaccggggaaagacccttcaggtgtcacctgtgtaactatgcctgtcagcggcgggatgctctgacagcttctgctgaagcccgccacatcagagctgagatggga

SEQ ID NO: 4268 - DNA, 762 bp, synthetic construct
  source 1..762: mol_type = other DNA
cagagttttgggttgttggaccctaaattgtgctatctgttggacggaatcctgttcatttacggagtgatcctgaccgcattgttcctgcgggttagattttccagatccgcagacgcacccgcttaccaacaagggcagaaccaactctacaatgaacttaatttggggcggagggaagagtacgacgttctggacagaaggaggggacgagatcccgagatgggcggaagacctcagcgaaggagaaatccgcaagaggggctttataacgaactccagagagatagaatggcagaagcctatagtgagattgggatgagaggagaaaggaggaggggtagaggtcacgatgggttgtaccaaggattgagcacagccactagagatacctatgatgcgctccacatgcaggccctgccgccaagagggcccggaggaggcgtccaagtcgaaaccattagtcccggcgatggcagaacatttcctaaaaggggacaaacatgtgtcgtccattatacaggcatgttggaggacggcaaaaaggtggacagtagtagagatcgcaataaacctttcaaattcatgttgggaaaacaagaagtcattaggggatgggaggagggcgtggctcaaatgtccgtcggccaacgcgctaagctcaccatcagccccgactacgcatacggcgctaccggacatcccggaattattccccctcacgctaccttggtgtttgacgtcgaactgttgaagctcggg

SEQ ID NO: 4269 - DNA, 29 bp, synthetic construct
  source 1..29: mol_type = other DNA
ggggggggggggggggggggggggggggg

SEQ ID NO: 4270 - DNA, 336 bp, synthetic construct
  source 1..336: mol_type = other DNA
agagtgaagttcagcagaagcgccgacgcccctgcctaccagcagggacagaaccaactgtacaacgagctgaacctgggcagacgggaagagtacgacgtgctggacaagcggagaggcagggaccctgagatgggcggaaagccccggagaaagaacccccaggaaggactgtataacgaactccagaaagacaagatggccgaagcctacagcgagatcggcatgaagggcgagcggagaagaggcaagggccacgatggcctgtaccagggcctgagcaccgccaccaaggacacctatgacgccctgcacatgcaggccctgcctccaaga

SEQ ID NO: 4271 - DNA, 336 bp, synthetic construct
  source 1..336: mol_type = other DNA
cgggttaagttttccagatccgcagacgcacccgcttaccaacaagggcagaaccaactctacaatgaacttaatttggggcggagggaagagtacgacgttctggacaaaaggaggggacgagatcccgagatgggcggaaagcctcgaaggaagaatccgcaagaggggctttataacgaactccagaaagataaaatggcagaagcctatagtgagattgggatgaagggagaaaggaggaggggtaaaggtcacgatgggttgtaccaaggattgagcacagccactaaagatacctatgatgcgctccacatgcaggccctgccgccaaga

SEQ ID NO: 4272 - DNA, 714 bp, synthetic construct
  source 1..714: mol_type = other DNA
atccagaaccctgatcctgccgtgtaccagctgcgggatagcaagagcagcgacaagagcgtgtgtctgttcaccgacttcgacagccagaccaacgtgtcccagagcaaggactccgacgtgtacatcaccgataagaccgtgctggacatgcggagcatggacttcaagagcaactccgccgtggcctggtccaacaagtccgatttcgcctgcgccaacgccttcaacaacagcattatccccgaggacacattcttcccaagccccgagagcagctgcggtacccagagttttgggttgttggaccctaaattgtgctatctgttggacggaatcctgttcatttacggagtgatcctgaccgcattgttcctgcgggttaagttttccagatccgcagacgcacccgcttaccaacaagggcagaaccaactctacaatgaacttaatttggggcggagggaagagtacgacgttctggacaaaaggaggggacgagatcccgagatgggcggaaagcctcgaaggaagaatccgcaagaggggctttataacgaactccagaaagataaaatggcagaagcctatagtgagattgggatgaagggagaaaggaggaggggtaaaggtcacgatgggttgtaccaaggattgagcacagccactaaagatacctatgatgcgctccacatgcaggccctgccgccaaga

SEQ ID NO: 4273 - DNA, 825 bp, synthetic construct
  source 1..825: mol_type = other DNA
gaggacctgaagaacgtgttcccacctgaggtggccgtgttcgagcctagcgaggccgagatcagccacacccagaaagccaccctcgtgtgcctggctaccggcttctaccccgaccatgtggaactgtcttggtgggtcaacggcaaagaggtgcacagcggcgtgtctaccgacccccagccactgaaagaacagcccgccctgaacgacagccggtactgcctgagcagcagactgagagtgtccgccaccttctggcagaacccccggaaccacttcagatgccaggtgcagttctacggcctgagcgagaacgacgagtggacccaggacagagccaagcccgtgacccagatcgtgtctgccgaagcctggggcagagccgattgcggatcccagagcttcggcctgctggaccccaagctgtgctacctgctggatggcatcctgttcatctacggcgtgatcctgaccgccctgttcctgagagtgaagttcagcagaagcgccgacgcccctgcctaccagcagggacagaaccaactgtacaacgagctgaacctgggcagacgggaagagtacgacgtgctggacaagcggagaggcagggaccctgagatgggcggaaagccccggagaaagaacccccaggaaggactgtataacgaactccagaaagacaagatggccgaagcctacagcgagatcggcatgaagggcgagcggagaagaggcaagggccacgatggcctgtaccagggcctgagcaccgccaccaaggacacctatgacgccctgcacatgcaggccctgcctccaaga

SEQ ID NO: 4274 - DNA, 426 bp, synthetic construct
  source 1..426: mol_type = other DNA
cagagcttcggcctgctggaccccaagctgtgctacctgctggatggcatcctgttcatctacggcgtgatcctgaccgccctgttcctgagagtgaagttcagcagaagcgccgacgcccctgcctaccagcagggacagaaccaactgtacaacgagctgaacctgggcagacgggaagagtacgacgtgctggacaagcggagaggcagggaccctgagatgggcggaaagccccggagaaagaacccccaggaaggactgtataacgaactccagaaagacaagatggccgaagcctacagcgagatcggcatgaagggcgagcggagaagaggcaagggccacgatggcctgtaccagggcctgagcaccgccaccaaggacacctatgacgccctgcacatgcaggccctgcctccaaga

SEQ ID NO: 4275 - DNA, 426 bp, synthetic construct; identical to SEQ ID NO: 4274
  source 1..426: mol_type = other DNA

SEQ ID NO: 4276 - DNA, 336 bp, synthetic construct; identical to SEQ ID NO: 4271
  source 1..336: mol_type = other DNA

SEQ ID NO: 4277 - DNA, 426 bp, synthetic construct
  source 1..426: mol_type = other DNA
cagagttttgggttgttggaccctaaattgtgctatctgttggacggaatcctgttcatttacggagtgatcctgaccgcattgttcctgcgggttaagttttccagatccgcagacgcacccgcttaccaacaagggcagaaccaactctacaatgaacttaatttggggcggagggaagagtacgacgttctggacaaaaggaggggacgagatcccgagatgggcggaaagcctcgaaggaagaatccgcaagaggggctttataacgaactccagaaagataaaatggcagaagcctatagtgagattgggatgaagggagaaaggaggaggggtaaaggtcacgatgggttgtaccaaggattgagcacagccactaaagatacctatgatgcgctccacatgcaggccctgccgccaaga

SEQ ID NO: 4278 - DNA, 549 bp, synthetic construct
  source 1..549: mol_type = other DNA
cagagcttcggcctgctggaccccaagctgtgctacctgctggatggcatcctgttcatctacggcgtgatcctgaccgccctgttcctgaggagtaagaggagcaggctcctgcacagtgactacatgaacatgactccacgccgccccggacccacccgcaagcattaccagccctatgccccaccacgcgacttcgcagcctatcgctccagagtgaagttcagcagaagcgccgacgcccctgcctaccagcagggacagaaccaactgtacaacgagctgaacctgggcagacgggaagagtacgacgtgctggacaagcggagaggcagggaccctgagatgggcggaaagccccggagaaagaacccccaggaaggactgtataacgaactccagaaagacaagatggccgaagcctacagcgagatcggcatgaagggcgagcggagaagaggcaagggccacgatggcctgtaccagggcctgagcaccgccaccaaggacacctatgacgccctgcacatgcaggccctgcctccaaga

SEQ ID NO: 4279 - DNA, 552 bp, synthetic construct
  source 1..552: mol_type = other DNA
cagagcttcggcctgctggaccccaagctgtgctacctgctggatggcatcctgttcatctacggcgtgatcctgaccgccctgttcctgaaacggggcagaaagaaactcctgtatatattcaaacaaccatttatgagaccagtacaaactactcaagaggaagatggctgtagctgccgatttccagaagaagaagaaggaggatgtgaactgagagtgaagttcagcagaagcgccgacgcccctgcctaccagcagggacagaaccaactgtacaacgagctgaacctgggcagacgggaagagtacgacgtgctggacaagcggagaggcagggaccctgagatgggcggaaagccccggagaaagaacccccaggaaggactgtataacgaactccagaaagacaagatggccgaagcctacagcgagatcggcatgaagggcgagcggagaagaggcaagggccacgatggcctgtaccagggcctgagcaccgccaccaaggacacctatgacgccctgcacatgcaggccctgcctccaaga

SEQ ID NO: 4280 - DNA, 549 bp, synthetic construct
  source 1..549: mol_type = other DNA
cagagttttgggttgttggaccctaaattgtgctatctgttggacggaatcctgttcatttacggagtgatcctgaccgcattgttcctgaggagcaagcggtcacggctgctccacagcgattacatgaatatgacaccacgaagaccgggtcctactcgcaaacactaccaaccctacgcacctccccgcgactttgcagcgtaccgatctcgggttaagttttccagatccgcagacgcacccgcttaccaacaagggcagaaccaactctacaatgaacttaatttggggcggagggaagagtacgacgttctggacaaaaggaggggacgagatcccgagatgggcggaaagcctcgaaggaagaatccgcaagaggggctttataacgaactccagaaagataaaatggcagaagcctatagtgagattgggatgaagggagaaaggaggaggggtaaaggtcacgatgggttgtaccaaggattgagcacagccactaaagatacctatgatgcgctccacatgcaggccctgccgccaaga

SEQ ID NO: 4281 - DNA, 549 bp, synthetic construct; identical to SEQ ID NO: 4280
  source 1..549: mol_type = other DNA

SEQ ID NO: 4282 - DNA, 990 bp, synthetic construct
  source 1..990: mol_type = other DNA
cagagcttcggcctgctggaccccaagctgtgctacctgctggatggcatcctgttcatctacggcgtgatcctgaccgccctgttcctgcacagacgggcctgtcggaagcggatcagacagaaactgcacctgtgctaccccgtgcagaccagccagcctaaactggaactggtggacagcagacccagaagaagcagcacccagctgagaagcggagcctctgtgacagaacctgtggccgaagaacggggcctgatgtctcagcctctgatggaaacctgccactctgtgggagccgcctaccttgagtctctgcccctgcaagatgcctctcctgctggcggaccaagctctccaagggatctgcctgagcctagagtgtccaccgagcacaccaacaacaagatcgagaaaatctacattatgaaggccgacaccgtgatcgtgggcaccgtgaaagctgagttgcccgaaggcagaggactggccggacctgctgaacctgagctggaagaagaactggaagccgatcacacccctcactaccccgagcaagaaaccgaacctcctctgggcagctgctccgatgtgatgctgtccgttgaggaagagggcaaagaggaccctctgcctacagccgcttctggaaaaagagtgaagttcagcagaagcgccgacgcccctgcctaccagcagggacagaaccaactgtacaacgagctgaacctgggcagacgggaagagtacgacgtgctggacaagcggagaggcagggaccctgagatgggcggaaagccccggagaaagaacccccaggaaggactgtataacgaactccagaaagacaagatggccgaagcctacagcgagatcggcatgaagggcgagcggagaagaggcaagggccacgatggcctgtaccagggcctgagcaccgccaccaaggacacctatgacgccctgcacatgcaggccctgcctccaaga

SEQ ID NO: 4283 - DNA, 990 bp, synthetic construct
  source 1..990: mol_type = other DNA
cagagttttgggttgttggaccctaaattgtgctatctgttggacggaatcctgttcatttacggagtgatcctgaccgcattgttcctgcatagaagggcctgtagaaagagaatccggcaaaagctgcatctctgttatcctgtgcagacctctcagcccaagttggagctggtggatagccggcctagacggtctagtacacagctgagatccggggccagtgtgactgaaccagttgctgaggaacgcggactgatgagccagccactcatggaaacatgtcacagcgtgggcgctgcctatctcgaaagcctgcctctccaagacgcttctccggcaggcggtccatcttctcctcgggatcttcccgagccacgggtgtccacagaacatacaaacaacaaaattgagaaaatctatattatgaaggctgatacggtcatcgtcgggacagtgaaagccgaactgcctgaaggacgtggccttgctggaccagccgaaccagaactcgaagaggaacttgaggccgaccatacaccacactatcctgagcaagagacagagccaccactgggctcttgcagcgacgtgatgctgagtgtggaagaggaaggcaaagaagatcccctgccaaccgctgcctctggcaaacgggttaagttttccagatccgcagacgcacccgcttaccaacaagggcagaaccaactctacaatgaacttaatttggggcggagggaagagtacgacgttctggacaaaaggaggggacgagatcccgagatgggcggaaagcctcgaaggaagaatccgcaagaggggctttataacgaactccagaaagataaaatggcagaagcctatagtgagattgggatgaagggagaaaggaggaggggtaaaggtcacgatgggttgtaccaaggattgagcacagccactaaagatacctatgatgcgctccacatgcaggccctgccgccaaga

SEQ ID NO: 4284 - DNA, 483 bp, synthetic construct
  source 1..483: mol_type = other DNA
cagagcttcggcctgctggaccccaagctgtgctacctgctggatggcatcctgttcatctacggcgtgatcctgaccgccctgttcctgcacctgtgctgtagaagaaggcgggccagactgcggtttatgaagcagttctacaagagagtgaagttcagcagaagcgccgacgcccctgcctaccagcagggacagaaccaactgtacaacgagctgaacctgggcagacgggaagagtacgacgtgctggacaagcggagaggcagggaccctgagatgggcggaaagccccggagaaagaacccccaggaaggactgtataacgaactccagaaagacaagatggccgaagcctacagcgagatcggcatgaagggcgagcggagaagaggcaagggccacgatggcctgtaccagggcctgagcaccgccaccaaggacacctatgacgccctgcacatgcaggccctgcctccaaga

SEQ ID NO: 4285 - DNA, 522 bp, synthetic construct
  source 1..522: mol_type = other DNA
cagagttttgggttgttggaccctaaattgtgctatctgttggacggaatcctgttcatttacggagtgatcctgaccgcattgttcctgctgtactgcaaccaccggaacaggcggagagtgtgcaagtgccctagacctgtggtcaagagcggcgacaagcctagcctgagcgccagatatgttcgggttaagttttccagatccgcagacgcacccgcttaccaacaagggcagaaccaactctacaatgaacttaatttggggcggagggaagagtacgacgttctggacaaaaggaggggacgagatcccgagatgggcggaaagcctcgaaggaagaatccgcaagaggggctttataacgaactccagaaagataaaatggcagaagcctatagtgagattgggatgaagggagaaaggaggaggggtaaaggtcacgatgggttgtaccaaggattgagcacagccactaaagatacctatgatgcgctccacatgcaggccctgccgccaaga

SEQ ID NO: 4286 - DNA, 546 bp, synthetic construct
  source 1..546: mol_type = other DNA
cagagcttcggcctgctggaccccaagctgtgctacctgctggatggcatcctgttcatctacggcgtgatcctgaccgccctgttcctgtgcgtgcggtgcagacaccggcggagacaggccgagagaatgagccagatcaagagactgctgtccgagaagaaaacctgccagtgcccccacagattccagaaaacatgcagccccatcagagtgaagttcagcagaagcgccgacgcccctgcctaccagcagggacagaaccaactgtacaacgagctgaacctgggcagacgggaagagtacgacgtgctggacaagcggagaggcagggaccctgagatgggcggaaagccccggagaaagaacccccaggaaggactgtataacgaactccagaaagacaagatggccgaagcctacagcgagatcggcatgaagggcgagcggagaagaggcaagggccacgatggcctgtaccagggcctgagcaccgccaccaaggacacctatgacgccctgcacatgcaggccctgcctccaaga

SEQ ID NO: 4287 - DNA, 546 bp, synthetic construct
  source 1..546: mol_type = other DNA
cagagttttgggttgttggaccctaaattgtgctatctgttggacggaatcctgttcatttacggagtgatcctgaccgcattgttcctgtgtgtgaggtgccgccatcgacggaggcaggcagaaagaatgtcccagataaagcggttgcttagtgaaaagaaaacctgccagtgtcctcaccgattccagaagacgtgctcccccattcgggttaagttttccagatccgcagacgcacccgcttaccaacaagggcagaaccaactctacaatgaacttaatttggggcggagggaagagtacgacgttctggacaaaaggaggggacgagatcccgagatgggcggaaagcctcgaaggaagaatccgcaagaggggctttataacgaactccagaaagataaaatggcagaagcctatagtgagattgggatgaagggagaaaggaggaggggtaaaggtcacgatgggttgtaccaaggattgagcacagccactaaagatacctatgatgcgctccacatgcaggccctgccgccaaga

SEQ ID NO: 4288 - DNA, 666 bp, synthetic construct
  source 1..666: mol_type = other DNA
cagagcttcggcctgctggaccccaagctgtgctacctgctggatggcatcctgttcatctacggcgtgatcctgaccgccctgttcctgagagtgagattcagcagaagcgccgacgcccctgcctaccagcagggacagaaccaactgtacaacgagctgaacctgggcagacgggaagagtacgacgtgctggacagacggagaggcagggaccctgagatgggcggaaagccccggagaagaaacccccaggaaggactgtataacgaactccagagagacagaatggccgaagcctacagcgagatcggcatgagaggcgagcggagaagaggcaagggccacgatggcctgtaccagggcctgagcaccgccaccagagacacctatgacgccctgcacatgcaggccctgcctccaagagaattcggtggatctggattcaatgtgctgatggtgcacagaagaagccacaccggcgagaggcccttccagtgtaatcagtgcggagccagcttcacccagagaggcaatctgctgcggcacatcagactgcacacaggcgagcggcctttcagatgccacctgtgcaattacgcctgccagagaagagatgccctgaccgcctctgccgaggccagacatattagagccgaaatgggc

SEQ ID NO: 4289 - DNA, 663 bp, synthetic construct
  source 1..663: mol_type = other DNA
cagagttttgggttgttggaccctaaattgtgctatctgttggacggaatcctgttcatttacggagtgatcctgaccgcattgttcctgcgggttagattttccagatccgcagacgcacccgcttaccaacaagggcagaaccaactctacaatgaacttaatttggggcggagggaagagtacgacgttctggacagaaggaggggacgagatcccgagatgggcggaagacctcgaaggagaaatccgcaagaggggctttataacgaactccagagagatagaatggcagaagcctatagtgagattgggatgagaggagaaaggaggaggggtagaggtcacgatgggttgtaccaaggattgagcacagccactagagatacctatgatgcgctccacatgcaggccctgccgccaagagggcccggaggcagctttaacgttctgatggtccaccgccgcagccatacaggcgaaagacctttccaatgcaaccagtgcggggcctcttttacccagaggggaaacctgctgagacacattcggctgcacaccggggaaagacccttcaggtgtcacctgtgtaactatgcctgtcagcggcgggatgctctgacagcttctgctgaagcccgccacatcagagctgagatggga

SEQ ID NO: 4290 - DNA, 426 bp, synthetic construct
  source 1..426: mol_type = other DNA
cagagcttcggcctgctggaccccaagctgtgctacctgctggatggcatcctgttcatctacggcgtgatcctgaccgccctgttcctgagagtgagattcagcagaagcgccgacgcccctgcctaccagcagggacagaaccaactgtacaacgagctgaacctgggcagacgggaagagtacgacgtgctggacagacggagaggcagggaccctgagatgggcggaaagccccggagaagaaacccccaggaaggactgtataacgaactccagagagacagaatggccgaagcctacagcgagatcggcatgagaggcgagcggagaagaggcaagggccacgatggcctgtaccagggcctgagcaccgccaccagagacacctatgacgccctgcacatgcaggccctgcctccaaga

SEQ ID NO: 4291 - DNA, 426 bp, synthetic construct
  source 1..426: mol_type = other DNA
cagagttttgggttgttggaccctaaattgtgctatctgttggacggaatcctgttcatttacggagtgatcctgaccgcattgttcctgcgggttagattttccagatccgcagacgcacccgcttaccaacaagggcagaaccaactctacaatgaacttaatttggggcggagggaagagtacgacgttctggacagaaggaggggacgagatcccgagatgggcggaagacctcgaaggagaaatccgcaagaggggctttataacgaactccagagagatagaatggcagaagcctatagtgagattgggatgagaggagaaaggaggaggggtagaggtcacgatgggttgtaccaaggattgagcacagccactagagatacctatgatgcgctccacatgcaggccctgccgccaaga

SEQ ID NO: 4292 - DNA, 663 bp, synthetic construct
  source 1..663: mol_type = other DNA
cagagcttcggcctgctggaccccaagctgtgctacctgctggatggcatcctgttcatctacggcgtgatcctgaccgccctgttcctgagagtgagattcagcagaagcgccgacgcccctgcctaccagcagggacagaaccaactgtacaacgagctgaacctgggcagacgggaagagtacgacgtgctggacagacggagaggcagggaccctgagatgggcggaaagccccggagaagaaacccccaggaaggactgtataacgaactccagagagacagaatggccgaagcctacagcgagatcggcatgagaggcgagcggagaagaggcaagggccacgatggcctgtaccagggcctgagcaccgccaccagagacacctatgacgccctgcacatgcaggccctgcctccaagagaattcggaggcagctttaacgttctgatggtccaccgccgcagccatacaggcgaaagacctttccaatgcaaccagtgcggggcctcttttacccagaggggaaacctgctgagacacattcggctgcacaccggggaaagacccttcaggtgtcacctgtgtaactatgcctgtcagcggcgggatgctctgacagcttctgctgaagcccgccacatcagagctgagatggga

SEQ ID NO: 4293 - DNA, 759 bp, synthetic construct
  source 1..759: mol_type = other DNA
cagagttttgggttgttggaccctaaattgtgctatctgttggacggaatcctgttcatttacggagtgatcctgaccgcattgttcctgcgggttagattttccagatccgcagacgcacccgcttaccaacaagggcagaaccaactctacaatgaacttaatttggggcggagggaagagtacgacgttctggacagaaggaggggacgagatcccgagatgggcggaagacctcgaaggagaaatccgcaagaggggctttataacgaactccagagagatagaatggcagaagcctatagtgagattgggatgagaggagaaaggaggaggggtagaggtcacgatgggttgtaccaaggattgagcacagccactagagatacctatgatgcgctccacatgcaggccctgccgccaagagggcccggaggaggcgtccaagtcgaaaccattagtcccggcgatggcagaacatttcctaaaaggggacaaacatgtgtcgtccattatacaggcatgttggaggacggcaaaaaggtggacagtagtagagatcgcaataaacctttcaaattcatgttgggaaaacaagaagtcattaggggatgggaggagggcgtggctcaaatgtccgtcggccaacgcgctaagctcaccatcagccccgactacgcatacggcgctaccggacatcccggaattattccccctcacgctaccttggtgtttgacgtcgaactgttgaagctcggg

SEQ ID NO: 4294 - DNA, 4152 bp, synthetic construct
  source 1..4152: mol_type = other DNA
atggccttaccagtgaccgccttgctcctgccgctggccttgctgctccacgccgccaggccggacatccagatgacacagagccctagcagcctgtctgccagcgtgggagacagagtgaccatcacatgcaaggccagcgaccacatcaacaactggctggcctggtatcagcagaagcctggacaggcccctaagctgctgatctacggcgctaccacactggaaacaggcgtgcccagcagattttctggcagcggctctggcaccgactacaccctgacaatatccagcctccagcctgaggacttcgccacctactactgtcagcagagctggaacaccccttggacattcggccagggcaccaagctggaaatcaagagactcgaggacctgaagaacgtgttcccacctgaggtggccgtgttcgagcctagcgaggccgagatcagccacacccagaaagccaccctcgtgtgcctggctaccggcttctaccccgaccatgtggaactgtcttggtgggtcaacggcaaagaggtgcacagcggcgtgtctaccgacccccagccactgaaagaacagcccgccctgaacgacagccggtactgcctgagcagcagactgagagtgtccgccaccttctggcagaacccccggaaccacttcagatgccaggtgcagttctacggcctgagcgagaacgacgagtggacccaggacagagccaagcccgtgacccagatcgtgtctgccgaagcctggggcagagccgattgcggatcccagagcttcggcctgctggaccccaagctgtgctacctgctggatggcatcctgttcatctacggcgtgatcctgaccgccctgttcctgagagtgaagttcagcagaagcgccgacgcccctgcctaccagcagggacagaaccaactgtacaacgagctgaacctgggcagacgggaagagtacgacgtgctggacaagcggagaggcagggaccctgagatgggcggaaagccccggagaaagaacccccaggaaggactgtataacgaactccagaaagacaagatggccgaagcctacagcgagatcggcatgaagggcgagcggagaagaggcaagggccacgatggcctgtaccagggcctgagcaccgccaccaaggacacctatgacgccctgcacatgcaggccctgcctccaagaagggccaagcgatctggatctggagcaacaaacttctcactactcaaacaagcaggtgacgtggaggagaatcccgggcctactagtatggactggatttggcgcatccttttccttgtcggcgctgctaccggcgcgcattccttcgaacaagttcagcttcaacagcctggcgctgagctggtcaaacctggcgcttctgtgaagatgagctgcaaagccagcggctacgccttcagcagctactggatcaactggatgaagcagaaacccggccagggactcgaatggatcggccaaatctatcccggcgacggcgacaccaactacaacggcaagttcaagggcagagccacactgaccgccgatacctctagcagcacagcctacatgcagctgagcagcctgaccagcgaagatagcgccgtgtacttctgtgcccggtccatcacaacagtcgtgggctgcgctatggactattggggccagggaacaagcgtgaccgtgtctagtacgcgtatccagaaccctgatcctgccgtgtaccagctgcgggatagcaagagcagcgacaagagcgtgtgtctgttcaccgacttcgacagccagaccaacgtgtcccagagcaaggactccgacgtgtacatcaccgataagaccgtgctggacatgcggagcatggacttcaagagcaactccgccgtggcctggtccaacaagtccgatttcgcctgcgccaacgccttcaacaacagcattatccccgaggacacattcttcccaagccccgagagcagctgcggtaccatcactcaaggtttggcagtgtcaaccatctcatcattctttccacctggctaccaagtgtccttctgcctggtcatggtgctgctgttcgccgtggataccggcctgtacttcagcgtcaagaccaacatccggtccagcaccagagactggaaggaccacaagttcaagtggcggaaggaccctcaggacaagagggccaagcgatctggatctggagcaacaaacttctcactactcaaacaagcaggtgacgtggaggagaatcccgggccttctagaggccatatgtgtcaccagcagctggtcatcagctggttcagcctggtgttcctggcctctcctctggtggctatctgggagctgaagaaagacgtgtacgtggtggaactggactggtatcccgatgctcctggcgagatggtggtgctgacctgcgatacccctgaagaggacggcatcacctggacactggatcagtctagcgaggtgctcggcagcggcaagaccctgaccatccaagtgaaagagtttggcgacgccggccagtacacctgtcacaaaggcggagaagtgctgagccacagcctgctgctgctccacaagaaagaggatggcatttggagcaccgacatcctgaaggaccagaaagagcccaagaacaagaccttcctgagatgcgaggccaagaactacagcggcagattcacctgttggtggctgaccaccatcagcaccgacctgaccttcagcgtgaagtccagcagaggcagcagtgatcctcagggcgttacatgtggcgctgccacactgtctgccgaaagagtgcggggcgacaacaaagaatacgagtacagcgtggaatgccaagaggacagcgcctgtccagccgccgaagagtctctgcctatcgaagtgatggtggacgccgtgcacaagctgaagtacgagaactacacctccagctttttcatccgggacatcatcaagcccgatcctccaaagaatctccagctgaagcctctgaagaacagcagacaggtggaagtgtcctgggagtaccccgacacctggtctacaccccacagctacttcagcctgaccttttgcgtgcaagtgcagggcaagtccaagcgcgagaaaaaggaccgggtgttcaccgacaagaccagcgccaccgtgatctgccggaagaatgccagcatcagcgtcagagcccaggatcggtactacagcagctcttggagcgagtgggccagcgttccatgttctggtggcggaggatctggcggaggtggaagcggcggaggcggatcaagaaatctgcctgtggctacccctgatcctggcatgttcccttgtctgcaccacagccagaacctgctgagagccgtgtccaacatgctccagaaggccagacagacccttgagttctacccctgcaccagcgaggaaatcgaccacgaggacatcaccaaggataagaccagcaccgtggaagcctgcctgcctctggaactgaccaagaacgagagctgcctgaacagccgggaaaccagcttcatcaccaacggcagctgtctggcttccagaaagaccagctttatgatggccctgtgcctgagcagcatctacgaggacctgaagatgtaccaggtcgagttcaagaccatgaacgccaagctgctgatggaccccaagagacagattttcctggaccagaatatgctggccgtgatcgacgagctgatgcaggccctgaacttcaacagcgagacagtgccccagaagtctagcctggaagaacccgacttctacaagaccaagatcaagctgtgcatcctgctgcacgccttcagaatcagagccgtgaccatcgacagagtgatgagctacctgaacgccagcggctctaagatcgaagtgatgtaccctcctccttacctggacaacgagaagtccaacggcaccatcatccacgtgaagggcaagcacctgtgtccttctccactgttccccggacctagcaagcctttctgggtgctcgttgttgttggcggcgtgctggcctgttacagcctgctggttaccgtggccttcatcatcttttgggtccgaagcaagcggagc

SEQ ID NO: 4295 - DNA, 1626 bp, synthetic construct
  source 1..1626: mol_type = other DNA
atgtgtcaccagcagctggtcatcagctggttcagcctggtgttcctggcctctcctctggtggctatctgggagctgaagaaagacgtgtacgtggtggaactggactggtatcccgatgctcctggcgagatggtggtgctgacctgcgatacccctgaagaggacggcatcacctggacactggatcagtctagcgaggtgctcggcagcggcaagaccctgaccatccaagtgaaagagtttggcgacgccggccagtacacctgtcacaaaggcggagaagtgctgagccacagcctgctgctgctccacaagaaagaggatggcatttggagcaccgacatcctgaaggaccagaaagagcccaagaacaagaccttcctgagatgcgaggccaagaactacagcggcagattcacctgttggtggctgaccaccatcagcaccgacctgaccttcagcgtgaagtccagcagaggcagcagtgatcctcagggcgttacatgtggcgctgccacactgtctgccgaaagagtgcggggcgacaacaaagaatacgagtacagcgtggaatgccaagaggacagcgcctgtccagccgccgaagagtctctgcctatcgaagtgatggtggacgccgtgcacaagctgaagtacgagaactacacctccagctttttcatccgggacatcatcaagcccgatcctccaaagaatctccagctgaagcctctgaagaacagcagacaggtggaagtgtcctgggagtaccccgacacctggtctacaccccacagctacttcagcctgaccttttgcgtgcaagtgcagggcaagtccaagcgcgagaaaaaggaccgggtgttcaccgacaagaccagcgccaccgtgatctgccggaagaatgccagcatcagcgtcagagcccaggatcggtactacagcagctcttggagcgagtgggccagcgttccatgttctggtggcggaggatctggcggaggtggaagcggcggaggcggatcaagaaatctgcctgtggctacccctgatcctggcatgttcccttgtctgcaccacagccagaacctgctgagagccgtgtccaacatgctccagaaggccagacagacccttgagttctacccctgcaccagcgaggaaatcgaccacgaggacatcaccaaggataagaccagcaccgtggaagcctgcctgcctctggaactgaccaagaacgagagctgcctgaacagccgggaaaccagcttcatcaccaacggcagctgtctggcttccagaaagaccagctttatgatggccctgtgcctgagcagcatctacgaggacctgaagatgtaccaggtcgagttcaagaccatgaacgccaagctgctgatggaccccaagagacagattttcctggaccagaatatgctggccgtgatcgacgagctgatgcaggccctgaacttcaacagcgagacagtgccccagaagtctagcctggaagaacccgacttctacaagaccaagatcaagctgtgcatcctgctgcacgccttcagaatcagagccgtgaccatcgacagagtgatgagctacctgaacgccagcggctct

SEQ ID NO: 4296 - DNA, 1842 bp, synthetic construct
  source 1..1842: mol_type = other DNA
atgtgtcaccagcagctggtcatcagctggttcagcctggtgttcctggcctctcctctggtggctatctgggagctgaagaaagacgtgtacgtggtggaactggactggtatcccgatgctcctggcgagatggtggtgctgacctgcgatacccctgaagaggacggcatcacctggacactggatcagtctagcgaggtgctcggcagcggcaagaccctgaccatccaagtgaaagagtttggcgacgccggccagtacacctgtcacaaaggcggagaagtgctgagccacagcctgctgctgctccacaagaaagaggatggcatttggagcaccgacatcctgaaggaccagaaagagcccaagaacaagaccttcctgagatgcgaggccaagaactacagcggcagattcacctgttggtggctgaccaccatcagcaccgacctgaccttcagcgtgaagtccagcagaggcagcagtgatcctcagggcgttacatgtggcgctgccacactgtctgccgaaagagtgcggggcgacaacaaagaatacgagtacagcgtggaatgccaagaggacagcgcctgtccagccgccgaagagtctctgcctatcgaagtgatggtggacgccgtgcacaagctgaagtacgagaactacacctccagctttttcatccgggacatcatcaagcccgatcctccaaagaatctccagctgaagcctctgaagaacagcagacaggtggaagtgtcctgggagtaccccgacacctggtctacaccccacagctacttcagcctgaccttttgcgtgcaagtgcagggcaagtccaagcgcgagaaaaaggaccgggtgttcaccgacaagaccagcgccaccgtgatctgccggaagaatgccagcatcagcgtcagagcccaggatcggtactacagcagctcttggagcgagtgggccagcgttccatgttctggtggcggaggatctggcggaggtggaagcggcggaggcggatcaagaaatctgcctgtggctacccctgatcctggcatgttcccttgtctgcaccacagccagaacctgctgagagccgtgtccaacatgctccagaaggccagacagacccttgagttctacccctgcaccagcgaggaaatcgaccacgaggacatcaccaaggataagaccagcaccgtggaagcctgcctgcctctggaactgaccaagaacgagagctgcctgaacagccgggaaaccagcttcatcaccaacggcagctgtctggcttccagaaagaccagctttatgatggccctgtgcctgagcagcatctacgaggacctgaagatgtaccaggtcgagttcaagaccatgaacgccaagctgctgatggaccccaagagacagattttcctggaccagaatatgctggccgtgatcgacgagctgatgcaggccctgaacttcaacagcgagacagtgccccagaagtctagcctggaagaacccgacttctacaagaccaagatcaagctgtgcatcctgctgcacgccttcagaatcagagccgtgaccatcgacagagtgatgagctacctgaacgccagcggctctaagatcgaagtgatgtaccctcctccttacctggacaacgagaagtccaacggcaccatcatccacgtgaagggcaagcacctgtgtccttctccactgttccccggacctagcaagcctttctgggtgctcgttgttgttggcggcgtgctggcctgttacagcctgctggttaccgtggccttcatcatcttttgggtccgaagcaagcggagc

SEQ ID NO: 4297 - DNA, 426 bp, synthetic construct
  source 1..426: mol_type = other DNA
atccagaaccctgatcctgccgtgtaccagctgcgggatagcaagagcagcgacaagagcgtgtgtctgttcaccgacttcgacagccagaccaacgtgtcccagagcaaggactccgacgtgtacatcaccgataagtgcgtgctggacatgcggagcatggacttcaagagcaactccgccgtggcctggtccaacaagtccgatttcgcctgcgccaacgccttcaacaacagcattatccccgaggacacattcttcccaagccccgagagcagctgcggctttaccagcgagagctaccagcagggcgtgctgagcgccaccatcctgtacgagatcctgctgggcaaggccaccctgtacgccgtgctggtgtctgccctggtgctgatggctatggtcaagcggaaggacagccgggga

SEQ ID NO: 4298 - DNA, 435 bp, synthetic construct
  source 1..435: mol_type = other DNA
atccagaaccctgatcctgccgtgtaccagctgcgggatagcaagagcagcgacaagagcgtgtgtctgttcaccgacttcgacagccagaccaacgtgtcccagagcaaggactccgacgtgtacatcaccgataagtgcgtgctggacatgcggagcatggacttcaagagcaactccgccgtggcctggtccaacaagtccgatttcgcctgcgccaacgccttcaacaacagcattatccccgaggacacattcttcccaagccccgagagcagctgcgacgtgaagctggtggaaaagagcttcgagacagacaccaacctgaacttccagatcctgtacgagatcctgctgggcaaggccaccctgtacgccgtgctggtgtctgccctggtgctgatggctatggtcaagcggaaggacagccgggga

SEQ ID NO: 4299 - DNA, 480 bp, synthetic construct
  source 1..480: mol_type = other DNA
atccagaaccctgatcctgccgtgtaccagctgcgggatagcaagagcagcgacaagagcgtgtgtctgttcaccgacttcgacagccagaccaacgtgtcccagagcaaggactccgacgtgtacatcaccgataagtgcgtgctggacatgcggagcatggacttcaagagcaactccgccgtggcctggtccaacaagtccgatttcgcctgcgccaacgccttcaacaacagcattatccccgaggacacattcttcccaagccccgagagcagcgactccaccgaccacgtgaagcccaaagagacagagaacaccaagcagcccagcaagagctgccacaagcccaaggccatcgtgcacaccgagaaagtgaacatgatgagcctgaccgtgctgggcctgcggatgctgttcgccaaaaccgtggccgtgaacttcctgctgaccgccaagctgttcttcctcctcaccgcc

SEQ ID NO: 4300 - DNA, 471 bp, synthetic construct
  source 1..471: mol_type = other DNA
atccagaaccctgatcctgccgtgtaccagctgcgggatagcaagagcagcgacaagagcgtgtgtctgttcaccgacttcgacagccagaccaacgtgtcccagagcaaggactccgacgtgtacatcaccgataagtgcgtgctggacatgcggagcatggacttcaagagcaactccgccgtggcctggtccaacaagtccgatttcgcctgcgccaacgccttcaacaacagcattatccccgaggacacattcttcccaagccccgagagcagcgactccaccgaccacgtgaagcccaaagagacagagaacaccaagcagcccagcaagagctgccacaagcccaaggccatcgtgcacaccgagaaagtgaacatgatgagcctgaccgtgctgggcctgcggatgctgttcgccaaaaccgtggccgtgaacttcctgctgaccgccaagctgttcttcctc

SEQ ID NO: 4301 - DNA, 519 bp, synthetic construct
  source 1..519: mol_type = other DNA
ggacagcctaaggccaatcctaccgtgacactgttccctccaagcagcgaagaactccaggccaacaaggccacacttgtgtgcctgatctccgacttctaccctggggctgtgacagtggcttggaaggccgatggatctcctgtgaaagccggcgtggaaaccaccaagccatccaagcagagcaacaacaaatacgccgccagctcctacctgagcctgacacctgagcagtggaagtcccacagatcctacagctgccaagtgacccacgaaggcagcaccgtggaaaagacagtggcccctacagagtgcagccccatcaagaccgatgtgattacaatggaccccaaggacaactgctccaaggacgccaacgataccctgctgctccagctgaccaacaccagcgcctactacatgtacttgttgctgctgctgaagtccgtggtgtacttcgccatcatcacatgctgcctgctgcggagaaccgccttctgctgcaacggcgagaagtct

SEQ ID NO: 4302 - DNA, 522 bp, synthetic construct
  source 1..522: mol_type = other DNA
ggacagcctaaggccaatcctaccgtgacactgttccctccaagcagcgaagaactccaggccaacaaggccacacttgtgtgcctgatctccgacttctaccctggggctgtgacagtggcttggaaggccgatggatctcctgtgaaagccggcgtggaaaccaccaagccatccaagcagagcaacaacaaatacgccgccagctcctacctgagcctgacacctgagcagtggaagtcccacagatcctacagctgccaagtgacccacgaaggcagcaccgtggaaaagacagtggcccctacagagtgcagcgaagtgaaaaccgactccaccgaccacgtgaagcccaaagagacagagaacaccaagcagcccagcaagagctgccacaagcccaaggccatcgtgcacaccgagaaagtgaacatgatgagcctgaccgtgctgggcctgcggatgctgttcgccaaaaccgtggccgtgaacttcctgctgaccgccaagctgttcttcctc

SEQ ID NO: 4303 - DNA, 477 bp, synthetic construct
  source 1..477: mol_type = other DNA
ggacagcctaaggccaatcctaccgtgacactgttccctccaagcagcgaagaactccaggccaacaaggccacacttgtgtgcctgatctccgacttctaccctggggctgtgacagtggcttggaaggccgatggatctcctgtgaaagccggcgtggaaaccaccaagccatccaagcagagcaacaacaaatacgccgccagctcctacctgagcctgacacctgagcagtggaagtcccacagatcctacagctgccaagtgacccacgaaggcagcaccgtggaaaagacagtggcccctacagagtgcagcggcagagccgattgcggctttaccagcgagagctaccagcagggcgtgctgagcgccaccatcctgtacgagatcctgctgggcaaggccaccctgtacgccgtgctggtgtctgccctggtgctgatggctatggtcaagcggaaggacagccgggga

SEQ ID NO: 4304 - DNA, 498 bp, synthetic construct
  source 1..498: mol_type = other DNA
ggacagcctaaggccaatcctaccgtgacactgttccctccaagcagcgaagaactccaggccaacaaggccacacttgtgtgcctgatctccgacttctaccctggggctgtgacagtggcttggaaggccgatggatctcctgtgaaagccggcgtggaaaccaccaagccatccaagcagagcaacaacaaatacgccgccagctcctacctgagcctgacacctgagcagtggaagtcccacagatcctacagctgccaagtgacccacgaaggcagcaccgtggaaaagacagtggcccctacagagtgcagcatccccgaggacacattcttcccaagccccgagagcagctgcgacgtgaagctggtggaaaagagcttcgagacagacaccaacctgaacttccagaacctgagcgtgatcggcttcagaatcctgctgctgaaagtggccggctttaacctgctgatgaccctgcggctgtggtccagc

SEQ ID NO: 4305 - DNA, 528 bp, synthetic construct
  source 1..528: mol_type = other DNA
gacctgaagaacgtgttcccacctgaggtggccgtgttcgagcctagcgaggccgagatcagccacacccagaaagccaccctcgtgtgcctggctaccggcttctaccccgaccatgtggaactgtcttggtgggtcaacggcaaagaggtgcacagcggcgtgtgtaccgacccccagccactgaaagaacagcccgccctgaacgacagccggtactgcctgagcagcagactgagagtgtccgccaccttctggcagaacccccggaaccacttcagatgccaggtgcagttctacggcctgagcgagaacgacgagtggacccaggacagagccaagcccgtgacccagatcgtgtctgccgaagcctggggcagagccgattgcgacgtgaagctggtggaaaagagcttcgagacagacaccaacctgaacttccagaacctgagcgtgatcggcttcagaatcctgctgctgaaagtggccggctttaacctgctgatgaccctgcggctgtggtccagc

SEQ ID NO: 4306 - DNA, 519 bp, synthetic construct
  source 1..519: mol_type = other DNA
gacctgaagaacgtgttcccacctgaggtggccgtgttcgagcctagcgaggccgagatcagccacacccagaaagccaccctcgtgtgcctggctaccggcttctaccccgaccatgtggaactgtcttggtgggtcaacggcaaagaggtgcacagcggcgtgtgtaccgacccccagccactgaaagaacagcccgccctgaacgacagccggtactgcctgagcagcagactgagagtgtccgccaccttctggcagaacccccggaaccacttcagatgccaggtgcagttctacggcctgagcgagaacgacgagtggacccaggacagagccaagcccgtgacccagatcgtgtctgccgaagcctggggcagagccgattgcggctttaccagcgagagctaccagcagggcgtgctgagcgccaccaacctgagcgtgatcggcttcagaatcctgctgctgaaagtggccggctttaacctgctgatgaccctgcggctgtggtccagc

SEQ ID NO: 4307 - DNA, 786 bp, synthetic construct
  source 1..786: mol_type = other DNA
gacctgaagaacgtgttcccacctgaggtggccgtgttcgagcctagcgaggccgagatcagccacacccagaaagccaccctcgtgtgcctggctaccggcttctaccccgaccatgtggaactgtcttggtgggtcaacggcaaagaggtgcacagcggcgtgtgtaccgacccccagccactgaaagaacagcccgccctgaacgacagccggtactgcctgagcagcagactgagagtgtccgccaccttctggcagaacccccggaaccacttcagatgccaggtgcagttctacggcctgagcgagaacgacgagtggacccaggacagagccaagcccgtgacccagatcgtgtctgccgaagcctggggcagagccgatgatgtgattaagatccactggcaggaaaagaagtccaacaccatcctgggcagccaggaaggcaacaccatgaagaccaacgacacctacatgaagttcagctggctgaccgtgcccgagaagtccctggacaaagaacacagatgcatcgtgcggcacgaaaacaacaagaacggcgtggaccaggaaatcatcttcccacccatcaagaccgatgtgattacaatggaccccaaggacaactgctccaaggacgccaacgataccctgctgctccagctgaccaacaccagcgcctactacatgtacttgttgctgctgctgaagtccgtggtgtacttcgccatcatcacatgctgcctgctgatggctatggtcaagcggaaggacagccgggga

SEQ ID NO: 4308 - DNA, 522 bp, synthetic construct
  source 1..522: mol_type = other DNA
gaggacctgaagaacgtgttcccacctgaggtggccgtgttcgagcctagcgaggccgagatcagccacacccagaaagccaccctcgtgtgcctggctaccggcttctaccccgaccatgtggaactgtcttggtgggtcaacggcaaagaggtgcacagcggcgtgtgtaccgacccccagccactgaaagaacagcccgccctgaacgacagccggtactgcctgagcagcagactgagagtgtccgccaccttctggcagaacccccggaaccacttcagatgccaggtgcagttctacggcctgagcgagaacgacgagtggacccaggacagagccaagcccgtgacccagatcgtgtctgccgaagcctggggcagagccgattgcggctttaccagcgagagctaccagcagggcgtgctgagcgccaccaacctgagcgtgatcggcttcagaatcctgctgctgaaagtggccggctttaacctgctgatgaccctgcggctgtggtccagc

SEQ ID NO: 4309 - DNA, 510 bp, synthetic construct
  source 1..510: mol_type = other DNA
gcctctacaaagggaccctccgtgtttcctctggctcccagcagcaagtctacaagcggaggaacagccgctctgggctgcctggtcaaggattactttcccgagcctgtgaccgtgtcctggaatagcggagcactgacaagcggcgtgcacacctttccagccgtgctgcaaagcagcggcctgtactctctgagcagcgtggtcacagtgcctagctctagcctgggcacccagacctacatctgcaatgtgaaccacaagcctagcaacaccaaggtggacaagagagtggaacccaagagctgtcccatcaagaccgatgtgattacaatggaccccaaggacaactgctccaaggacgccaacgataccctgctgctccagctgaccaacaccagcgcctactacatgtacttgttgctgctgctgaagtccgtggtgtacttcgccatcatcacatgctgcctgctgcggagaaccgccttctgctgcaacggcgagaagtct

SEQ ID NO: 4310 - DNA, 282 bp, synthetic construct; identical to SEQ ID NO: 3933
  source 1..282: mol_type = other DNA

SEQ ID NO: 4311 - DNA, 282 bp, synthetic construct
  source 1..282: mol_type = other DNA
atccagaaccctgatcctgccgtgtaccagctgcgggatagcaagagcagcgacaagagcgtgtgtctgttcaccgacttcgacagccagaccaacgtgtcccagagcaaggactccgacgtgtacatcaccgataagtgcgtgctggacatgcggagcatggacttcaagagcaactccgccgtggcctggtccaacaagtccgatttcgcctgcgccaacgccttcaacaacagcattatccccgaggacacattcttcccaagcagcgacgtgccctgc

SEQ ID NO: 4312 - DNA, 282 bp, synthetic construct
  source 1..282: mol_type = other DNA
atccagaaccctgatcctgccgtgtaccagctgcgggatagcaagagcagcgacaagagcgtgtgtctgttcaccgacttcgacagccagaccaacgtgtcccagagcaaggactccgacgtgtacatcaccgataagtgcgtgctggacatgcggagcatggacttcaagagcaactccgccgtggcctggtccaacaagtccgatttcgcctgcgccaacgccttcaacaacagcattatccccgaggacacattcttcccaagccccgagagcagctgc

SEQ ID NO: 4313 - DNA, 396 bp, synthetic construct
  source 1..396: mol_type = other DNA
gaggacctgaagaacgtgttcccacctgaggtggccgtgttcgagcctagcgaggccgagatcagccacacccagaaagccaccctcgtgtgcctggctaccggcttctaccccgaccatgtggaactgtcttggtgggtcaacggcaaagaggtgcacagcggcgtgtctaccgacccccagccactgaaagaacagcccgccctgaacgacagccggtactgcctgagcagcagactgagagtgtccgccaccttctggcagaacccccggaaccacttcagatgccaggtgcagttctacggcctgagcgagaacgacgagtggacccaggacagagccaagcccgtgacccagatcgtgtctgccgaagcctggggcagagccgattgcgga

SEQ ID NO: 4314 - DNA, 393 bp, synthetic construct
  source 1..393: mol_type = other DNA
gaggacctgaagaacgtgttcccacctgaggtggccgtgttcgagcctagcaaggccgagatcgcccacacccagaaagccaccctcgtgtgcctggctaccggcttctaccccgaccatgtggaactgtcttggtgggtcaacggcaaagaggtgcacagcggcgtgtgtaccgacccccagccactgaaagaacagcccgccctgaacgacagccggtactgcctgagcagcagactgagagtgtccgccaccttctggcagaacccccggaaccacttcagatgccaggtgcagttctacggcctgagcgagaacgacgagtggacccaggacagagccaagcccgtgacccagatcgtgtctgccgaagcctggggcagagccgattgc

SEQ ID NO: 4315 - DNA, 393 bp, synthetic construct
  source 1..393: mol_type = other DNA
gaggacctgaagaacgtgttcccacctgaggtggccgtgttcgagcctagcgaggccgagatcagccacacccagaaagccaccctcgtgtgcctggctaccggcttctaccccgaccatgtggaactgtcttggtgggtcaacggcaaagaggtgcacagcggcgtgtgtaccgacccccagccactgaaagaacagcccgccctgaacgacagccggtactgcctgagcagcagactgagagtgtccgccaccttctggcagaacccccggaaccacttcagatgccaggtgcagttctacggcctgagcgagaacgacgagtggacccaggacagagccaagcccgtgacccagatcgtgtctgccgaagcctggggcagagccgattgc

SEQ ID NO: 4316 - DNA, 531 bp, synthetic construct
  source 1..531: mol_type = other DNA
gaggacctgaagaacgtgttcccacctgaggtggccgtgttcgagcctagcgaggccgagatcagccacacccagaaagccaccctcgtgtgcctggctaccggcttctaccccgaccatgtggaactgtcttggtgggtcaacggcaaagaggtgcacagcggcgtgtgtaccgacccccagccactgaaagaacagcccgccctgaacgacagccggtactgcctgagcagcagactgagagtgtccgccaccttctggcagaacccccggaaccacttcagatgccaggtgcagttctacggcctgagcgagaacgacgagtggacccaggacagagccaagcccgtgacccagatcgtgtctgccgaagcctggggcagagccgattgcgacgtgaagctggtggaaaagagcttcgagacagacaccaacctgaacttccagaacctgagcgtgatcggcttcagaatcctgctgctgaaagtggccggctttaacctgctgatgaccctgcggctgtggtccagc

SEQ ID NO: 4317 - DNA, 426 bp, synthetic construct; identical to SEQ ID NO: 4297
  source 1..426: mol_type = other DNA

SEQ ID NO: 4318 - DNA, 522 bp, synthetic construct; identical to SEQ ID NO: 4308
  source 1..522: mol_type = other DNA

SEQ ID NO: 4319 - DNA, 435 bp, synthetic construct; identical to SEQ ID NO: 4298
  source 1..435: mol_type = other DNA

SEQ ID NO: 4320 - DNA, 480 bp, synthetic construct; identical to SEQ ID NO: 4299
  source 1..480: mol_type = other DNA

SEQ ID NO: 4321 - DNA, 789 bp, synthetic construct
  source 1..789: mol_type = other DNA
gaggacctgaagaacgtgttcccacctgaggtggccgtgttcgagcctagcgaggccgagatcagccacacccagaaagccaccctcgtgtgcctggctaccggcttctaccccgaccatgtggaactgtcttggtgggtcaacggcaaagaggtgcacagcggcgtgtgtaccgacccccagccactgaaagaacagcccgccctgaacgacagccggtactgcctgagcagcagactgagagtgtccgccaccttctggcagaacccccggaaccacttcagatgccaggtgcagttctacggcctgagcgagaacgacgagtggacccaggacagagccaagcccgtgacccagatcgtgtctgccgaagcctggggcagagccgatgatgtgattaagatccactggcaggaaaagaagtccaacaccatcctgggcagccaggaaggcaacaccatgaagaccaacgacacctacatgaagttcagctggctgaccgtgcccgagaagtccctggacaaagaacacagatgcatcgtgcggcacgaaaacaacaagaacggcgtggaccaggaaatcatcttcccacccatcaagaccgatgtgattacaatggaccccaaggacaactgctccaaggacgccaacgataccctgctgctccagctgaccaacaccagcgcctactacatgtacttgttgctgctgctgaagtccgtggtgtacttcgccatcatcacatgctgcctgctgatggctatggtcaagcggaaggacagccgggga

SEQ ID NO: 4322 - DNA, 531 bp, synthetic construct
  source 1..531: mol_type = other DNA
gaggacctgaagaacgtgttcccacctgaggtggccgtgttcgagcctagcgaggccgagatcagccacacccagaaagccaccctcgtgtgcctggctaccggcttctaccccgaccatgtggaactgtcttggtgggtcaacggcaaagaggtgcacagcggcgtgtctaccgacccccagccactgaaagaacagcccgccctgaacgacagccggtactgcctgagcagcagactgagagtgtccgccaccttctggcagaacccccggaaccacttcagatgccaggtgcagttctacggcctgagcgagaacgacgagtggacccaggacagagccaagcccgtgacccagatcgtgtctgccgaagcctggggcagagccgattgcgacgtgaagctggtggaaaagagcttcgagacagacaccaacctgaacttccagaacctgagcgtgatcggcttcagaatcctgctgctgaaagtggccggctttaacctgctgatgaccctgcggctgtggtccagc

SEQ ID NO: 4323 - DNA, 426 bp, synthetic construct
  source 1..426: mol_type = other DNA
atccagaaccctgatcctgccgtgtaccagctgcgggatagcaagagcagcgacaagagcgtgtgtctgttcaccgacttcgacagccagaccaacgtgtcccagagcaaggactccgacgtgtacatcaccgataagaccgtgctggacatgcggagcatggacttcaagagcaactccgccgtggcctggtccaacaagtccgatttcgcctgcgccaacgccttcaacaacagcattatccccgaggacacattcttcccaagccccgagagcagctgcggctttaccagcgagagctaccagcagggcgtgctgagcgccaccatcctgtacgagatcctgctgggcaaggccaccctgtacgccgtgctggtgtctgccctggtgctgatggctatggtcaagcggaaggacagccgggga

SEQ ID NO: 4324 - DNA, 522 bp, synthetic construct
  source 1..522: mol_type = other DNA
gaggacctgaagaacgtgttcccacctgaggtggccgtgttcgagcctagcgaggccgagatcagccacacccagaaagccaccctcgtgtgcctggctaccggcttctaccccgaccatgtggaactgtcttggtgggtcaacggcaaagaggtgcacagcggcgtgtctaccgacccccagccactgaaagaacagcccgccctgaacgacagccggtactgcctgagcagcagactgagagtgtccgccaccttctggcagaacccccggaaccacttcagatgccaggtgcagttctacggcctgagcgagaacgacgagtggacccaggacagagccaagcccgtgacccagatcgtgtctgccgaagcctggggcagagccgattgcggctttaccagcgagagctaccagcagggcgtgctgagcgccaccaacctgagcgtgatcggcttcagaatcctgctgctgaaagtggccggctttaacctgctgatgaccctgcggctgtggtccagc

SEQ ID NO: 4325 - DNA, 435 bp, synthetic construct
  source 1..435: mol_type = other DNA
atccagaaccctgatcctgccgtgtaccagctgcgggatagcaagagcagcgacaagagcgtgtgtctgttcaccgacttcgacagccagaccaacgtgtcccagagcaaggactccgacgtgtacatcaccgataagaccgtgctggacatgcggagcatggacttcaagagcaactccgccgtggcctggtccaacaagtccgatttcgcctgcgccaacgccttcaacaacagcattatccccgaggacacattcttcccaagccccgagagcagctgcgacgtgaagctggtggaaaagagcttcgagacagacaccaacctgaacttccagatcctgtacgagatcctgctgggcaaggccaccctgtacgccgtgctggtgtctgccctggtgctgatggctatggtcaagcggaaggacagccgggga

SEQ ID NO: 4326 - DNA, 480 bp, synthetic construct
  source 1..480: mol_type = other DNA
atccagaaccctgatcctgccgtgtaccagctgcgggatagcaagagcagcgacaagagcgtgtgtctgttcaccgacttcgacagccagaccaacgtgtcccagagcaaggactccgacgtgtacatcaccgataagaccgtgctggacatgcggagcatggacttcaagagcaactccgccgtggcctggtccaacaagtccgatttcgcctgcgccaacgccttcaacaacagcattatccccgaggacacattcttcccaagccccgagagcagcgactccaccgaccacgtgaagcccaaagagacagagaacaccaagcagcccagcaagagctgccacaagcccaaggccatcgtgcacaccgagaaagtgaacatgatgagcctgaccgtgctgggcctgcggatgctgttcgccaaaaccgtggccgtgaacttcctgctgaccgccaagctgttcttcctcctcaccgcc

SEQ ID NO: 4327 - DNA, 789 bp, synthetic construct
  source 1..789: mol_type = other DNA
gaggacctgaagaacgtgttcccacctgaggtggccgtgttcgagcctagcgaggccgagatcagccacacccagaaagccaccctcgtgtgcctggctaccggcttctaccccgaccatgtggaactgtcttggtgggtcaacggcaaagaggtgcacagcggcgtgtctaccgacccccagccactgaaagaacagcccgccctgaacgacagccggtactgcctgagcagcagactgagagtgtccgccaccttctggcagaacccccggaaccacttcagatgccaggtgcagttctacggcctgagcgagaacgacgagtggacccaggacagagccaagcccgtgacccagatcgtgtctgccgaagcctggggcagagccgatgatgtgattaagatccactggcaggaaaagaagtccaacaccatcctgggcagccaggaaggcaacaccatgaagaccaacgacacctacatgaagttcagctggctgaccgtgcccgagaagtccctggacaaagaacacagatgcatcgtgcggcacgaaaacaacaagaacggcgtggaccaggaaatcatcttcccacccatcaagaccgatgtgattacaatggaccccaaggacaactgctccaaggacgccaacgataccctgctgctccagctgaccaacaccagcgcctactacatgtacttgttgctgctgctgaagtccgtggtgtacttcgccatcatcacatgctgcctgctgatggctatggtcaagcggaaggacagccgggga

SEQ ID NO: 4328 - DNA, 471 bp, synthetic construct; identical to SEQ ID NO: 4300
  source 1..471: mol_type = other DNA

SEQ ID NO: 4329 - DNA, 792 bp, synthetic construct
  source 1..792: mol_type = other DNA
gaggacctgaagaacgtgttcccacctgaggtggccgtgttcgagcctagcgaggccgagatcagccacacccagaaagccaccctcgtgtgcctggctaccggcttctaccccgaccatgtggaactgtcttggtgggtcaacggcaaagaggtgcacagcggcgtgtgtaccgacccccagccactgaaagaacagcccgccctgaacgacagccggtactgcctgagcagcagactgagagtgtccgccaccttctggcagaacccccggaaccacttcagatgccaggtgcagttctacggcctgagcgagaacgacgagtggacccaggacagagccaagcccgtgacccagatcgtgtctgccgaagcctggggcagagccgatgatgtgattaagatccactggcaggaaaagaagtccaacaccatcctgggcagccaggaaggcaacaccatgaagaccaacgacacctacatgaagttcagctggctgaccgtgcccgagaagtccctggacaaagaacacagatgcatcgtgcggcacgaaaacaacaagaacggcgtggaccaggaaatcatcttcccacccatcaagaccgatgtgattacaatggaccccaaggacaactgctccaaggacgccaacgataccctgctgctccagctgaccaacaccagcgcctactacatgtacttgttgctgctgctgaagtccgtggtgtacttcgccatcatcacatgctgcctgctgcggagaaccgccttctgctgcaacggcgagaagtct

SEQ ID NO: 4330 - DNA, 471 bp, synthetic construct
  source 1..471: mol_type = other DNA
atccagaaccctgatcctgccgtgtaccagctgcgggatagcaagagcagcgacaagagcgtgtgtctgttcaccgacttcgacagccagaccaacgtgtcccagagcaaggactccgacgtgtacatcaccgataagaccgtgctggacatgcggagcatggacttcaagagcaactccgccgtggcctggtccaacaagtccgatttcgcctgcgccaacgccttcaacaacagcattatccccgaggacacattcttcccaagccccgagagcagcgactccaccgaccacgtgaagcccaaagagacagagaacaccaagcagcccagcaagagctgccacaagcccaaggccatcgtgcacaccgagaaagtgaacatgatgagcctgaccgtgctgggcctgcggatgctgttcgccaaaaccgtggccgtgaacttcctgctgaccgccaagctgttcttcctc

SEQ ID NO: 4331 - DNA, 792 bp, synthetic construct
  source 1..792: mol_type = other DNA
gaggacctgaagaacgtgttcccacctgaggtggccgtgttcgagcctagcgaggccgagatcagccacacccagaaagccaccctcgtgtgcctggctaccggcttctaccccgaccatgtggaactgtcttggtgggtcaacggcaaagaggtgcacagcggcgtgtctaccgacccccagccactgaaagaacagcccgccctgaacgacagccggtactgcctgagcagcagactgagagtgtccgccaccttctggcagaacccccggaaccacttcagatgccaggtgcagttctacggcctgagcgagaacgacgagtggacccaggacagagccaagcccgtgacccagatcgtgtctgccgaagcctggggcagagccgatgatgtgattaagatccactggcaggaaaagaagtccaacaccatcctgggcagccaggaaggcaacaccatgaagaccaacgacacctacatgaagttcagctggctgaccgtgcccgagaagtccctggacaaagaacacagatgcatcgtgcggcacgaaaacaacaagaacggcgtggaccaggaaatcatcttcccacccatcaagaccgatgtgattacaatggaccccaaggacaactgctccaaggacgccaacgataccctgctgctccagctgaccaacaccagcgcctactacatgtacttgttgctgctgctgaagtccgtggtgtacttcgccatcatcacatgctgcctgctgcggagaaccgccttctgctgcaacggcgagaagtct

SEQ ID NO: 4332 - DNA, 498 bp, synthetic construct
  source 1..498: mol_type = other DNA
ggacagcctaaggccaatcctaccgtgacactgttccctccaagcagcgaagaactccaggccaacaaggccacacttgtgtgcctgatctccgacttctaccctggggctgtgacagtggcttggaaggccgatggatctcctgtgaaagccggcgtggaaaccaccaagccatccaagcagagcaacaacaaatacgccgccagctcctacctgagcctgacacctgagcagtggaagtcccacagatcctacagctgccaagtgacccacgaaggcagcaccgtggaaaagacagtggcccctacagagtgcagcatccccgaggacacattcttcccaagccccgagagcagctgcgacgtgaagctggtggaaaagagcttcgagacagacaccaacctgaacttccagaacctgctggtgatcgtgctgagaatcctgctgctgaaagtggccggctttaacctgctgatgaccctgcggctgtggtccagc

SEQ ID NO: 4333 - DNA, 528 bp, synthetic construct
  source 1..528: mol_type = other DNA
gacctgaagaacgtgttcccacctgaggtggccgtgttcgagcctagcgaggccgagatcagccacacccagaaagccaccctcgtgtgcctggctaccggcttctaccccgaccatgtggaactgtcttggtgggtcaacggcaaagaggtgcacagcggcgtgtgtaccgacccccagccactgaaagaacagcccgccctgaacgacagccggtactgcctgagcagcagactgagagtgtccgccaccttctggcagaacccccggaaccacttcagatgccaggtgcagttctacggcctgagcgagaacgacgagtggacccaggacagagccaagcccgtgacccagatcgtgtctgccgaagcctggggcagagccgattgcgacgtgaagctggtggaaaagagcttcgagacagacaccaacctgaacttccagaacctgctggtgatcgtgctgagaatcctgctgctgaaagtggccggctttaacctgctgatgaccctgcggctgtggtccagc

SEQ ID NO: 4334 - DNA, 519 bp, synthetic construct
  source 1..519: mol_type = other DNA
gacctgaagaacgtgttcccacctgaggtggccgtgttcgagcctagcgaggccgagatcagccacacccagaaagccaccctcgtgtgcctggctaccggcttctaccccgaccatgtggaactgtcttggtgggtcaacggcaaagaggtgcacagcggcgtgtgtaccgacccccagccactgaaagaacagcccgccctgaacgacagccggtactgcctgagcagcagactgagagtgtccgccaccttctggcagaacccccggaaccacttcagatgccaggtgcagttctacggcctgagcgagaacgacgagtggacccaggacagagccaagcccgtgacccagatcgtgtctgccgaagcctggggcagagccgattgcggctttaccagcgagagctaccagcagggcgtgctgagcgccaccaacctgctggtgatcgtgctgagaatcctgctgctgaaagtggccggctttaacctgctgatgaccctgcggctgtggtccagc

SEQ ID NO: 4335 - DNA, 399 bp, synthetic construct
  source 1..399: mol_type = other DNA
atccagaaccctgatcctgccgtgtaccagctgcgggatagcaagagcagcgacaagagcgtgtgtctgttcaccgacttcgacagccagaccaacgtgtcccagagcaaggactccgacgtgtacatcaccgataagaccgtgctggacatgcggagcatggacttcaagagcaactccgccgtggcctggtccaacaagtccgatttcgcctgcgccaacgccttcaacaacagcattggcagagccgattgcggctttaccagcgagagctaccagcagggcgtgctgagcgccaccatcctgtacgagatcctgctgggcaaggccaccctgtacgccgtgctggtgtctgccctggtgctgatggctatggtcaagcggaaggacagccgggga

SEQ ID NO: 4336 - DNA, 393 bp, synthetic construct
  source 1..393: mol_type = other DNA
atccagaaccctgatcctgccgtgtaccagctgcgggatagcaagagcagcgacaagagcgtgtgtctgttcaccgacttcgacagccagaccaacgtgtcccagagcaaggactccgacgtgtacatcaccgataagaccgtgctggacatgcggagcatggacttcaagagcaactccgccgtggcctggtccaacaagtccgatttcgcctgcgccaacgccttcaacaacagcattgccgattgcggctttaccagcgagagctaccagcagggcgtgctgagcgccaccatcctgtacgagatcctgctgggcaaggccaccctgtacgccgtgctggtgtctgccctggtgctgatggctatggtcaagcggaaggacagccgggga

SEQ ID NO: 4337 - DNA, 423 bp, synthetic construct
  source 1..423: mol_type = other DNA
atccagaaccctgatcctgccgtgtaccagctgcgggatagcaagagcagcgacaagagcgtgtgtctgttcaccgacttcgacagccagaccaacgtgtcccagagcaaggactccgacgtgtacatcaccgataagaccgtgctggacatgcggagcatggacttcaagagcaactccgccgtggcctggtccaacaagtccgatttcgcctgcgccaacgccttcaacaacagcattcagatcgtgtctgccgaagcctggggcagagccgattgcggctttaccagcgagagctaccagcagggcgtgctgagcgccaccatcctgtacgagatcctgctgggcaaggccaccctgtacgccgtgctggtgtctgccctggtgctgatggctatggtcaagcggaaggacagccgggga

SEQ ID NO: 4338 - DNA, 447 bp, synthetic construct
  source 1..447: mol_type = other DNA
atccagaaccctgatcctgccgtgtaccagctgcgggatagcaagagcagcgacaagagcgtgtgtctgttcaccgacttcgacagccagaccaacgtgtcccagagcaaggactccgacgtgtacatcaccgataagaccgtgctggacatgcggagcatggacttcaagagcaactccgccgtggcctggtccaacaagtccgatttcgcctgcgccaacgccttcaacaacagcattttcccacccatcaagaccgatgtgattacaatggaccccaaggacaactgctccaaggacgccaacgataccctgctgctccagctgaccaacaccagcgcctactacatgtacttgttgctgctgctgaagtccgtggtgtacttcgccatcatcacatgctgcctgctgcggagaaccgccttctgctgcaacggcgagaagtct

SEQ ID NO: 4339 - DNA, 441 bp, synthetic construct
  source 1..441: mol_type = other DNA
atccagaaccctgatcctgccgtgtaccagctgcgggatagcaagagcagcgacaagagcgtgtgtctgttcaccgacttcgacagccagaccaacgtgtcccagagcaaggactccgacgtgtacatcaccgataagaccgtgctggacatgcggagcatggacttcaagagcaactccgccgtggcctggtccaacaagtccgatttcgcctgcgccaacgccttcaacaacagcattcccatcaagaccgatgtgattacaatggaccccaaggacaactgctccaaggacgccaacgataccctgctgctccagctgaccaacaccagcgcctactacatgtacttgttgctgctgctgaagtccgtggtgtacttcgccatcatcacatgctgcctgctgcggagaaccgccttctgctgcaacggcgagaagtct

SEQ ID NO: 4340 - DNA, 417 bp, synthetic construct
  source 1..417: mol_type = other DNA
atccagaaccctgatcctgccgtgtaccagctgcgggatagcaagagcagcgacaagagcgtgtgtctgttcaccgacttcgacagccagaccaacgtgtcccagagcaaggactccgacgtgtacatcaccgataagaccgtgctggacatgcggagcatggacttcaagagcaactccgccgtggcctggtccaacaagtccgatttcgcctgcgccaacgccttcaacaacagcattatggaccccaaggacaactgctccaaggacgccaacgataccctgctgctccagctgaccaacaccagcgcctactacatgtacttgttgctgctgctgaagtccgtggtgtacttcgccatcatcacatgctgcctgctgcggagaaccgccttctgctgcaacggcgagaagtct

SEQ ID NO: 4341 - DNA, 441 bp, synthetic construct; identical to SEQ ID NO: 4339
  source 1..441: mol_type = other DNA

SEQ ID NO: 4342 - DNA, 399 bp, synthetic construct
  source 1..399: mol_type = other DNA
atccagaaccctgatcctgccgtgtaccagctgcgggatagcaagagcagcgacaagagcgtgtgtctgttcaccgacttcgacagccagaccaacgtgtcccagagcaaggactccgacgtgtacatcaccgataagaccgtgctggacatgcggagcatggacttcaagagcaactccgccgtggcctggtccaacaagtccgatttcgcctgcgccaacgccttcaacaacagcatttgctccaaggacgccaacgataccctgctgctccagctgaccaacaccagcgcctactacatgtacttgttgctgctgctgaagtccgtggtgtacttcgccatcatcacatgctgcctgctgcggagaaccgccttctgctgcaacggcgagaagtct

SEQ ID NO: 4343 - DNA, 444 bp, synthetic construct
  source 1..444: mol_type = other DNA
atccagaaccctgatcctgccgtgtaccagctgcgggatagcaagagcagcgacaagagcgtgtgtctgttcaccgacttcgacagccagaccaacgtgtcccagagcaaggactccgacgtgtacatcaccgataagaccgtgctggacatgcggagcatggacttcaagagcaactccgccgtggcctggtccaacaagtccgatttcgcctgcgccaacgccttcaacaacagcattgaagtgaaaaccgactccaccgaccacgtgaagcccaaagagacagagaacaccaagcagcccagcaagagctgccacaagcccaaggccatcgtgcacaccgagaaagtgaacatgatgagcctgaccgtgctgggcctgcggatgctgttcgccaaaaccgtggccgtgaacttcctgctgaccgccaagctgttcttcctc

SEQ ID NO: 4344 - DNA, 423 bp, synthetic construct
  source 1..423: mol_type = other DNA
atccagaaccctgatcctgccgtgtaccagctgcgggatagcaagagcagcgacaagagcgtgtgtctgttcaccgacttcgacagccagaccaacgtgtcccagagcaaggactccgacgtgtacatcaccgataagaccgtgctggacatgcggagcatggacttcaagagcaactccgccgtggcctggtccaacaagtccgatttcgcctgcgccaacgccttcaacaacagcattgaccacgtgaagcccaaagagacagagaacaccaagcagcccagcaagagctgccacaagcccaaggccatcgtgcacaccgagaaagtgaacatgatgagcctgaccgtgctgggcctgcggatgctgttcgccaaaaccgtggccgtgaacttcctgctgaccgccaagctgttcttcctc

SEQ ID NO: 4345 - DNA, 429 bp, synthetic construct
  source 1..429: mol_type = other DNA
atccagaaccctgatcctgccgtgtaccagctgcgggatagcaagagcagcgacaagagcgtgtgtctgttcaccgacttcgacagccagaccaacgtgtcccagagcaaggactccgacgtgtacatcaccgataagaccgtgctggacatgcggagcatggacttcaagagcaactccgccgtggcctggtccaacaagtccgatttcgcctgcgccaacgccttcaacaacagcattatccccgaggacacattcttcccaagccccggcagagccgattgcggctttaccagcgagagctaccagcagggcgtgctgagcgccaccatcctgtacgagatcctgctgggcaaggccaccctgtacgccgtgctggtgtctgccctggtgctgatggctatggtcaagcggaaggacagccgggga

SEQ ID NO: 4346 - DNA, 423 bp, synthetic construct
  source 1..423: mol_type = other DNA
atccagaaccctgatcctgccgtgtaccagctgcgggatagcaagagcagcgacaagagcgtgtgtctgttcaccgacttcgacagccagaccaacgtgtcccagagcaaggactccgacgtgtacatcaccgataagaccgtgctggacatgcggagcatggacttcaagagcaactccgccgtggcctggtccaacaagtccgatttcgcctgcgccaacgccttcaacaacagcattatccccgaggacacattcttcccaagccccgccgattgcggctttaccagcgagagctaccagcagggcgtgctgagcgccaccatcctgtacgagatcctgctgggcaaggccaccctgtacgccgtgctggtgtctgccctggtgctgatggctatggtcaagcggaaggacagccgggga

SEQ ID NO: 4347 - DNA, 453 bp, synthetic construct
  source 1..453: mol_type = other DNA
atccagaaccctgatcctgccgtgtaccagctgcgggatagcaagagcagcgacaagagcgtgtgtctgttcaccgacttcgacagccagaccaacgtgtcccagagcaaggactccgacgtgtacatcaccgataagaccgtgctggacatgcggagcatggacttcaagagcaactccgccgtggcctggtccaacaagtccgatttcgcctgcgccaacgccttcaacaacagcattatccccgaggacacattcttcccaagcccccagatcgtgtctgccgaagcctggggcagagccgattgcggctttaccagcgagagctaccagcagggcgtgctgagcgccaccatcctgtacgagatcctgctgggcaaggccaccctgtacgccgtgctggtgtctgccctggtgctgatggctatggtcaagcggaaggacagccgggga

SEQ ID NO: 4348 - DNA, 477 bp, synthetic construct
  source 1..477: mol_type = other DNA
atccagaaccctgatcctgccgtgtaccagctgcgggatagcaagagcagcgacaagagcgtgtgtctgttcaccgacttcgacagccagaccaacgtgtcccagagcaaggactccgacgtgtacatcaccgataagaccgtgctggacatgcggagcatggacttcaagagcaactccgccgtggcctggtccaacaagtccgatttcgcctgcgccaacgccttcaacaacagcattatccccgaggacacattcttcccaagccccttcccacccatcaagaccgatgtgattacaatggaccccaaggacaactgctccaaggacgccaacgataccctgctgctccagctgaccaacaccagcgcctactacatgtacttgttgctgctgctgaagtccgtggtgtacttcgccatcatcacatgctgcctgctgcggagaaccgccttctgctgcaacggcgagaagtct

SEQ ID NO: 4349 - DNA, 471 bp, synthetic construct
  source 1..471: mol_type = other DNA
atccagaaccctgatcctgccgtgtaccagctgcgggatagcaagagcagcgacaagagcgtgtgtctgttcaccgacttcgacagccagaccaacgtgtcccagagcaaggactccgacgtgtacatcaccgataagaccgtgctggacatgcggagcatggacttcaagagcaactccgccgtggcctggtccaacaagtccgatttcgcctgcgccaacgccttcaacaacagcattatccccgaggacacattcttcccaagcccccccatcaagaccgatgtgattacaatggaccccaaggacaactgctccaaggacgccaacgataccctgctgctccagctgaccaacaccagcgcctactacatgtacttgttgctgctgctgaagtccgtggtgtacttcgccatcatcacatgctgcctgctgcggagaaccgccttctgctgcaacggcgagaagtct

SEQ ID NO: 4350 - DNA, 447 bp, synthetic construct
  source 1..447: mol_type = other DNA
atccagaaccctgatcctgccgtgtaccagctgcgggatagcaagagcagcgacaagagcgtgtgtctgttcaccgacttcgacagccagaccaacgtgtcccagagcaaggactccgacgtgtacatcaccgataagaccgtgctggacatgcggagcatggacttcaagagcaactccgccgtggcctggtccaacaagtccgatttcgcctgcgccaacgccttcaacaacagcattatccccgaggacacattcttcccaagccccatggaccccaaggacaactgctccaaggacgccaacgataccctgctgctccagctgaccaacaccagcgcctactacatgtacttgttgctgctgctgaagtccgtggtgtacttcgccatcatcacatgctgcctgctgcggagaaccgccttctgctgcaacggcgagaagtct

SEQ ID NO: 4351 - DNA, 471 bp, synthetic construct; identical to SEQ ID NO: 4349
  source 1..471: mol_type = other DNA

SEQ ID NO: 4352 - DNA, 429 bp, synthetic construct
  source 1..429: mol_type = other DNA
atccagaaccctgatcctgccgtgtaccagctgcgggatagcaagagcagcgacaagagcgtgtgtctgttcaccgacttcgacagccagaccaacgtgtcccagagcaaggactccgacgtgtacatcaccgataagaccgtgctggacatgcggagcatggacttcaagagcaactccgccgtggcctggtccaacaagtccgatttcgcctgcgccaacgccttcaacaacagcattatccccgaggacacattcttcccaagcccctgctccaaggacgccaacgataccctgctgctccagctgaccaacaccagcgcctactacatgtacttgttgctgctgctgaagtccgtggtgtacttcgccatcatcacatgctgcctgctgcggagaaccgccttctgctgcaacggcgagaagtct

SEQ ID NO: 4353 - DNA, 474 bp, synthetic construct
  source 1..474: mol_type = other DNA
atccagaaccctgatcctgccgtgtaccagctgcgggatagcaagagcagcgacaagagcgtgtgtctgttcaccgacttcgacagccagaccaacgtgtcccagagcaaggactccgacgtgtacatcaccgataagaccgtgctggacatgcggagcatggacttcaagagcaactccgccgtggcctggtccaacaagtccgatttcgcctgcgccaacgccttcaacaacagcattatccccgaggacacattcttcccaagccccgaagtgaaaaccgactccaccgaccacgtgaagcccaaagagacagagaacaccaagcagcccagcaagagctgccacaagcccaaggccatcgtgcacaccgagaaagtgaacatgatgagcctgaccgtgctgggcctgcggatgctgttcgccaaaaccgtggccgtgaacttcctgctgaccgccaagctgttcttcctc

SEQ ID NO: 4354 - DNA, 453 bp, synthetic construct
  source 1..453: mol_type = other DNA
atccagaaccctgatcctgccgtgtaccagctgcgggatagcaagagcagcgacaagagcgtgtgtctgttcaccgacttcgacagccagaccaacgtgtcccagagcaaggactccgacgtgtacatcaccgataagaccgtgctggacatgcggagcatggacttcaagagcaactccgccgtggcctggtccaacaagtccgatttcgcctgcgccaacgccttcaacaacagcattatccccgaggacacattcttcccaagccccgaccacgtgaagcccaaagagacagagaacaccaagcagcccagcaagagctgccacaagcccaaggccatcgtgcacaccgagaaagtgaacatgatgagcctgaccgtgctgggcctgcggatgctgttcgccaaaaccgtggccgtgaacttcctgctgaccgccaagctgttcttcctc

SEQ ID NO: 4355 - DNA, 441 bp, synthetic construct
  source 1..441: mol_type = other DNA
atccagaaccctgatcctgccgtgtaccagctgcgggatagcaagagcagcgacaagagcgtgtgtctgttcaccgacttcgacagccagaccaacgtgtcccagagcaaggactccgacgtgtacatcaccgataagaccgtgctggacatgcggagcatggacttcaagagcaactccgccgtggcctggtccaacaagtccgatttcgcctgcgccaacgccttcaacaacagcattatccccgaggacacattcttcccaagccccgagagcagctgcggcagagccgattgcggctttaccagcgagagctaccagcagggcgtgctgagcgccaccatcctgtacgagatcctgctgggcaaggccaccctgtacgccgtgctggtgtctgccctggtgctgatggctatggtcaagcggaaggacagccgggga

SEQ ID NO: 4356 - DNA, 435 bp, synthetic construct
  source 1..435: mol_type = other DNA
atccagaaccctgatcctgccgtgtaccagctgcgggatagcaagagcagcgacaagagcgtgtgtctgttcaccgacttcgacagccagaccaacgtgtcccagagcaaggactccgacgtgtacatcaccgataagaccgtgctggacatgcggagcatggacttcaagagcaactccgccgtggcctggtccaacaagtccgatttcgcctgcgccaacgccttcaacaacagcattatccccgaggacacattcttcccaagccccgagagcagctgcgccgattgcggctttaccagcgagagctaccagcagggcgtgctgagcgccaccatcctgtacgagatcctgctgggcaaggccaccctgtacgccgtgctggtgtctgccctggtgctgatggctatggtcaagcggaaggacagccgggga

SEQ ID NO: 4357 - DNA, 465 bp, synthetic construct
  source 1..465: mol_type = other DNA
atccagaaccctgatcctgccgtgtaccagctgcgggatagcaagagcagcgacaagagcgtgtgtctgttcaccgacttcgacagccagaccaacgtgtcccagagcaaggactccgacgtgtacatcaccgataagaccgtgctggacatgcggagcatggacttcaagagcaactccgccgtggcctggtccaacaagtccgatttcgcctgcgccaacgccttcaacaacagcattatccccgaggacacattcttcccaagccccgagagcagctgccagatcgtgtctgccgaagcctggggcagagccgattgcggctttaccagcgagagctaccagcagggcgtgctgagcgccaccatcctgtacgagatcctgctgggcaaggccaccctgtacgccgtgctggtgtctgccctggtgctgatggctatggtcaagcggaaggacagccgggga

SEQ ID NO: 4358 - DNA, 489 bp, synthetic construct
  source 1..489: mol_type = other DNA
atccagaaccctgatcctgccgtgtaccagctgcgggatagcaagagcagcgacaagagcgtgtgtctgttcaccgacttcgacagccagaccaacgtgtcccagagcaaggactccgacgtgtacatcaccgataagaccgtgctggacatgcggagcatggacttcaagagcaactccgccgtggcctggtccaacaagtccgatttcgcctgcgccaacgccttcaacaacagcattatccccgaggacacattcttcccaagccccgagagcagctgcttcccacccatcaagaccgatgtgattacaatggaccccaaggacaactgctccaaggacgccaacgataccctgctgctccagctgaccaacaccagcgcctactacatgtacttgttgctgctgctgaagtccgtggtgtacttcgccatcatcacatgctgcctgctgcggagaaccgccttctgctgcaacggcgagaagtct

SEQ ID NO: 4359 - DNA, 483 bp, synthetic construct
  source 1..483: mol_type = other DNA
atccagaaccctgatcctgccgtgtaccagctgcgggatagcaagagcagcgacaagagcgtgtgtctgttcaccgacttcgacagccagaccaacgtgtcccagagcaaggactccgacgtgtacatcaccgataagaccgtgctggacatgcggagcatggacttcaagagcaactccgccgtggcctggtccaacaagtccgatttcgcctgcgccaacgccttcaacaacagcattatccccgaggacacattcttcccaagccccgagagcagctgccccatcaagaccgatgtgattacaatggaccccaaggacaactgctccaaggacgccaacgataccctgctgctccagctgaccaacaccagcgcctactacatgtacttgttgctgctgctgaagtccgtggtgtacttcgccatcatcacatgctgcctgctgcggagaaccgccttctgctgcaacggcgagaagtct

SEQ ID NO: 4360 - DNA, 459 bp, synthetic construct
  source 1..459: mol_type = other DNA
atccagaaccctgatcctgccgtgtaccagctgcgggatagcaagagcagcgacaagagcgtgtgtctgttcaccgacttcgacagccagaccaacgtgtcccagagcaaggactccgacgtgtacatcaccgataagaccgtgctggacatgcggagcatggacttcaagagcaactccgccgtggcctggtccaacaagtccgatttcgcctgcgccaacgccttcaacaacagcattatccccgaggacacattcttcccaagccccgagagcagctgcatggaccccaaggacaactgctccaaggacgccaacgataccctgctgctccagctgaccaacaccagcgcctactacatgtacttgttgctgctgctgaagtccgtggtgtacttcgccatcatcacatgctgcctgctgcggagaaccgccttctgctgcaacggcgagaagtct

SEQ ID NO: 4361 - DNA, 483 bp, synthetic construct; identical to SEQ ID NO: 4359
  source 1..483: mol_type = other DNA

SEQ ID NO: 4362 - DNA, 441 bp, synthetic construct
  source 1..441: mol_type = other DNA
atccagaaccctgatcctgccgtgtaccagctgcgggatagcaagagcagcgacaagagcgtgtgtctgttcaccgacttcgacagccagaccaacgtgtcccagagcaaggactccgacgtgtacatcaccgataagaccgtgctggacatgcggagcatggacttcaagagcaactccgccgtggcctggtccaacaagtccgatttcgcctgcgccaacgccttcaacaacagcattatccccgaggacacattcttcccaagccccgagagcagctgctgctccaaggacgccaacgataccctgctgctccagctgaccaacaccagcgcctactacatgtacttgttgctgctgctgaagtccgtggtgtacttcgccatcatcacatgctgcctgctgcggagaaccgccttctgctgcaacggcgagaagtct

SEQ ID NO: 4363 - DNA, 486 bp, synthetic construct
  source 1..486: mol_type = other DNA
atccagaaccctgatcctgccgtgtaccagctgcgggatagcaagagcagcgacaagagcgtgtgtctgttcaccgacttcgacagccagaccaacgtgtcccagagcaaggactccgacgtgtacatcaccgataagaccgtgctggacatgcggagcatggacttcaagagcaactccgccgtggcctggtccaacaagtccgatttcgcctgcgccaacgccttcaacaacagcattatccccgaggacacattcttcccaagccccgagagcagctgcgaagtgaaaaccgactccaccgaccacgtgaagcccaaagagacagagaacaccaagcagcccagcaagagctgccacaagcccaaggccatcgtgcacaccgagaaagtgaacatgatgagcctgaccgtgctgggcctgcggatgctgttcgccaaaaccgtggccgtgaacttcctgctgaccgccaagctgttcttcctc

SEQ ID NO: 4364 - DNA, 465 bp, synthetic construct
  source 1..465: mol_type = other DNA
atccagaaccctgatcctgccgtgtaccagctgcgggatagcaagagcagcgacaagagcgtgtgtctgttcaccgacttcgacagccagaccaacgtgtcccagagcaaggactccgacgtgtacatcaccgataagaccgtgctggacatgcggagcatggacttcaagagcaactccgccgtggcctggtccaacaagtccgatttcgcctgcgccaacgccttcaacaacagcattatccccgaggacacattcttcccaagccccgagagcagctgcgaccacgtgaagcccaaagagacagagaacaccaagcagcccagcaagagctgccacaagcccaaggccatcgtgcacaccgagaaagtgaacatgatgagcctgaccgtgctgggcctgcggatgctgttcgccaaaaccgtggccgtgaacttcctgctgaccgccaagctgttcttcctc

SEQ ID NO: 4365 - DNA, 402 bp, synthetic construct
  source 1..402: mol_type = other DNA
atccagaaccctgatcctgccgtgtaccagctgcgggatagcaagagcagcgacaagagcgtgtgtctgttcaccgacttcgacagccagaccaacgtgtcccagagcaaggactccgacgtgtacatcaccgataagaccgtgctggacatgcggagcatggacttcaagagcaactccgccgtggcctggtccaacaagtccgatttcgcctgcgccaacgccttcaacaacagcattatcggcagagccgattgcggctttaccagcgagagctaccagcagggcgtgctgagcgccaccatcctgtacgagatcctgctgggcaaggccaccctgtacgccgtgctggtgtctgccctggtgctgatggctatggtcaagcggaaggacagccgggga

SEQ ID NO: 4366 - DNA, 396 bp, synthetic construct
  source 1..396: mol_type = other DNA
atccagaaccctgatcctgccgtgtaccagctgcgggatagcaagagcagcgacaagagcgtgtgtctgttcaccgacttcgacagccagaccaacgtgtcccagagcaaggactccgacgtgtacatcaccgataagaccgtgctggacatgcggagcatggacttcaagagcaactccgccgtggcctggtccaacaagtccgatttcgcctgcgccaacgccttcaacaacagcattatcgccgattgcggctttaccagcgagagctaccagcagggcgtgctgagcgccaccatcctgtacgagatcctgctgggcaaggccaccctgtacgccgtgctggtgtctgccctggtgctgatggctatggtcaagcggaaggacagccgggga

SEQ ID NO: 4367 - DNA, 426 bp, synthetic construct
  source 1..426: mol_type = other DNA
atccagaaccctgatcctgccgtgtaccagctgcgggatagcaagagcagcgacaagagcgtgtgtctgttcaccgacttcgacagccagaccaacgtgtcccagagcaaggactccgacgtgtacatcaccgataagaccgtgctggacatgcggagcatggacttcaagagcaactccgccgtggcctggtccaacaagtccgatttcgcctgcgccaacgccttcaacaacagcattatccagatcgtgtctgccgaagcctggggcagagccgattgcggctttaccagcgagagctaccagcagggcgtgctgagcgccaccatcctgtacgagatcctgctgggcaaggccaccctgtacgccgtgctggtgtctgccctggtgctgatggctatggtcaagcggaaggacagccgggga

SEQ ID NO: 4368 - DNA, 450 bp, synthetic construct
  source 1..450: mol_type = other DNA
atccagaaccctgatcctgccgtgtaccagctgcgggatagcaagagcagcgacaagagcgtgtgtctgttcaccgacttcgacagccagaccaacgtgtcccagagcaaggactccgacgtgtacatcaccgataagaccgtgctggacatgcggagcatggacttcaagagcaactccgccgtggcctggtccaacaagtccgatttcgcctgcgccaacgccttcaacaacagcattatcttcccacccatcaagaccgatgtgattacaatggaccccaaggacaactgctccaaggacgccaacgataccctgctgctccagctgaccaacaccagcgcctactacatgtacttgttgctgctgctgaagtccgtggtgtacttcgccatcatcacatgctgcctgctgcggagaaccgccttctgctgcaacggcgagaagtct

SEQ ID NO: 4369 - DNA, 444 bp, synthetic construct
  source 1..444: mol_type = other DNA
atccagaaccctgatcctgccgtgtaccagctgcgggatagcaagagcagcgacaagagcgtgtgtctgttcaccgacttcgacagccagaccaacgtgtcccagagcaaggactccgacgtgtacatcaccgataagaccgtgctggacatgcggagcatggacttcaagagcaactccgccgtggcctggtccaacaagtccgatttcgcctgcgccaacgccttcaacaacagcattatccccatcaagaccgatgtgattacaatggaccccaaggacaactgctccaaggacgccaacgataccctgctgctccagctgaccaacaccagcgcctactacatgtacttgttgctgctgctgaagtccgtggtgtacttcgccatcatcacatgctgcctgctgcggagaaccgccttctgctgcaacggcgagaagtct

SEQ ID NO: 4370 - DNA, 420 bp, synthetic construct
  source 1..420: mol_type = other DNA
atccagaaccctgatcctgccgtgtaccagctgcgggatagcaagagcagcgacaagagcgtgtgtctgttcaccgacttcgacagccagaccaacgtgtcccagagcaaggactccgacgtgtacatcaccgataagaccgtgctggacatgcggagcatggacttcaagagcaactccgccgtggcctggtccaacaagtccgatttcgcctgcgccaacgccttcaacaacagcattatcatggaccccaaggacaactgctccaaggacgccaacgataccctgctgctccagctgaccaacaccagcgcctactacatgtacttgttgctgctgctgaagtccgtggtgtacttcgccatcatcacatgctgcctgctgcggagaaccgccttctgctgcaacggcgagaagtct

SEQ ID NO: 4371 - DNA, 444 bp, synthetic construct; identical to SEQ ID NO: 4369
  source 1..444: mol_type = other DNA

SEQ ID NO: 4372 - DNA, 402 bp, synthetic construct
  source 1..402: mol_type = other DNA
atccagaaccctgatcctgccgtgtaccagctgcgggatagcaagagcagcgacaagagcgtgtgtctgttcaccgacttcgacagccagaccaacgtgtcccagagcaaggactccgacgtgtacatcaccgataagaccgtgctggacatgcggagcatggacttcaagagcaactccgccgtggcctggtccaacaagtccgatttcgcctgcgccaacgccttcaacaacagcattatctgctccaaggacgccaacgataccctgctgctccagctgaccaacaccagcgcctactacatgtacttgttgctgctgctgaagtccgtggtgtacttcgccatcatcacatgctgcctgctgcggagaaccgccttctgctgcaacggcgagaagtct

SEQ ID NO: 4373 - DNA, 447 bp, synthetic construct
  source 1..447: mol_type = other DNA
atccagaaccctgatcctgccgtgtaccagctgcgggatagcaagagcagcgacaagagcgtgtgtctgttcaccgacttcgacagccagaccaacgtgtcccagagcaaggactccgacgtgtacatcaccgataagaccgtgctggacatgcggagcatggacttcaagagcaactccgccgtggcctggtccaacaagtccgatttcgcctgcgccaacgccttcaacaacagcattatcgaagtgaaaaccgactccaccgaccacgtgaagcccaaagagacagagaacaccaagcagcccagcaagagctgccacaagcccaaggccatcgtgcacaccgagaaagtgaacatgatgagcctgaccgtgctgggcctgcggatgctgttcgccaaaaccgtggccgtgaacttcctgctgaccgccaagctgttcttcctc

SEQ ID NO: 4374 - DNA, 426 bp, synthetic construct
  source 1..426: mol_type = other DNA
atccagaaccctgatcctgccgtgtaccagctgcgggatagcaagagcagcgacaagagcgtgtgtctgttcaccgacttcgacagccagaccaacgtgtcccagagcaaggactccgacgtgtacatcaccgataagaccgtgctggacatgcggagcatggacttcaagagcaactccgccgtggcctggtccaacaagtccgatttcgcctgcgccaacgccttcaacaacagcattatcgaccacgtgaagcccaaagagacagagaacaccaagcagcccagcaagagctgccacaagcccaaggccatcgtgcacaccgagaaagtgaacatgatgagcctgaccgtgctgggcctgcggatgctgttcgccaaaaccgtggccgtgaacttcctgctgaccgccaagctgttcttcctc

SEQ ID NO: 4375 - DNA, 441 bp, synthetic construct; identical to SEQ ID NO: 4355
  source 1..441: mol_type = other DNA

SEQ ID NO: 4376 - DNA, 435 bp, synthetic construct; identical to SEQ ID NO: 4356
  source 1..435: mol_type = other DNA

SEQ ID NO: 4377 - DNA, 465 bp, synthetic construct; identical to SEQ ID NO: 4357
  source 1..465: mol_type = other DNA

SEQ ID NO: 4378 - DNA, 489 bp, synthetic construct; identical to SEQ ID NO: 4358
  source 1..489: mol_type = other DNA

SEQ ID NO: 4379 - DNA, 483 bp, synthetic construct; identical to SEQ ID NO: 4359
  source 1..483: mol_type = other DNA

SEQ ID NO: 4380 - DNA, 459 bp, synthetic construct; identical to SEQ ID NO: 4360
  source 1..459: mol_type = other DNA

SEQ ID NO: 4381 - DNA, 483 bp, synthetic construct; identical to SEQ ID NO: 4359
  source 1..483: mol_type = other DNA

SEQ ID NO: 4382 - DNA, 441 bp, synthetic construct; identical to SEQ ID NO: 4362
  source 1..441: mol_type = other DNA

SEQ ID NO: 4383 - DNA, 486 bp, synthetic construct; identical to SEQ ID NO: 4363
  source 1..486: mol_type = other DNA

SEQ ID NO: 4384 - DNA, 465 bp, synthetic construct; identical to SEQ ID NO: 4364
  source 1..465: mol_type = other DNA

SEQ ID NO: 4385 - DNA, 396 bp, synthetic construct
  source 1..396: mol_type = other DNA
aagagcagcgacaagagcgtgtgtctgttcaccgacttcgacagccagaccaacgtgtcccagagcaaggactccgacgtgtacatcaccgataagaccgtgctggacatgcggagcatggacttcaagagcaactccgccgtggcctggtccaacaagtccgatttcgcctgcgccaacgccttcaacaacagcattatccccgaggacacattcttcccaagccccgagagcagcggcagagccgattgcggctttaccagcgagagctaccagcagggcgtgctgagcgccaccatcctgtacgagatcctgctgggcaaggccaccctgtacgccgtgctggtgtctgccctggtgctgatggctatggtcaagcggaaggacagccgggga

SEQ ID NO: 4386 - DNA, 390 bp, synthetic construct
  source 1..390: mol_type = other DNA
aagagcagcgacaagagcgtgtgtctgttcaccgacttcgacagccagaccaacgtgtcccagagcaaggactccgacgtgtacatcaccgataagaccgtgctggacatgcggagcatggacttcaagagcaactccgccgtggcctggtccaacaagtccgatttcgcctgcgccaacgccttcaacaacagcattatccccgaggacacattcttcccaagccccgagagcagcgccgattgcggctttaccagcgagagctaccagcagggcgtgctgagcgccaccatcctgtacgagatcctgctgggcaaggccaccctgtacgccgtgctggtgtctgccctggtgctgatggctatggtcaagcggaaggacagccgggga

SEQ ID NO: 4387 - DNA, 420 bp, synthetic construct
  source 1..420: mol_type = other DNA
aagagcagcgacaagagcgtgtgtctgttcaccgacttcgacagccagaccaacgtgtcccagagcaaggactccgacgtgtacatcaccgataagaccgtgctggacatgcggagcatggacttcaagagcaactccgccgtggcctggtccaacaagtccgatttcgcctgcgccaacgccttcaacaacagcattatccccgaggacacattcttcccaagccccgagagcagccagatcgtgtctgccgaagcctggggcagagccgattgcggctttaccagcgagagctaccagcagggcgtgctgagcgccaccatcctgtacgagatcctgctgggcaaggccaccctgtacgccgtgctggtgtctgccctggtgctgatggctatggtcaagcggaaggacagccgggga

SEQ ID NO: 4388 - DNA, 444 bp, synthetic construct
  source 1..444: mol_type = other DNA
aagagcagcgacaagagcgtgtgtctgttcaccgacttcgacagccagaccaacgtgtcccagagcaaggactccgacgtgtacatcaccgataagaccgtgctggacatgcggagcatggacttcaagagcaactccgccgtggcctggtccaacaagtccgatttcgcctgcgccaacgccttcaacaacagcattatccccgaggacacattcttcccaagccccgagagcagcttcccacccatcaagaccgatgtgattacaatggaccccaaggacaactgctccaaggacgccaacgataccctgctgctccagctgaccaacaccagcgcctactacatgtacttgttgctgctgctgaagtccgtggtgtacttcgccatcatcacatgctgcctgctgcggagaaccgccttctgctgcaacggcgagaagtct

SEQ ID NO: 4389 - DNA, 438 bp, synthetic construct
  source 1..438: mol_type = other DNA
aagagcagcgacaagagcgtgtgtctgttcaccgacttcgacagccagaccaacgtgtcccagagcaaggactccgacgtgtacatcaccgataagaccgtgctggacatgcggagcatggacttcaagagcaactccgccgtggcctggtccaacaagtccgatttcgcctgcgccaacgccttcaacaacagcattatccccgaggacacattcttcccaagccccgagagcagccccatcaagaccgatgtgattacaatggaccccaaggacaactgctccaaggacgccaacgataccctgctgctccagctgaccaacaccagcgcctactacatgtacttgttgctgctgctgaagtccgtggtgtacttcgccatcatcacatgctgcctgctgcggagaaccgccttctgctgcaacggcgagaagtct

SEQ ID NO: 4390 - DNA, 414 bp, synthetic construct
  source 1..414: mol_type = other DNA
aagagcagcgacaagagcgtgtgtctgttcaccgacttcgacagccagaccaacgtgtcccagagcaaggactccgacgtgtacatcaccgataagaccgtgctggacatgcggagcatggacttcaagagcaactccgccgtggcctggtccaacaagtccgatttcgcctgcgccaacgccttcaacaacagcattatccccgaggacacattcttcccaagccccgagagcagcatggaccccaaggacaactgctccaaggacgccaacgataccctgctgctccagctgaccaacaccagcgcctactacatgtacttgttgctgctgctgaagtccgtggtgtacttcgccatcatcacatgctgcctgctgcggagaaccgccttctgctgcaacggcgagaagtct

SEQ ID NO: 4391 - DNA, 438 bp, synthetic construct; identical to SEQ ID NO: 4389
  source 1..438: mol_type = other DNA

SEQ ID NO: 4392 - DNA, 396 bp, synthetic construct
  source 1..396: mol_type = other DNA
aagagcagcgacaagagcgtgtgtctgttcaccgacttcgacagccagaccaacgtgtcccagagcaaggactccgacgtgtacatcaccgataagaccgtgctggacatgcggagcatggacttcaagagcaactccgccgtggcctggtccaacaagtccgatttcgcctgcgccaacgccttcaacaacagcattatccccgaggacacattcttcccaagccccgagagcagctgctccaaggacgccaacgataccctgctgctccagctgaccaacaccagcgcctactacatgtacttgttgctgctgctgaagtccgtggtgtacttcgccatcatcacatgctgcctgctgcggagaaccgccttctgctgcaacggcgagaagtct

SEQ ID NO: 4393 - DNA, 441 bp, synthetic construct
  source 1..441: mol_type = other DNA
aagagcagcgacaagagcgtgtgtctgttcaccgacttcgacagccagaccaacgtgtcccagagcaaggactccgacgtgtacatcaccgataagaccgtgctggacatgcggagcatggacttcaagagcaactccgccgtggcctggtccaacaagtccgatttcgcctgcgccaacgccttcaacaacagcattatccccgaggacacattcttcccaagccccgagagcagcgaagtgaaaaccgactccaccgaccacgtgaagcccaaagagacagagaacaccaagcagcccagcaagagctgccacaagcccaaggccatcgtgcacaccgagaaagtgaacatgatgagcctgaccgtgctgggcctgcggatgctgttcgccaaaaccgtggccgtgaacttcctgctgaccgccaagctgttcttcctc

SEQ ID NO: 4394 - DNA, 420 bp, synthetic construct
  source 1..420: mol_type = other DNA
aagagcagcgacaagagcgtgtgtctgttcaccgacttcgacagccagaccaacgtgtcccagagcaaggactccgacgtgtacatcaccgataagaccgtgctggacatgcggagcatggacttcaagagcaactccgccgtggcctggtccaacaagtccgatttcgcctgcgccaacgccttcaacaacagcattatccccgaggacacattcttcccaagccccgagagcagcgaccacgtgaagcccaaagagacagagaacaccaagcagcccagcaagagctgccacaagcccaaggccatcgtgcacaccgagaaagtgaacatgatgagcctgaccgtgctgggcctgcggatgctgttcgccaaaaccgtggccgtgaacttcctgctgaccgccaagctgttcttcctc

SEQ ID NO: 4395 - DNA, 558 bp, synthetic construct
  source 1..558: mol_type = other DNA
gaggacctgaagaacgtgttcccacctgaggtggccgtgttcgagcctagcgaggccgagatcagccacacccagaaagccaccctcgtgtgcctggctaccggcttctaccccgaccatgtggaactgtcttggtgggtcaacggcaaagaggtgcacagcggcgtgtctaccgacccccagccactgaaagaacagcccgccctgaacgacagccggtactgcctgagcagcagactgagagtgtccgccaccttctggcagaacccccggaaccacttcagatgccaggtgcagttctacggcctgagcgagaacgacgagtggacccaggacagagccaagcccgtgacccagatcgtgtctgccgaagcctggatccccgaggacacattcttcccaagccccgagagcagctgcgacgtgaagctggtggaaaagagcttcgagacagacaccaacctgaacttccagaacctgagcgtgatcggcttcagaatcctgctgctgaaagtggccggctttaacctgctgatgaccctgcggctgtggtccagc

SEQ ID NO: 4396 - DNA, 528 bp, synthetic construct
  source 1..528: mol_type = other DNA
gaggacctgaagaacgtgttcccacctgaggtggccgtgttcgagcctagcgaggccgagatcagccacacccagaaagccaccctcgtgtgcctggctaccggcttctaccccgaccatgtggaactgtcttggtgggtcaacggcaaagaggtgcacagcggcgtgtctaccgacccccagccactgaaagaacagcccgccctgaacgacagccggtactgcctgagcagcagactgagagtgtccgccaccttctggcagaacccccggaaccacttcagatgccaggtgcagttctacggcctgagcgagaacgacgagtggacccaggacagagccaagcccgtgacccagatcgtgtctgccgaagcctgggagagcagctgcgacgtgaagctggtggaaaagagcttcgagacagacaccaacctgaacttccagaacctgagcgtgatcggcttcagaatcctgctgctgaaagtggccggctttaacctgctgatgaccctgcggctgtggtccagc

SEQ ID NO: 4397 - DNA, 555 bp, synthetic construct
  source 1..555: mol_type = other DNA
gaggacctgaagaacgtgttcccacctgaggtggccgtgttcgagcctagcgaggccgagatcagccacacccagaaagccaccctcgtgtgcctggctaccggcttctaccccgaccatgtggaactgtcttggtgggtcaacggcaaagaggtgcacagcggcgtgtctaccgacccccagccactgaaagaacagcccgccctgaacgacagccggtactgcctgagcagcagactgagagtgtccgccaccttctggcagaacccccggaaccacttcagatgccaggtgcagttctacggcctgagcgagaacgacgagtggacccaggacagagccaagcccgtgacccagatcgtgtctgccgaagcctggcccgaggacacattcttcccaagccccgagagcagctgcgacgtgaagctggtggaaaagagcttcgagacagacaccaacctgaacttccagaacctgagcgtgatcggcttcagaatcctgctgctgaaagtggccggctttaacctgctgatgaccctgcggctgtggtccagc

SEQ ID NO: 4398 - DNA, 585 bp, synthetic construct
  source 1..585: mol_type = other DNA
gaggacctgaagaacgtgttcccacctgaggtggccgtgttcgagcctagcgaggccgagatcagccacacccagaaagccaccctcgtgtgcctggctaccggcttctaccccgaccatgtggaactgtcttggtgggtcaacggcaaagaggtgcacagcggcgtgtctaccgacccccagccactgaaagaacagcccgccctgaacgacagccggtactgcctgagcagcagactgagagtgtccgccaccttctggcagaacccccggaaccacttcagatgccaggtgcagttctacggcctgagcgagaacgacgagtggacccaggacagagccaagcccgtgacccagatcgtgtctgccgaagcctggttcccacccatcaagaccgatgtgattacaatggaccccaaggacaactgctccaaggacgccaacgataccctgctgctccagctgaccaacaccagcgcctactacatgtacttgttgctgctgctgaagtccgtggtgtacttcgccatcatcacatgctgcctgctgcggagaaccgccttctgctgcaacggcgagaagtct

SEQ ID NO: 4399 - DNA, 579 bp, synthetic construct
  source 1..579: mol_type = other DNA
gaggacctgaagaacgtgttcccacctgaggtggccgtgttcgagcctagcgaggccgagatcagccacacccagaaagccaccctcgtgtgcctggctaccggcttctaccccgaccatgtggaactgtcttggtgggtcaacggcaaagaggtgcacagcggcgtgtctaccgacccccagccactgaaagaacagcccgccctgaacgacagccggtactgcctgagcagcagactgagagtgtccgccaccttctggcagaacccccggaaccacttcagatgccaggtgcagttctacggcctgagcgagaacgacgagtggacccaggacagagccaagcccgtgacccagatcgtgtctgccgaagcctggcccatcaagaccgatgtgattacaatggaccccaaggacaactgctccaaggacgccaacgataccctgctgctccagctgaccaacaccagcgcctactacatgtacttgttgctgctgctgaagtccgtggtgtacttcgccatcatcacatgctgcctgctgcggagaaccgccttctgctgcaacggcgagaagtct

SEQ ID NO: 4400 - DNA, 555 bp, synthetic construct
  source 1..555: mol_type = other DNA
gaggacctgaagaacgtgttcccacctgaggtggccgtgttcgagcctagcgaggccgagatcagccacacccagaaagccaccctcgtgtgcctggctaccggcttctaccccgaccatgtggaactgtcttggtgggtcaacggcaaagaggtgcacagcggcgtgtctaccgacccccagccactgaaagaacagcccgccctgaacgacagccggtactgcctgagcagcagactgagagtgtccgccaccttctggcagaacccccggaaccacttcagatgccaggtgcagttctacggcctgagcgagaacgacgagtggacccaggacagagccaagcccgtgacccagatcgtgtctgccgaagcctggatggaccccaaggacaactgctccaaggacgccaacgataccctgctgctccagctgaccaacaccagcgcctactacatgtacttgttgctgctgctgaagtccgtggtgtacttcgccatcatcacatgctgcctgctgcggagaaccgccttctgctgcaacggcgagaagtct

SEQ ID NO: 4401 - DNA, 579 bp, synthetic construct; identical to SEQ ID NO: 4399
  source 1..579: mol_type = other DNA

SEQ ID NO: 4402 - DNA, 537 bp, synthetic construct
  source 1..537: mol_type = other DNA
gaggacctgaagaacgtgttcccacctgaggtggccgtgttcgagcctagcgaggccgagatcagccacacccagaaagccaccctcgtgtgcctggctaccggcttctaccccgaccatgtggaactgtcttggtgggtcaacggcaaagaggtgcacagcggcgtgtctaccgacccccagccactgaaagaacagcccgccctgaacgacagccggtactgcctgagcagcagactgagagtgtccgccaccttctggcagaacccccggaaccacttcagatgccaggtgcagttctacggcctgagcgagaacgacgagtggacccaggacagagccaagcccgtgacccagatcgtgtctgccgaagcctggtgctccaaggacgccaacgataccctgctgctccagctgaccaacaccagcgcctactacatgtacttgttgctgctgctgaagtccgtggtgtacttcgccatcatcacatgctgcctgctgcggagaaccgccttctgctgcaacggcgagaagtct

SEQ ID NO: 4403 - DNA, 582 bp, synthetic construct
  source 1..582: mol_type = other DNA
gaggacctgaagaacgtgttcccacctgaggtggccgtgttcgagcctagcgaggccgagatcagccacacccagaaagccaccctcgtgtgcctggctaccggcttctaccccgaccatgtggaactgtcttggtgggtcaacggcaaagaggtgcacagcggcgtgtctaccgacccccagccactgaaagaacagcccgccctgaacgacagccggtactgcctgagcagcagactgagagtgtccgccaccttctggcagaacccccggaaccacttcagatgccaggtgcagttctacggcctgagcgagaacgacgagtggacccaggacagagccaagcccgtgacccagatcgtgtctgccgaagcctgggaagtgaaaaccgactccaccgaccacgtgaagcccaaagagacagagaacaccaagcagcccagcaagagctgccacaagcccaaggccatcgtgcacaccgagaaagtgaacatgatgagcctgaccgtgctgggcctgcggatgctgttcgccaaaaccgtggccgtgaacttcctgctgaccgccaagctgttcttcctc

SEQ ID NO: 4404 - DNA, 561 bp, synthetic construct
  source 1..561: mol_type = other DNA
gaggacctgaagaacgtgttcccacctgaggtggccgtgttcgagcctagcgaggccgagatcagccacacccagaaagccaccctcgtgtgcctggctaccggcttctaccccgaccatgtggaactgtcttggtgggtcaacggcaaagaggtgcacagcggcgtgtctaccgacccccagccactgaaagaacagcccgccctgaacgacagccggtactgcctgagcagcagactgagagtgtccgccaccttctggcagaacccccggaaccacttcagatgccaggtgcagttctacggcctgagcgagaacgacgagtggacccaggacagagccaagcccgtgacccagatcgtgtctgccgaagcctgggaccacgtgaagcccaaagagacagagaacaccaagcagcccagcaagagctgccacaagcccaaggccatcgtgcacaccgagaaagtgaacatgatgagcctgaccgtgctgggcctgcggatgctgttcgccaaaaccgtggccgtgaacttcctgctgaccgccaagctgttcttcctc

SEQ ID NO: 4405 - DNA, 564 bp, synthetic construct
  source 1..564: mol_type = other DNA
gaggacctgaagaacgtgttcccacctgaggtggccgtgttcgagcctagcgaggccgagatcagccacacccagaaagccaccctcgtgtgcctggctaccggcttctaccccgaccatgtggaactgtcttggtgggtcaacggcaaagaggtgcacagcggcgtgtctaccgacccccagccactgaaagaacagcccgccctgaacgacagccggtactgcctgagcagcagactgagagtgtccgccaccttctggcagaacccccggaaccacttcagatgccaggtgcagttctacggcctgagcgagaacgacgagtggacccaggacagagccaagcccgtgacccagatcgtgtctgccgaagcctggggcagaatccccgaggacacattcttcccaagccccgagagcagctgcgacgtgaagctggtggaaaagagcttcgagacagacaccaacctgaacttccagaacctgagcgtgatcggcttcagaatcctgctgctgaaagtggccggctttaacctgctgatgaccctgcggctgtggtccagc

SEQ ID NO: 4406 - DNA, 534 bp, synthetic construct
  source 1..534: mol_type = other DNA
gaggacctgaagaacgtgttcccacctgaggtggccgtgttcgagcctagcgaggccgagatcagccacacccagaaagccaccctcgtgtgcctggctaccggcttctaccccgaccatgtggaactgtcttggtgggtcaacggcaaagaggtgcacagcggcgtgtctaccgacccccagccactgaaagaacagcccgccctgaacgacagccggtactgcctgagcagcagactgagagtgtccgccaccttctggcagaacccccggaaccacttcagatgccaggtgcagttctacggcctgagcgagaacgacgagtggacccaggacagagccaagcccgtgacccagatcgtgtctgccgaagcctggggcagagagagcagctgcgacgtgaagctggtggaaaagagcttcgagacagacaccaacctgaacttccagaacctgagcgtgatcggcttcagaatcctgctgctgaaagtggccggctttaacctgctgatgaccctgcggctgtggtccagc

SEQ ID NO: 4407 - DNA, 561 bp, synthetic construct
  source 1..561: mol_type = other DNA
gaggacctgaagaacgtgttcccacctgaggtggccgtgttcgagcctagcgaggccgagatcagccacacccagaaagccaccctcgtgtgcctggctaccggcttctaccccgaccatgtggaactgtcttggtgggtcaacggcaaagaggtgcacagcggcgtgtctaccgacccccagccactgaaagaacagcccgccctgaacgacagccggtactgcctgagcagcagactgagagtgtccgccaccttctggcagaacccccggaaccacttcagatgccaggtgcagttctacggcctgagcgagaacgacgagtggacccaggacagagccaagcccgtgacccagatcgtgtctgccgaagcctggggcagacccgaggacacattcttcccaagccccgagagcagctgcgacgtgaagctggtggaaaagagcttcgagacagacaccaacctgaacttccagaacctgagcgtgatcggcttcagaatcctgctgctgaaagtggccggctttaacctgctgatgaccctgcggctgtggtccagc

SEQ ID NO: 4408 - DNA, 591 bp, synthetic construct
  source 1..591: mol_type = other DNA
gaggacctgaagaacgtgttcccacctgaggtggccgtgttcgagcctagcgaggccgagatcagccacacccagaaagccaccctcgtgtgcctggctaccggcttctaccccgaccatgtggaactgtcttggtgggtcaacggcaaagaggtgcacagcggcgtgtctaccgacccccagccactgaaagaacagcccgccctgaacgacagccggtactgcctgagcagcagactgagagtgtccgccaccttctggcagaacccccggaaccacttcagatgccaggtgcagttctacggcctgagcgagaacgacgagtggacccaggacagagccaagcccgtgacccagatcgtgtctgccgaagcctggggcagattcccacccatcaagaccgatgtgattacaatggaccccaaggacaactgctccaaggacgccaacgataccctgctgctccagctgaccaacaccagcgcctactacatgtacttgttgctgctgctgaagtccgtggtgtacttcgccatcatcacatgctgcctgctgcggagaaccgccttctgctgcaacggcgagaagtct

SEQ ID NO: 4409 - DNA, 585 bp, synthetic construct
  source 1..585: mol_type = other DNA
gaggacctgaagaacgtgttcccacctgaggtggccgtgttcgagcctagcgaggccgagatcagccacacccagaaagccaccctcgtgtgcctggctaccggcttctaccccgaccatgtggaactgtcttggtgggtcaacggcaaagaggtgcacagcggcgtgtctaccgacccccagccactgaaagaacagcccgccctgaacgacagccggtactgcctgagcagcagactgagagtgtccgccaccttctggcagaacccccggaaccacttcagatgccaggtgcagttctacggcctgagcgagaacgacgagtggacccaggacagagccaagcccgtgacccagatcgtgtctgccgaagcctggggcagacccatcaagaccgatgtgattacaatggaccccaaggacaactgctccaaggacgccaacgataccctgctgctccagctgaccaacaccagcgcctactacatgtacttgttgctgctgctgaagtccgtggtgtacttcgccatcatcacatgctgcctgctgcggagaaccgccttctgctgcaacggcgagaagtct

SEQ ID NO: 4410 - DNA, 561 bp, synthetic construct
  source 1..561: mol_type = other DNA
gaggacctgaagaacgtgttcccacctgaggtggccgtgttcgagcctagcgaggccgagatcagccacacccagaaagccaccctcgtgtgcctggctaccggcttctaccccgaccatgtggaactgtcttggtgggtcaacggcaaagaggtgcacagcggcgtgtctaccgacccccagccactgaaagaacagcccgccctgaacgacagccggtactgcctgagcagcagactgagagtgtccgccaccttctggcagaacccccggaaccacttcagatgccaggtgcagttctacggcctgagcgagaacgacgagtggacccaggacagagccaagcccgtgacccagatcgtgtctgccgaagcctggggcagaatggaccccaaggacaactgctccaaggacgccaacgataccctgctgctccagctgaccaacaccagcgcctactacatgtacttgttgctgctgctgaagtccgtggtgtacttcgccatcatcacatgctgcctgctgcggagaaccgccttctgctgcaacggcgagaagtct

SEQ ID NO: 4411 - DNA, 585 bp, synthetic construct; identical to SEQ ID NO: 4409
  source 1..585: mol_type = other DNA

SEQ ID NO: 4412 - DNA, 543 bp, synthetic construct
  source 1..543: mol_type = other DNA
gaggacctgaagaacgtgttcccacctgaggtggccgtgttcgagcctagcgaggccgagatcagccacacccagaaagccaccctcgtgtgcctggctaccggcttctaccccgaccatgtggaactgtcttggtgggtcaacggcaaagaggtgcacagcggcgtgtctaccgacccccagccactgaaagaacagcccgccctgaacgacagccggtactgcctgagcagcagactgagagtgtccgccaccttctggcagaacccccggaaccacttcagatgccaggtgcagttctacggcctgagcgagaacgacgagtggacccaggacagagccaagcccgtgacccagatcgtgtctgccgaagcctggggcagatgctccaaggacgccaacgataccctgctgctccagctgaccaacaccagcgcctactacatgtacttgttgctgctgctgaagtccgtggtgtacttcgccatcatcacatgctgcctgctgcggagaaccgccttctgctgcaacggcgagaagtct

SEQ ID NO: 4413 - DNA, 588 bp, synthetic construct
  source 1..588: mol_type = other DNA
gaggacctgaagaacgtgttcccacctgaggtggccgtgttcgagcctagcgaggccgagatcagccacacccagaaagccaccctcgtgtgcctggctaccggcttctaccccgaccatgtggaactgtcttggtgggtcaacggcaaagaggtgcacagcggcgtgtctaccgacccccagccactgaaagaacagcccgccctgaacgacagccggtactgcctgagcagcagactgagagtgtccgccaccttctggcagaacccccggaaccacttcagatgccaggtgcagttctacggcctgagcgagaacgacgagtggacccaggacagagccaagcccgtgacccagatcgtgtctgccgaagcctggggcagagaagtgaaaaccgactccaccgaccacgtgaagcccaaagagacagagaacaccaagcagcccagcaagagctgccacaagcccaaggccatcgtgcacaccgagaaagtgaacatgatgagcctgaccgtgctgggcctgcggatgctgttcgccaaaaccgtggccgtgaacttcctgctgaccgccaagctgttcttcctc

SEQ ID NO: 4414 - DNA, 567 bp, synthetic construct
  source 1..567: mol_type = other DNA
gaggacctgaagaacgtgttcccacctgaggtggccgtgttcgagcctagcgaggccgagatcagccacacccagaaagccaccctcgtgtgcctggctaccggcttctaccccgaccatgtggaactgtcttggtgggtcaacggcaaagaggtgcacagcggcgtgtctaccgacccccagccactgaaagaacagcccgccctgaacgacagccggtactgcctgagcagcagactgagagtgtccgccaccttctggcagaacccccggaaccacttcagatgccaggtgcagttctacggcctgagcgagaacgacgagtggacccaggacagagccaagcccgtgacccagatcgtgtctgccgaagcctggggcagagaccacgtgaagcccaaagagacagagaacaccaagcagcccagcaagagctgccacaagcccaaggccatcgtgcacaccgagaaagtgaacatgatgagcctgaccgtgctgggcctgcggatgctgttcgccaaaaccgtggccgtgaacttcctgctgaccgccaagctgttcttcctc

SEQ ID NO: 4415 - DNA, 573 bp, synthetic construct
  source 1..573: mol_type = other DNA
gaggacctgaagaacgtgttcccacctgaggtggccgtgttcgagcctagcgaggccgagatcagccacacccagaaagccaccctcgtgtgcctggctaccggcttctaccccgaccatgtggaactgtcttggtgggtcaacggcaaagaggtgcacagcggcgtgtctaccgacccccagccactgaaagaacagcccgccctgaacgacagccggtactgcctgagcagcagactgagagtgtccgccaccttctggcagaacccccggaaccacttcagatgccaggtgcagttctacggcctgagcgagaacgacgagtggacccaggacagagccaagcccgtgacccagatcgtgtctgccgaagcctggggcagagccgattgcatccccgaggacacattcttcccaagccccgagagcagctgcgacgtgaagctggtggaaaagagcttcgagacagacaccaacctgaacttccagaacctgagcgtgatcggcttcagaatcctgctgctgaaagtggccggctttaacctgctgatgaccctgcggctgtggtccagc

SEQ ID NO: 4416 - DNA, 543 bp, synthetic construct
  source 1..543: mol_type = other DNA
gaggacctgaagaacgtgttcccacctgaggtggccgtgttcgagcctagcgaggccgagatcagccacacccagaaagccaccctcgtgtgcctggctaccggcttctaccccgaccatgtggaactgtcttggtgggtcaacggcaaagaggtgcacagcggcgtgtctaccgacccccagccactgaaagaacagcccgccctgaacgacagccggtactgcctgagcagcagactgagagtgtccgccaccttctggcagaacccccggaaccacttcagatgccaggtgcagttctacggcctgagcgagaacgacgagtggacccaggacagagccaagcccgtgacccagatcgtgtctgccgaagcctggggcagagccgattgcgagagcagctgcgacgtgaagctggtggaaaagagcttcgagacagacaccaacctgaacttccagaacctgagcgtgatcggcttcagaatcctgctgctgaaagtggccggctttaacctgctgatgaccctgcggctgtggtccagc

SEQ ID NO: 4417 - DNA, 570 bp, synthetic construct
  source 1..570: mol_type = other DNA
gaggacctgaagaacgtgttcccacctgaggtggccgtgttcgagcctagcgaggccgagatcagccacacccagaaagccaccctcgtgtgcctggctaccggcttctaccccgaccatgtggaactgtcttggtgggtcaacggcaaagaggtgcacagcggcgtgtctaccgacccccagccactgaaagaacagcccgccctgaacgacagccggtactgcctgagcagcagactgagagtgtccgccaccttctggcagaacccccggaaccacttcagatgccaggtgcagttctacggcctgagcgagaacgacgagtggacccaggacagagccaagcccgtgacccagatcgtgtctgccgaagcctggggcagagccgattgccccgaggacacattcttcccaagccccgagagcagctgcgacgtgaagctggtggaaaagagcttcgagacagacaccaacctgaacttccagaacctgagcgtgatcggcttcagaatcctgctgctgaaagtggccggctttaacctgctgatgaccctgcggctgtggtccagc

SEQ ID NO: 4418 - DNA, 600 bp, synthetic construct
  source 1..600: mol_type = other DNA
gaggacctgaagaacgtgttcccacctgaggtggccgtgttcgagcctagcgaggccgagatcagccacacccagaaagccaccctcgtgtgcctggctaccggcttctaccccgaccatgtggaactgtcttggtgggtcaacggcaaagaggtgcacagcggcgtgtctaccgacccccagccactgaaagaacagcccgccctgaacgacagccggtactgcctgagcagcagactgagagtgtccgccaccttctggcagaacccccggaaccacttcagatgccaggtgcagttctacggcctgagcgagaacgacgagtggacccaggacagagccaagcccgtgacccagatcgtgtctgccgaagcctggggcagagccgattgcttcccacccatcaagaccgatgtgattacaatggaccccaaggacaactgctccaaggacgccaacgataccctgctgctccagctgaccaacaccagcgcctactacatgtacttgttgctgctgctgaagtccgtggtgtacttcgccatcatcacatgctgcctgctgcggagaaccgccttctgctgcaacggcgagaagtct

SEQ ID NO: 4419 - DNA, 594 bp, synthetic construct
  source 1..594: mol_type = other DNA
gaggacctgaagaacgtgttcccacctgaggtggccgtgttcgagcctagcgaggccgagatcagccacacccagaaagccaccctcgtgtgcctggctaccggcttctaccccgaccatgtggaactgtcttggtgggtcaacggcaaagaggtgcacagcggcgtgtctaccgacccccagccactgaaagaacagcccgccctgaacgacagccggtactgcctgagcagcagactgagagtgtccgccaccttctggcagaacccccggaaccacttcagatgccaggtgcagttctacggcctgagcgagaacgacgagtggacccaggacagagccaagcccgtgacccagatcgtgtctgccgaagcctggggcagagccgattgccccatcaagaccgatgtgattacaatggaccccaaggacaactgctccaaggacgccaacgataccctgctgctccagctgaccaacaccagcgcctactacatgtacttgttgctgctgctgaagtccgtggtgtacttcgccatcatcacatgctgcctgctgcggagaaccgccttctgctgcaacggcgagaagtct

SEQ ID NO: 4420 - DNA, 570 bp, synthetic construct
  source 1..570: mol_type = other DNA
gaggacctgaagaacgtgttcccacctgaggtggccgtgttcgagcctagcgaggccgagatcagccacacccagaaagccaccctcgtgtgcctggctaccggcttctaccccgaccatgtggaactgtcttggtgggtcaacggcaaagaggtgcacagcggcgtgtctaccgacccccagccactgaaagaacagcccgccctgaacgacagccggtactgcctgagcagcagactgagagtgtccgccaccttctggcagaacccccggaaccacttcagatgccaggtgcagttctacggcctgagcgagaacgacgagtggacccaggacagagccaagcccgtgacccagatcgtgtctgccgaagcctggggcagagccgattgcatggaccccaaggacaactgctccaaggacgccaacgataccctgctgctccagctgaccaacaccagcgcctactacatgtacttgttgctgctgctgaagtccgtggtgtacttcgccatcatcacatgctgcctgctgcggagaaccgccttctgctgcaacggcgagaagtct

SEQ ID NO: 4421 - DNA, 594 bp, synthetic construct; identical to SEQ ID NO: 4419
  source 1..594: mol_type = other DNA

SEQ ID NO: 4422 - DNA, 552 bp, synthetic construct
  source 1..552: mol_type = other DNA
gaggacctgaagaacgtgttcccacctgaggtggccgtgttcgagcctagcgaggccgagatcagccacacccagaaagccaccctcgtgtgcctggctaccggcttctaccccgaccatgtggaactgtcttggtgggtcaacggcaaagaggtgcacagcggcgtgtctaccgacccccagccactgaaagaacagcccgccctgaacgacagccggtactgcctgagcagcagactgagagtgtccgccaccttctggcagaacccccggaaccacttcagatgccaggtgcagttctacggcctgagcgagaacgacgagtggacccaggacagagccaagcccgtgacccagatcgtgtctgccgaagcctggggcagagccgattgctgctccaaggacgccaacgataccctgctgctccagctgaccaacaccagcgcctactacatgtacttgttgctgctgctgaagtccgtggtgtacttcgccatcatcacatgctgcctgctgcggagaaccgccttctgctgcaacggcgagaagtct

SEQ ID NO: 4423 - DNA, 597 bp, synthetic construct
  source 1..597: mol_type = other DNA
gaggacctgaagaacgtgttcccacctgaggtggccgtgttcgagcctagcgaggccgagatcagccacacccagaaagccaccctcgtgtgcctggctaccggcttctaccccgaccatgtggaactgtcttggtgggtcaacggcaaagaggtgcacagcggcgtgtctaccgacccccagccactgaaagaacagcccgccctgaacgacagccggtactgcctgagcagcagactgagagtgtccgccaccttctggcagaacccccggaaccacttcagatgccaggtgcagttctacggcctgagcgagaacgacgagtggacccaggacagagccaagcccgtgacccagatcgtgtctgccgaagcctggggcagagccgattgcgaagtgaaaaccgactccaccgaccacgtgaagcccaaagagacagagaacaccaagcagcccagcaagagctgccacaagcccaaggccatcgtgcacaccgagaaagtgaacatgatgagcctgaccgtgctgggcctgcggatgctgttcgccaaaaccgtggccgtgaacttcctgctgaccgccaagctgttcttcctc

SEQ ID NO: 4424 - DNA, 576 bp, synthetic construct
  source 1..576: mol_type = other DNA
gaggacctgaagaacgtgttcccacctgaggtggccgtgttcgagcctagcgaggccgagatcagccacacccagaaagccaccctcgtgtgcctggctaccggcttctaccccgaccatgtggaactgtcttggtgggtcaacggcaaagaggtgcacagcggcgtgtctaccgacccccagccactgaaagaacagcccgccctgaacgacagccggtactgcctgagcagcagactgagagtgtccgccaccttctggcagaacccccggaaccacttcagatgccaggtgcagttctacggcctgagcgagaacgacgagtggacccaggacagagccaagcccgtgacccagatcgtgtctgccgaagcctggggcagagccgattgcgaccacgtgaagcccaaagagacagagaacaccaagcagcccagcaagagctgccacaagcccaaggccatcgtgcacaccgagaaagtgaacatgatgagcctgaccgtgctgggcctgcggatgctgttcgccaaaaccgtggccgtgaacttcctgctgaccgccaagctgttcttcctc

SEQ ID NO: 4425 - DNA, 534 bp, synthetic construct
  source 1..534: mol_type = other DNA
gaggacctgaagaacgtgttcccacctgaggtggccgtgttcgagcctagcgaggccgagatcagccacacccagaaagccaccctcgtgtgcctggctaccggcttctaccccgaccatgtggaactgtcttggtgggtcaacggcaaagaggtgcacagcggcgtgtctaccgacccccagccactgaaagaacagcccgccctgaacgacagccggtactgcctgagcagcagactgagagtgtccgccaccttctggcagaacccccggaaccacttcagatgccaggtgcagttctacggcctgagcgagaacgacgagtggacccaggacagagccaagcccgtgaccatccccgaggacacattcttcccaagccccgagagcagctgcgacgtgaagctggtggaaaagagcttcgagacagacaccaacctgaacttccagaacctgagcgtgatcggcttcagaatcctgctgctgaaagtggccggctttaacctgctgatgaccctgcggctgtggtccagc

SEQ ID NO: 4426 - DNA, 504 bp, synthetic construct
  source 1..504: mol_type = other DNA
gaggacctgaagaacgtgttcccacctgaggtggccgtgttcgagcctagcgaggccgagatcagccacacccagaaagccaccctcgtgtgcctggctaccggcttctaccccgaccatgtggaactgtcttggtgggtcaacggcaaagaggtgcacagcggcgtgtctaccgacccccagccactgaaagaacagcccgccctgaacgacagccggtactgcctgagcagcagactgagagtgtccgccaccttctggcagaacccccggaaccacttcagatgccaggtgcagttctacggcctgagcgagaacgacgagtggacccaggacagagccaagcccgtgaccgagagcagctgcgacgtgaagctggtggaaaagagcttcgagacagacaccaacctgaacttccagaacctgagcgtgatcggcttcagaatcctgctgctgaaagtggccggctttaacctgctgatgaccctgcggctgtggtccagc

SEQ ID NO: 4427 - DNA, 531 bp, synthetic construct
  source 1..531: mol_type = other DNA
gaggacctgaagaacgtgttcccacctgaggtggccgtgttcgagcctagcgaggccgagatcagccacacccagaaagccaccctcgtgtgcctggctaccggcttctaccccgaccatgtggaactgtcttggtgggtcaacggcaaagaggtgcacagcggcgtgtctaccgacccccagccactgaaagaacagcccgccctgaacgacagccggtactgcctgagcagcagactgagagtgtccgccaccttctggcagaacccccggaaccacttcagatgccaggtgcagttctacggcctgagcgagaacgacgagtggacccaggacagagccaagcccgtgacccccgaggacacattcttcccaagccccgagagcagctgcgacgtgaagctggtggaaaagagcttcgagacagacaccaacctgaacttccagaacctgagcgtgatcggcttcagaatcctgctgctgaaagtggccggctttaacctgctgatgaccctgcggctgtggtccagc

SEQ ID NO: 4428 - DNA, 561 bp, synthetic construct
  source 1..561: mol_type = other DNA
gaggacctgaagaacgtgttcccacctgaggtggccgtgttcgagcctagcgaggccgagatcagccacacccagaaagccaccctcgtgtgcctggctaccggcttctaccccgaccatgtggaactgtcttggtgggtcaacggcaaagaggtgcacagcggcgtgtctaccgacccccagccactgaaagaacagcccgccctgaacgacagccggtactgcctgagcagcagactgagagtgtccgccaccttctggcagaacccccggaaccacttcagatgccaggtgcagttctacggcctgagcgagaacgacgagtggacccaggacagagccaagcccgtgaccttcccacccatcaagaccgatgtgattacaatggaccccaaggacaactgctccaaggacgccaacgataccctgctgctccagctgaccaacaccagcgcctactacatgtacttgttgctgctgctgaagtccgtggtgtacttcgccatcatcacatgctgcctgctgcggagaaccgccttctgctgcaacggcgagaagtct

SEQ ID NO: 4429 - DNA, 555 bp, synthetic construct
  source 1..555: mol_type = other DNA
gaggacctgaagaacgtgttcccacctgaggtggccgtgttcgagcctagcgaggccgagatcagccacacccagaaagccaccctcgtgtgcctggctaccggcttctaccccgaccatgtggaactgtcttggtgggtcaacggcaaagaggtgcacagcggcgtgtctaccgacccccagccactgaaagaacagcccgccctgaacgacagccggtactgcctgagcagcagactgagagtgtccgccaccttctggcagaacccccggaaccacttcagatgccaggtgcagttctacggcctgagcgagaacgacgagtggacccaggacagagccaagcccgtgacccccatcaagaccgatgtgattacaatggaccccaaggacaactgctccaaggacgccaacgataccctgctgctccagctgaccaacaccagcgcctactacatgtacttgttgctgctgctgaagtccgtggtgtacttcgccatcatcacatgctgcctgctgcggagaaccgccttctgctgcaacggcgagaagtct

SEQ ID NO: 4430 - DNA, 531 bp, synthetic construct
  source 1..531: mol_type = other DNA
gaggacctgaagaacgtgttcccacctgaggtggccgtgttcgagcctagcgaggccgagatcagccacacccagaaagccaccctcgtgtgcctggctaccggcttctaccccgaccatgtggaactgtcttggtgggtcaacggcaaagaggtgcacagcggcgtgtctaccgacccccagccactgaaagaacagcccgccctgaacgacagccggtactgcctgagcagcagactgagagtgtccgccaccttctggcagaacccccggaaccacttcagatgccaggtgcagttctacggcctgagcgagaacgacgagtggacccaggacagagccaagcccgtgaccatggaccccaaggacaactgctccaaggacgccaacgataccctgctgctccagctgaccaacaccagcgcctactacatgtacttgttgctgctgctgaagtccgtggtgtacttcgccatcatcacatgctgcctgctgcggagaaccgccttctgctgcaacggcgagaagtct

SEQ ID NO: 4431 - DNA, 555 bp, synthetic construct; identical to SEQ ID NO: 4429
  source 1..555: mol_type = other DNA

SEQ ID NO: 4432 - DNA, 513 bp, synthetic construct
  source 1..513: mol_type = other DNA
gaggacctgaagaacgtgttcccacctgaggtggccgtgttcgagcctagcgaggccgagatcagccacacccagaaagccaccctcgtgtgcctggctaccggcttctaccccgaccatgtggaactgtcttggtgggtcaacggcaaagaggtgcacagcggcgtgtctaccgacccccagccactgaaagaacagcccgccctgaacgacagccggtactgcctgagcagcagactgagagtgtccgccaccttctggcagaacccccggaaccacttcagatgccaggtgcagttctacggcctgagcgagaacgacgagtggacccaggacagagccaagcccgtgacctgctccaaggacgccaacgataccctgctgctccagctgaccaacaccagcgcctactacatgtacttgttgctgctgctgaagtccgtggtgtacttcgccatcatcacatgctgcctgctgcggagaaccgccttctgctgcaacggcgagaagtct

SEQ ID NO: 4433 - DNA, 558 bp, synthetic construct
  source 1..558: mol_type = other DNA
gaggacctgaagaacgtgttcccacctgaggtggccgtgttcgagcctagcgaggccgagatcagccacacccagaaagccaccctcgtgtgcctggctaccggcttctaccccgaccatgtggaactgtcttggtgggtcaacggcaaagaggtgcacagcggcgtgtctaccgacccccagccactgaaagaacagcccgccctgaacgacagccggtactgcctgagcagcagactgagagtgtccgccaccttctggcagaacccccggaaccacttcagatgccaggtgcagttctacggcctgagcgagaacgacgagtggacccaggacagagccaagcccgtgaccgaagtgaaaaccgactccaccgaccacgtgaagcccaaagagacagagaacaccaagcagcccagcaagagctgccacaagcccaaggccatcgtgcacaccgagaaagtgaacatgatgagcctgaccgtgctgggcctgcggatgctgttcgccaaaaccgtggccgtgaacttcctgctgaccgccaagctgttcttcctc

SEQ ID NO: 4434 - DNA, 537 bp, synthetic construct
  source 1..537: mol_type = other DNA
gaggacctgaagaacgtgttcccacctgaggtggccgtgttcgagcctagcgaggccgagatcagccacacccagaaagccaccctcgtgtgcctggctaccggcttctaccccgaccatgtggaactgtcttggtgggtcaacggcaaagaggtgcacagcggcgtgtctaccgacccccagccactgaaagaacagcccgccctgaacgacagccggtactgcctgagcagcagactgagagtgtccgccaccttctggcagaacccccggaaccacttcagatgccaggtgcagttctacggcctgagcgagaacgacgagtggacccaggacagagccaagcccgtgaccgaccacgtgaagcccaaagagacagagaacaccaagcagcccagcaagagctgccacaagcccaaggccatcgtgcacaccgagaaagtgaacatgatgagcctgaccgtgctgggcctgcggatgctgttcgccaaaaccgtggccgtgaacttcctgctgaccgccaagctgttcttcctc

SEQ ID NO: 4435 - DNA, 558 bp, synthetic construct; identical to SEQ ID NO: 4395
  source 1..558: mol_type = other DNA

SEQ ID NO: 4436 - DNA, 528 bp, synthetic construct; identical to SEQ ID NO: 4396
  source 1..528: mol_type = other DNA

SEQ ID NO: 4437 - DNA, 555 bp, synthetic construct; identical to SEQ ID NO: 4397
  source 1..555: mol_type = other DNA

SEQ ID NO: 4438 - DNA, 585 bp, synthetic construct; identical to SEQ ID NO: 4398
  source 1..585: mol_type = other DNA

SEQ ID NO: 4439 - DNA, 579 bp, synthetic construct; identical to SEQ ID NO: 4399
  source 1..579: mol_type = other DNA

SEQ ID NO: 4440 - DNA, 555 bp, synthetic construct; identical to SEQ ID NO: 4400
  source 1..555: mol_type = other DNA

SEQ ID NO: 4441 - DNA, 579 bp, synthetic construct; identical to SEQ ID NO: 4399
  source 1..579: mol_type = other DNA

SEQ ID NO: 4442 - DNA, 537 bp, synthetic construct; identical to SEQ ID NO: 4402
  source 1..537: mol_type = other DNA

SEQ ID NO: 4443 - DNA, 582 bp, synthetic construct; identical to SEQ ID NO: 4403
  source 1..582: mol_type = other DNA

SEQ ID NO: 4444 - DNA, 561 bp, synthetic construct; identical to SEQ ID NO: 4404
  source 1..561: mol_type = other DNA

SEQ ID NO: 4445 - DNA, 510 bp, synthetic construct
  source 1..510: mol_type = other DNA
cctgaggtggccgtgttcgagcctagcgaggccgagatcagccacacccagaaagccaccctcgtgtgcctggctaccggcttctaccccgaccatgtggaactgtcttggtgggtcaacggcaaagaggtgcacagcggcgtgtctaccgacccccagccactgaaagaacagcccgccctgaacgacagccggtactgcctgagcagcagactgagagtgtccgccaccttctggcagaacccccggaaccacttcagatgccaggtgcagttctacggcctgagcgagaacgacgagtggacccaggacagagccaagcccgtgaccatccccgaggacacattcttcccaagccccgagagcagctgcgacgtgaagctggtggaaaagagcttcgagacagacaccaacctgaacttccagaacctgagcgtgatcggcttcagaatcctgctgctgaaagtggccggctttaacctgctgatgaccctgcggctgtggtccagc

SEQ ID NO: 4446 - DNA, 480 bp, synthetic construct
  source 1..480: mol_type = other DNA
cctgaggtggccgtgttcgagcctagcgaggccgagatcagccacacccagaaagccaccctcgtgtgcctggctaccggcttctaccccgaccatgtggaactgtcttggtgggtcaacggcaaagaggtgcacagcggcgtgtctaccgacccccagccactgaaagaacagcccgccctgaacgacagccggtactgcctgagcagcagactgagagtgtccgccaccttctggcagaacccccggaaccacttcagatgccaggtgcagttctacggcctgagcgagaacgacgagtggacccaggacagagccaagcccgtgaccgagagcagctgcgacgtgaagctggtggaaaagagcttcgagacagacaccaacctgaacttccagaacctgagcgtgatcggcttcagaatcctgctgctgaaagtggccggctttaacctgctgatgaccctgcggctgtggtccagc

SEQ ID NO: 4447 - DNA, 507 bp, synthetic construct
  source 1..507: mol_type = other DNA
cctgaggtggccgtgttcgagcctagcgaggccgagatcagccacacccagaaagccaccctcgtgtgcctggctaccggcttctaccccgaccatgtggaactgtcttggtgggtcaacggcaaagaggtgcacagcggcgtgtctaccgacccccagccactgaaagaacagcccgccctgaacgacagccggtactgcctgagcagcagactgagagtgtccgccaccttctggcagaacccccggaaccacttcagatgccaggtgcagttctacggcctgagcgagaacgacgagtggacccaggacagagccaagcccgtgacccccgaggacacattcttcccaagccccgagagcagctgcgacgtgaagctggtggaaaagagcttcgagacagacaccaacctgaacttccagaacctgagcgtgatcggcttcagaatcctgctgctgaaagtggccggctttaacctgctgatgaccctgcggctgtggtccagc

SEQ ID NO: 4448 - DNA, 537 bp, synthetic construct
  source 1..537: mol_type = other DNA
cctgaggtggccgtgttcgagcctagcgaggccgagatcagccacacccagaaagccaccctcgtgtgcctggctaccggcttctaccccgaccatgtggaactgtcttggtgggtcaacggcaaagaggtgcacagcggcgtgtctaccgacccccagccactgaaagaacagcccgccctgaacgacagccggtactgcctgagcagcagactgagagtgtccgccaccttctggcagaacccccggaaccacttcagatgccaggtgcagttctacggcctgagcgagaacgacgagtggacccaggacagagccaagcccgtgaccttcccacccatcaagaccgatgtgattacaatggaccccaaggacaactgctccaaggacgccaacgataccctgctgctccagctgaccaacaccagcgcctactacatgtacttgttgctgctgctgaagtccgtggtgtacttcgccatcatcacatgctgcctgctgcggagaaccgccttctgctgcaacggcgagaagtct

SEQ ID NO: 4449 - DNA, 531 bp, synthetic construct
  source 1..531: mol_type = other DNA
cctgaggtggccgtgttcgagcctagcgaggccgagatcagccacacccagaaagccaccctcgtgtgcctggctaccggcttctaccccgaccatgtggaactgtcttggtgggtcaacggcaaagaggtgcacagcggcgtgtctaccgacccccagccactgaaagaacagcccgccctgaacgacagccggtactgcctgagcagcagactgagagtgtccgccaccttctggcagaacccccggaaccacttcagatgccaggtgcagttctacggcctgagcgagaacgacgagtggacccaggacagagccaagcccgtgacccccatcaagaccgatgtgattacaatggaccccaaggacaactgctccaaggacgccaacgataccctgctgctccagctgaccaacaccagcgcctactacatgtacttgttgctgctgctgaagtccgtggtgtacttcgccatcatcacatgctgcctgctgcggagaaccgccttctgctgcaacggcgagaagtct

SEQ ID NO: 4450 - DNA, 507 bp, synthetic construct
  source 1..507: mol_type = other DNA
cctgaggtggccgtgttcgagcctagcgaggccgagatcagccacacccagaaagccaccctcgtgtgcctggctaccggcttctaccccgaccatgtggaactgtcttggtgggtcaacggcaaagaggtgcacagcggcgtgtctaccgacccccagccactgaaagaacagcccgccctgaacgacagccggtactgcctgagcagcagactgagagtgtccgccaccttctggcagaacccccggaaccacttcagatgccaggtgcagttctacggcctgagcgagaacgacgagtggacccaggacagagccaagcccgtgaccatggaccccaaggacaactgctccaaggacgccaacgataccctgctgctccagctgaccaacaccagcgcctactacatgtacttgttgctgctgctgaagtccgtggtgtacttcgccatcatcacatgctgcctgctgcggagaaccgccttctgctgcaacggcgagaagtct

SEQ ID NO: 4451 - DNA, 531 bp, synthetic construct; identical to SEQ ID NO: 4449
  source 1..531: mol_type = other DNA

SEQ ID NO: 4452 - DNA, 489 bp, synthetic construct
  source 1..489: mol_type = other DNA
cctgaggtggccgtgttcgagcctagcgaggccgagatcagccacacccagaaagccaccctcgtgtgcctggctaccggcttctaccccgaccatgtggaactgtcttggtgggtcaacggcaaagaggtgcacagcggcgtgtctaccgacccccagccactgaaagaacagcccgccctgaacgacagccggtactgcctgagcagcagactgagagtgtccgccaccttctggcagaacccccggaaccacttcagatgccaggtgcagttctacggcctgagcgagaacgacgagtggacccaggacagagccaagcccgtgacctgctccaaggacgccaacgataccctgctgctccagctgaccaacaccagcgcctactacatgtacttgttgctgctgctgaagtccgtggtgtacttcgccatcatcacatgctgcctgctgcggagaaccgccttctgctgcaacggcgagaagtct

SEQ ID NO: 4453 - DNA, 534 bp, synthetic construct
  source 1..534: mol_type = other DNA
cctgaggtggccgtgttcgagcctagcgaggccgagatcagccacacccagaaagccaccctcgtgtgcctggctaccggcttctaccccgaccatgtggaactgtcttggtgggtcaacggcaaagaggtgcacagcggcgtgtctaccgacccccagccactgaaagaacagcccgccctgaacgacagccggtactgcctgagcagcagactgagagtgtccgccaccttctggcagaacccccggaaccacttcagatgccaggtgcagttctacggcctgagcgagaacgacgagtggacccaggacagagccaagcccgtgaccgaagtgaaaaccgactccaccgaccacgtgaagcccaaagagacagagaacaccaagcagcccagcaagagctgccacaagcccaaggccatcgtgcacaccgagaaagtgaacatgatgagcctgaccgtgctgggcctgcggatgctgttcgccaaaaccgtggccgtgaacttcctgctgaccgccaagctgttcttcctc

SEQ ID NO: 4454 - DNA, 513 bp, synthetic construct
  source 1..513: mol_type = other DNA
cctgaggtggccgtgttcgagcctagcgaggccgagatcagccacacccagaaagccaccctcgtgtgcctggctaccggcttctaccccgaccatgtggaactgtcttggtgggtcaacggcaaagaggtgcacagcggcgtgtctaccgacccccagccactgaaagaacagcccgccctgaacgacagccggtactgcctgagcagcagactgagagtgtccgccaccttctggcagaacccccggaaccacttcagatgccaggtgcagttctacggcctgagcgagaacgacgagtggacccaggacagagccaagcccgtgaccgaccacgtgaagcccaaagagacagagaacaccaagcagcccagcaagagctgccacaagcccaaggccatcgtgcacaccgagaaagtgaacatgatgagcctgaccgtgctgggcctgcggatgctgttcgccaaaaccgtggccgtgaacttcctgctgaccgccaagctgttcttcctc

SEQ ID NO: 4455 - DNA, 492 bp, synthetic construct
  source 1..492: mol_type = other DNA
gacaagcagctggacgccgacgtgtcccccaagcctaccatcttcctgccctctatcgccgagacaaagctccagaaggccggcacctacctgtgcctgctggaaaagttcttcccagatgtgattaagatccactggcaggaaaagaagtccaacaccatcctgggcagccaggaaggcaacaccatgaagaccaacgacacctacatgaagttcagctggctgaccgtgcccgagaagtccctggacaaagaacacagatgcatcgtgcggcacgaaaacaacaagaacggcgtggaccaggaaatcatcatccccgaggacacattcttcccaagccccgagagcagctgcgacgtgaagctggtggaaaagagcttcgagacagacaccaacctgaacttccagaacctgagcgtgatcggcttcagaatcctgctgctgaaagtggccggctttaacctgctgatgaccctgcggctgtggtccagc

SEQ ID NO: 4456 - DNA, 462 bp, synthetic construct
  source 1..462: mol_type = other DNA
gacaagcagctggacgccgacgtgtcccccaagcctaccatcttcctgccctctatcgccgagacaaagctccagaaggccggcacctacctgtgcctgctggaaaagttcttcccagatgtgattaagatccactggcaggaaaagaagtccaacaccatcctgggcagccaggaaggcaacaccatgaagaccaacgacacctacatgaagttcagctggctgaccgtgcccgagaagtccctggacaaagaacacagatgcatcgtgcggcacgaaaacaacaagaacggcgtggaccaggaaatcatcgagagcagctgcgacgtgaagctggtggaaaagagcttcgagacagacaccaacctgaacttccagaacctgagcgtgatcggcttcagaatcctgctgctgaaagtggccggctttaacctgctgatgaccctgcggctgtggtccagc

SEQ ID NO: 4457 - DNA, 489 bp, synthetic construct
  source 1..489: mol_type = other DNA
gacaagcagctggacgccgacgtgtcccccaagcctaccatcttcctgccctctatcgccgagacaaagctccagaaggccggcacctacctgtgcctgctggaaaagttcttcccagatgtgattaagatccactggcaggaaaagaagtccaacaccatcctgggcagccaggaaggcaacaccatgaagaccaacgacacctacatgaagttcagctggctgaccgtgcccgagaagtccctggacaaagaacacagatgcatcgtgcggcacgaaaacaacaagaacggcgtggaccaggaaatcatccccgaggacacattcttcccaagccccgagagcagctgcgacgtgaagctggtggaaaagagcttcgagacagacaccaacctgaacttccagaacctgagcgtgatcggcttcagaatcctgctgctgaaagtggccggctttaacctgctgatgaccctgcggctgtggtccagc

SEQ ID NO: 4458 - DNA, 471 bp, synthetic construct
  source 1..471: mol_type = other DNA
gacaagcagctggacgccgacgtgtcccccaagcctaccatcttcctgccctctatcgccgagacaaagctccagaaggccggcacctacctgtgcctgctggaaaagttcttcccagatgtgattaagatccactggcaggaaaagaagtccaacaccatcctgggcagccaggaaggcaacaccatgaagaccaacgacacctacatgaagttcagctggctgaccgtgcccgagaagtccctggacaaagaacacagatgcatcgtgcggcacgaaaacaacaagaacggcgtggaccaggaaatcatcggcagagccgattgcggctttaccagcgagagctaccagcagggcgtgctgagcgccaccatcctgtacgagatcctgctgggcaaggccaccctgtacgccgtgctggtgtctgccctggtgctgatggctatggtcaagcggaaggacagccgggga

SEQ ID NO: 4459 - DNA, 465 bp, synthetic construct
  source 1..465: mol_type = other DNA
gacaagcagctggacgccgacgtgtcccccaagcctaccatcttcctgccctctatcgccgagacaaagctccagaaggccggcacctacctgtgcctgctggaaaagttcttcccagatgtgattaagatccactggcaggaaaagaagtccaacaccatcctgggcagccaggaaggcaacaccatgaagaccaacgacacctacatgaagttcagctggctgaccgtgcccgagaagtccctggacaaagaacacagatgcatcgtgcggcacgaaaacaacaagaacggcgtggaccaggaaatcatcgccgattgcggctttaccagcgagagctaccagcagggcgtgctgagcgccaccatcctgtacgagatcctgctgggcaaggccaccctgtacgccgtgctggtgtctgccctggtgctgatggctatggtcaagcggaaggacagccgggga

SEQ ID NO: 4460 - DNA, 495 bp, synthetic construct
  source 1..495: mol_type = other DNA
gacaagcagctggacgccgacgtgtcccccaagcctaccatcttcctgccctctatcgccgagacaaagctccagaaggccggcacctacctgtgcctgctggaaaagttcttcccagatgtgattaagatccactggcaggaaaagaagtccaacaccatcctgggcagccaggaaggcaacaccatgaagaccaacgacacctacatgaagttcagctggctgaccgtgcccgagaagtccctggacaaagaacacagatgcatcgtgcggcacgaaaacaacaagaacggcgtggaccaggaaatcatccagatcgtgtctgccgaagcctggggcagagccgattgcggctttaccagcgagagctaccagcagggcgtgctgagcgccaccatcctgtacgagatcctgctgggcaaggccaccctgtacgccgtgctggtgtctgccctggtgctgatggctatggtcaagcggaaggacagccgggga

SEQ ID NO: 4461 - DNA, 516 bp, synthetic construct
  source 1..516: mol_type = other DNA
gacaagcagctggacgccgacgtgtcccccaagcctaccatcttcctgccctctatcgccgagacaaagctccagaaggccggcacctacctgtgcctgctggaaaagttcttcccagatgtgattaagatccactggcaggaaaagaagtccaacaccatcctgggcagccaggaaggcaacaccatgaagaccaacgacacctacatgaagttcagctggctgaccgtgcccgagaagtccctggacaaagaacacagatgcatcgtgcggcacgaaaacaacaagaacggcgtggaccaggaaatcatcgaagtgaaaaccgactccaccgaccacgtgaagcccaaagagacagagaacaccaagcagcccagcaagagctgccacaagcccaaggccatcgtgcacaccgagaaagtgaacatgatgagcctgaccgtgctgggcctgcggatgctgttcgccaaaaccgtggccgtgaacttcctgctgaccgccaagctgttcttcctc

SEQ ID NO: 4462 - DNA, 495 bp, synthetic construct
  source 1..495: mol_type = other DNA
gacaagcagctggacgccgacgtgtcccccaagcctaccatcttcctgccctctatcgccgagacaaagctccagaaggccggcacctacctgtgcctgctggaaaagttcttcccagatgtgattaagatccactggcaggaaaagaagtccaacaccatcctgggcagccaggaaggcaacaccatgaagaccaacgacacctacatgaagttcagctggctgaccgtgcccgagaagtccctggacaaagaacacagatgcatcgtgcggcacgaaaacaacaagaacggcgtggaccaggaaatcatcgaccacgtgaagcccaaagagacagagaacaccaagcagcccagcaagagctgccacaagcccaaggccatcgtgcacaccgagaaagtgaacatgatgagcctgaccgtgctgggcctgcggatgctgttcgccaaaaccgtggccgtgaacttcctgctgaccgccaagctgttcttcctc

SEQ ID NO: 4463 - DNA, 498 bp, synthetic construct
  source 1..498: mol_type = other DNA
gacaagcagctggacgccgacgtgtcccccaagcctaccatcttcctgccctctatcgccgagacaaagctccagaaggccggcacctacctgtgcctgctggaaaagttcttcccagatgtgattaagatccactggcaggaaaagaagtccaacaccatcctgggcagccaggaaggcaacaccatgaagaccaacgacacctacatgaagttcagctggctgaccgtgcccgagaagtccctggacaaagaacacagatgcatcgtgcggcacgaaaacaacaagaacggcgtggaccaggaaatcatcttcccaatccccgaggacacattcttcccaagccccgagagcagctgcgacgtgaagctggtggaaaagagcttcgagacagacaccaacctgaacttccagaacctgagcgtgatcggcttcagaatcctgctgctgaaagtggccggctttaacctgctgatgaccctgcggctgtggtccagc

SEQ ID NO: 4464 - DNA, 468 bp, synthetic construct
  source 1..468: mol_type = other DNA
gacaagcagctggacgccgacgtgtcccccaagcctaccatcttcctgccctctatcgccgagacaaagctccagaaggccggcacctacctgtgcctgctggaaaagttcttcccagatgtgattaagatccactggcaggaaaagaagtccaacaccatcctgggcagccaggaaggcaacaccatgaagaccaacgacacctacatgaagttcagctggctgaccgtgcccgagaagtccctggacaaagaacacagatgcatcgtgcggcacgaaaacaacaagaacggcgtggaccaggaaatcatcttcccagagagcagctgcgacgtgaagctggtggaaaagagcttcgagacagacaccaacctgaacttccagaacctgagcgtgatcggcttcagaatcctgctgctgaaagtggccggctttaacctgctgatgaccctgcggctgtggtccagc

SEQ ID NO: 4465 - DNA, 495 bp, synthetic construct
  source 1..495: mol_type = other DNA
gacaagcagctggacgccgacgtgtcccccaagcctaccatcttcctgccctctatcgccgagacaaagctccagaaggccggcacctacctgtgcctgctggaaaagttcttcccagatgtgattaagatccactggcaggaaaagaagtccaacaccatcctgggcagccaggaaggcaacaccatgaagaccaacgacacctacatgaagttcagctggctgaccgtgcccgagaagtccctggacaaagaacacagatgcatcgtgcggcacgaaaacaacaagaacggcgtggaccaggaaatcatcttcccacccgaggacacattcttcccaagccccgagagcagctgcgacgtgaagctggtggaaaagagcttcgagacagacaccaacctgaacttccagaacctgagcgtgatcggcttcagaatcctgctgctgaaagtggccggctttaacctgctgatgaccctgcggctgtggtccagc

SEQ ID NO: 4466 - DNA, 477 bp, synthetic construct
  source 1..477: mol_type = other DNA
gacaagcagctggacgccgacgtgtcccccaagcctaccatcttcctgccctctatcgccgagacaaagctccagaaggccggcacctacctgtgcctgctggaaaagttcttcccagatgtgattaagatccactggcaggaaaagaagtccaacaccatcctgggcagccaggaaggcaacaccatgaagaccaacgacacctacatgaagttcagctggctgaccgtgcccgagaagtccctggacaaagaacacagatgcatcgtgcggcacgaaaacaacaagaacggcgtggaccaggaaatcatcttcccaggcagagccgattgcggctttaccagcgagagctaccagcagggcgtgctgagcgccaccatcctgtacgagatcctgctgggcaaggccaccctgtacgccgtgctggtgtctgccctggtgctgatggctatggtcaagcggaaggacagccgggga

SEQ ID NO: 4467 - DNA, 471 bp, synthetic construct
  source 1..471: mol_type = other DNA
gacaagcagctggacgccgacgtgtcccccaagcctaccatcttcctgccctctatcgccgagacaaagctccagaaggccggcacctacctgtgcctgctggaaaagttcttcccagatgtgattaagatccactggcaggaaaagaagtccaacaccatcctgggcagccaggaaggcaacaccatgaagaccaacgacacctacatgaagttcagctggctgaccgtgcccgagaagtccctggacaaagaacacagatgcatcgtgcggcacgaaaacaacaagaacggcgtggaccaggaaatcatcttcccagccgattgcggctttaccagcgagagctaccagcagggcgtgctgagcgccaccatcctgtacgagatcctgctgggcaaggccaccctgtacgccgtgctggtgtctgccctggtgctgatggctatggtcaagcggaaggacagccgggga

SEQ ID NO: 4468 - DNA, 501 bp, synthetic construct
  source 1..501: mol_type = other DNA
gacaagcagctggacgccgacgtgtcccccaagcctaccatcttcctgccctctatcgccgagacaaagctccagaaggccggcacctacctgtgcctgctggaaaagttcttcccagatgtgattaagatccactggcaggaaaagaagtccaacaccatcctgggcagccaggaaggcaacaccatgaagaccaacgacacctacatgaagttcagctggctgaccgtgcccgagaagtccctggacaaagaacacagatgcatcgtgcggcacgaaaacaacaagaacggcgtggaccaggaaatcatcttcccacagatcgtgtctgccgaagcctggggcagagccgattgcggctttaccagcgagagctaccagcagggcgtgctgagcgccaccatcctgtacgagatcctgctgggcaaggccaccctgtacgccgtgctggtgtctgccctggtgctgatggctatggtcaagcggaaggacagccgggga

SEQ ID NO: 4469 - DNA, 522 bp, synthetic construct
  source 1..522: mol_type = other DNA
gacaagcagctggacgccgacgtgtcccccaagcctaccatcttcctgccctctatcgccgagacaaagctccagaaggccggcacctacctgtgcctgctggaaaagttcttcccagatgtgattaagatccactggcaggaaaagaagtccaacaccatcctgggcagccaggaaggcaacaccatgaagaccaacgacacctacatgaagttcagctggctgaccgtgcccgagaagtccctggacaaagaacacagatgcatcgtgcggcacgaaaacaacaagaacggcgtggaccaggaaatcatcttcccagaagtgaaaaccgactccaccgaccacgtgaagcccaaagagacagagaacaccaagcagcccagcaagagctgccacaagcccaaggccatcgtgcacaccgagaaagtgaacatgatgagcctgaccgtgctgggcctgcggatgctgttcgccaaaaccgtggccgtgaacttcctgctgaccgccaagctgttcttcctc

SEQ ID NO: 4470 - DNA, 501 bp, synthetic construct
  source 1..501: mol_type = other DNA
gacaagcagctggacgccgacgtgtcccccaagcctaccatcttcctgccctctatcgccgagacaaagctccagaaggccggcacctacctgtgcctgctggaaaagttcttcccagatgtgattaagatccactggcaggaaaagaagtccaacaccatcctgggcagccaggaaggcaacaccatgaagaccaacgacacctacatgaagttcagctggctgaccgtgcccgagaagtccctggacaaagaacacagatgcatcgtgcggcacgaaaacaacaagaacggcgtggaccaggaaatcatcttcccagaccacgtgaagcccaaagagacagagaacaccaagcagcccagcaagagctgccacaagcccaaggccatcgtgcacaccgagaaagtgaacatgatgagcctgaccgtgctgggcctgcggatgctgttcgccaaaaccgtggccgtgaacttcctgctgaccgccaagctgttcttcctc

SEQ ID NO: 4471 - DNA, 522 bp, synthetic construct
  source 1..522: mol_type = other DNA
gacaagcagctggacgccgacgtgtcccccaagcctaccatcttcctgccctctatcgccgagacaaagctccagaaggccggcacctacctgtgcctgctggaaaagttcttcccagatgtgattaagatccactggcaggaaaagaagtccaacaccatcctgggcagccaggaaggcaacaccatgaagaccaacgacacctacatgaagttcagctggctgaccgtgcccgagaagtccctggacaaagaacacagatgcatcgtgcggcacgaaaacaacaagaacggcgtggaccaggaaatcatcttcccacccatcaagaccgatgtgattacaatccccgaggacacattcttcccaagccccgagagcagctgcgacgtgaagctggtggaaaagagcttcgagacagacaccaacctgaacttccagaacctgagcgtgatcggcttcagaatcctgctgctgaaagtggccggctttaacctgctgatgaccctgcggctgtggtccagc

SEQ ID NO: 4472 - DNA, 492 bp, synthetic construct
  source 1..492: mol_type = other DNA
gacaagcagctggacgccgacgtgtcccccaagcctaccatcttcctgccctctatcgccgagacaaagctccagaaggccggcacctacctgtgcctgctggaaaagttcttcccagatgtgattaagatccactggcaggaaaagaagtccaacaccatcctgggcagccaggaaggcaacaccatgaagaccaacgacacctacatgaagttcagctggctgaccgtgcccgagaagtccctggacaaagaacacagatgcatcgtgcggcacgaaaacaacaagaacggcgtggaccaggaaatcatcttcccacccatcaagaccgatgtgattacagagagcagctgcgacgtgaagctggtggaaaagagcttcgagacagacaccaacctgaacttccagaacctgagcgtgatcggcttcagaatcctgctgctgaaagtggccggctttaacctgctgatgaccctgcggctgtggtccagc

SEQ ID NO: 4473 - DNA, 519 bp, synthetic construct
  source 1..519: mol_type = other DNA
gacaagcagctggacgccgacgtgtcccccaagcctaccatcttcctgccctctatcgccgagacaaagctccagaaggccggcacctacctgtgcctgctggaaaagttcttcccagatgtgattaagatccactggcaggaaaagaagtccaacaccatcctgggcagccaggaaggcaacaccatgaagaccaacgacacctacatgaagttcagctggctgaccgtgcccgagaagtccctggacaaagaacacagatgcatcgtgcggcacgaaaacaacaagaacggcgtggaccaggaaatcatcttcccacccatcaagaccgatgtgattacacccgaggacacattcttcccaagccccgagagcagctgcgacgtgaagctggtggaaaagagcttcgagacagacaccaacctgaacttccagaacctgagcgtgatcggcttcagaatcctgctgctgaaagtggccggctttaacctgctgatgaccctgcggctgtggtccagc

SEQ ID NO: 4474 - DNA, 501 bp, synthetic construct
  source 1..501: mol_type = other DNA
gacaagcagctggacgccgacgtgtcccccaagcctaccatcttcctgccctctatcgccgagacaaagctccagaaggccggcacctacctgtgcctgctggaaaagttcttcccagatgtgattaagatccactggcaggaaaagaagtccaacaccatcctgggcagccaggaaggcaacaccatgaagaccaacgacacctacatgaagttcagctggctgaccgtgcccgagaagtccctggacaaagaacacagatgcatcgtgcggcacgaaaacaacaagaacggcgtggaccaggaaatcatcttcccacccatcaagaccgatgtgattacaggcagagccgattgcggctttaccagcgagagctaccagcagggcgtgctgagcgccaccatcctgtacgagatcctgctgggcaaggccaccctgtacgccgtgctggtgtctgccctggtgctgatggctatggtcaagcggaaggacagccgggga

SEQ ID NO: 4475 - DNA, 495 bp, synthetic construct
  source 1..495: mol_type = other DNA
gacaagcagctggacgccgacgtgtcccccaagcctaccatcttcctgccctctatcgccgagacaaagctccagaaggccggcacctacctgtgcctgctggaaaagttcttcccagatgtgattaagatccactggcaggaaaagaagtccaacaccatcctgggcagccaggaaggcaacaccatgaagaccaacgacacctacatgaagttcagctggctgaccgtgcccgagaagtccctggacaaagaacacagatgcatcgtgcggcacgaaaacaacaagaacggcgtggaccaggaaatcatcttcccacccatcaagaccgatgtgattacagccgattgcggctttaccagcgagagctaccagcagggcgtgctgagcgccaccatcctgtacgagatcctgctgggcaaggccaccctgtacgccgtgctggtgtctgccctggtgctgatggctatggtcaagcggaaggacagccgggga

SEQ ID NO: 4476 - DNA, 525 bp, synthetic construct
  source 1..525: mol_type = other DNA
gacaagcagctggacgccgacgtgtcccccaagcctaccatcttcctgccctctatcgccgagacaaagctccagaaggccggcacctacctgtgcctgctggaaaagttcttcccagatgtgattaagatccactggcaggaaaagaagtccaacaccatcctgggcagccaggaaggcaacaccatgaagaccaacgacacctacatgaagttcagctggctgaccgtgcccgagaagtccctggacaaagaacacagatgcatcgtgcggcacgaaaacaacaagaacggcgtggaccaggaaatcatcttcccacccatcaagaccgatgtgattacacagatcgtgtctgccgaagcctggggcagagccgattgcggctttaccagcgagagctaccagcagggcgtgctgagcgccaccatcctgtacgagatcctgctgggcaaggccaccctgtacgccgtgctggtgtctgccctggtgctgatggctatggtcaagcggaaggacagccgggga

SEQ ID NO: 4477 - DNA, 546 bp, synthetic construct
  source 1..546: mol_type = other DNA
gacaagcagctggacgccgacgtgtcccccaagcctaccatcttcctgccctctatcgccgagacaaagctccagaaggccggcacctacctgtgcctgctggaaaagttcttcccagatgtgattaagatccactggcaggaaaagaagtccaacaccatcctgggcagccaggaaggcaacaccatgaagaccaacgacacctacatgaagttcagctggctgaccgtgcccgagaagtccctggacaaagaacacagatgcatcgtgcggcacgaaaacaacaagaacggcgtggaccaggaaatcatcttcccacccatcaagaccgatgtgattacagaagtgaaaaccgactccaccgaccacgtgaagcccaaagagacagagaacaccaagcagcccagcaagagctgccacaagcccaaggccatcgtgcacaccgagaaagtgaacatgatgagcctgaccgtgctgggcctgcggatgctgttcgccaaaaccgtggccgtgaacttcctgctgaccgccaagctgttcttcctc

SEQ ID NO: 4478 - DNA, 525 bp, synthetic construct
  source 1..525: mol_type = other DNA
gacaagcagctggacgccgacgtgtcccccaagcctaccatcttcctgccctctatcgccgagacaaagctccagaaggccggcacctacctgtgcctgctggaaaagttcttcccagatgtgattaagatccactggcaggaaaagaagtccaacaccatcctgggcagccaggaaggcaacaccatgaagaccaacgacacctacatgaagttcagctggctgaccgtgcccgagaagtccctggacaaagaacacagatgcatcgtgcggcacgaaaacaacaagaacggcgtggaccaggaaatcatcttcccacccatcaagaccgatgtgattacagaccacgtgaagcccaaagagacagagaacaccaagcagcccagcaagagctgccacaagcccaaggccatcgtgcacaccgagaaagtgaacatgatgagcctgaccgtgctgggcctgcggatgctgttcgccaaaaccgtggccgtgaacttcctgctgaccgccaagctgttcttcctc

SEQ ID NO: 4479 - DNA, 381 bp, synthetic construct
  source 1..381: mol_type = other DNA
cccatcaagaccgatgtgattacaatggaccccaaggacaactgctccaaggacgccaacgataccctgctgctccagctgaccaacaccagcgcctactacatgtacttgttgctgctgctgaagtccgtggtgtacttcgccatcatcacatgctgcctgctgcggagaaccgccttctgctgcaacggcgagaagtctatccccgaggacacattcttcccaagccccgagagcagctgcgacgtgaagctggtggaaaagagcttcgagacagacaccaacctgaacttccagaacctgagcgtgatcggcttcagaatcctgctgctgaaagtggccggctttaacctgctgatgaccctgcggctgtggtccagc

SEQ ID NO: 4480 - DNA, 351 bp, synthetic construct
  source 1..351: mol_type = other DNA
cccatcaagaccgatgtgattacaatggaccccaaggacaactgctccaaggacgccaacgataccctgctgctccagctgaccaacaccagcgcctactacatgtacttgttgctgctgctgaagtccgtggtgtacttcgccatcatcacatgctgcctgctgcggagaaccgccttctgctgcaacggcgagaagtctgagagcagctgcgacgtgaagctggtggaaaagagcttcgagacagacaccaacctgaacttccagaacctgagcgtgatcggcttcagaatcctgctgctgaaagtggccggctttaacctgctgatgaccctgcggctgtggtccagc

SEQ ID NO: 4481 - DNA, 378 bp, synthetic construct
  source 1..378: mol_type = other DNA
cccatcaagaccgatgtgattacaatggaccccaaggacaactgctccaaggacgccaacgataccctgctgctccagctgaccaacaccagcgcctactacatgtacttgttgctgctgctgaagtccgtggtgtacttcgccatcatcacatgctgcctgctgcggagaaccgccttctgctgcaacggcgagaagtctcccgaggacacattcttcccaagccccgagagcagctgcgacgtgaagctggtggaaaagagcttcgagacagacaccaacctgaacttccagaacctgagcgtgatcggcttcagaatcctgctgctgaaagtggccggctttaacctgctgatgaccctgcggctgtggtccagc

SEQ ID NO: 4482 - DNA, 360 bp, synthetic construct
  source 1..360: mol_type = other DNA
cccatcaagaccgatgtgattacaatggaccccaaggacaactgctccaaggacgccaacgataccctgctgctccagctgaccaacaccagcgcctactacatgtacttgttgctgctgctgaagtccgtggtgtacttcgccatcatcacatgctgcctgctgcggagaaccgccttctgctgcaacggcgagaagtctggcagagccgattgcggctttaccagcgagagctaccagcagggcgtgctgagcgccaccatcctgtacgagatcctgctgggcaaggccaccctgtacgccgtgctggtgtctgccctggtgctgatggctatggtcaagcggaaggacagccgggga

SEQ ID NO: 4483 - DNA, 354 bp, synthetic construct
  source 1..354: mol_type = other DNA
cccatcaagaccgatgtgattacaatggaccccaaggacaactgctccaaggacgccaacgataccctgctgctccagctgaccaacaccagcgcctactacatgtacttgttgctgctgctgaagtccgtggtgtacttcgccatcatcacatgctgcctgctgcggagaaccgccttctgctgcaacggcgagaagtctgccgattgcggctttaccagcgagagctaccagcagggcgtgctgagcgccaccatcctgtacgagatcctgctgggcaaggccaccctgtacgccgtgctggtgtctgccctggtgctgatggctatggtcaagcggaaggacagccgggga

SEQ ID NO: 4484 - DNA, 384 bp, synthetic construct
  source 1..384: mol_type = other DNA
cccatcaagaccgatgtgattacaatggaccccaaggacaactgctccaaggacgccaacgataccctgctgctccagctgaccaacaccagcgcctactacatgtacttgttgctgctgctgaagtccgtggtgtacttcgccatcatcacatgctgcctgctgcggagaaccgccttctgctgcaacggcgagaagtctcagatcgtgtctgccgaagcctggggcagagccgattgcggctttaccagcgagagctaccagcagggcgtgctgagcgccaccatcctgtacgagatcctgctgggcaaggccaccctgtacgccgtgctggtgtctgccctggtgctgatggctatggtcaagcggaaggacagccgggga

SEQ ID NO: 4485 - DNA, 405 bp, synthetic construct
  source 1..405: mol_type = other DNA
cccatcaagaccgatgtgattacaatggaccccaaggacaactgctccaaggacgccaacgataccctgctgctccagctgaccaacaccagcgcctactacatgtacttgttgctgctgctgaagtccgtggtgtacttcgccatcatcacatgctgcctgctgcggagaaccgccttctgctgcaacggcgagaagtctgaagtgaaaaccgactccaccgaccacgtgaagcccaaagagacagagaacaccaagcagcccagcaagagctgccacaagcccaaggccatcgtgcacaccgagaaagtgaacatgatgagcctgaccgtgctgggcctgcggatgctgttcgccaaaaccgtggccgtgaacttcctgctgaccgccaagctgttcttcctc

SEQ ID NO: 4486 - DNA, 384 bp, synthetic construct
  source 1..384: mol_type = other DNA
cccatcaagaccgatgtgattacaatggaccccaaggacaactgctccaaggacgccaacgataccctgctgctccagctgaccaacaccagcgcctactacatgtacttgttgctgctgctgaagtccgtggtgtacttcgccatcatcacatgctgcctgctgcggagaaccgccttctgctgcaacggcgagaagtctgaccacgtgaagcccaaagagacagagaacaccaagcagcccagcaagagctgccacaagcccaaggccatcgtgcacaccgagaaagtgaacatgatgagcctgaccgtgctgggcctgcggatgctgttcgccaaaaccgtggccgtgaacttcctgctgaccgccaagctgttcttcctc

SEQ ID NO: 4487 - DNA, 537 bp, synthetic construct
  source 1..537: mol_type = other DNA
gacaagcagctggacgccgacgtgtcccccaagcctaccatcttcctgccctctatcgccgagacaaagctccagaaggccggcacctacctgtgcctgctggaaaagttcttcccagatgtgattaagatccactggcaggaaaagaagtccaacaccatcctgggcagccaggaaggcaacaccatgaagaccaacgacacctacatgaagttcagctggctgaccgtgcccgagaagtccctggacaaagaacacagatgcatcgtgcggcacgaaaacaacaagaacggcgtggaccaggaaatcatcttcccacccatcaagaccgatgtgattacaatggaccccaaggacatccccgaggacacattcttcccaagccccgagagcagctgcgacgtgaagctggtggaaaagagcttcgagacagacaccaacctgaacttccagaacctgagcgtgatcggcttcagaatcctgctgctgaaagtggccggctttaacctgctgatgaccctgcggctgtggtccagc

SEQ ID NO: 4488 - DNA, 507 bp, synthetic construct
  source 1..507: mol_type = other DNA
gacaagcagctggacgccgacgtgtcccccaagcctaccatcttcctgccctctatcgccgagacaaagctccagaaggccggcacctacctgtgcctgctggaaaagttcttcccagatgtgattaagatccactggcaggaaaagaagtccaacaccatcctgggcagccaggaaggcaacaccatgaagaccaacgacacctacatgaagttcagctggctgaccgtgcccgagaagtccctggacaaagaacacagatgcatcgtgcggcacgaaaacaacaagaacggcgtggaccaggaaatcatcttcccacccatcaagaccgatgtgattacaatggaccccaaggacgagagcagctgcgacgtgaagctggtggaaaagagcttcgagacagacaccaacctgaacttccagaacctgagcgtgatcggcttcagaatcctgctgctgaaagtggccggctttaacctgctgatgaccctgcggctgtggtccagc

SEQ ID NO: 4489 - DNA, 534 bp, synthetic construct
  source 1..534: mol_type = other DNA
gacaagcagctggacgccgacgtgtcccccaagcctaccatcttcctgccctctatcgccgagacaaagctccagaaggccggcacctacctgtgcctgctggaaaagttcttcccagatgtgattaagatccactggcaggaaaagaagtccaacaccatcctgggcagccaggaaggcaacaccatgaagaccaacgacacctacatgaagttcagctggctgaccgtgcccgagaagtccctggacaaagaacacagatgcatcgtgcggcacgaaaacaacaagaacggcgtggaccaggaaatcatcttcccacccatcaagaccgatgtgattacaatggaccccaaggaccccgaggacacattcttcccaagccccgagagcagctgcgacgtgaagctggtggaaaagagcttcgagacagacaccaacctgaacttccagaacctgagcgtgatcggcttcagaatcctgctgctgaaagtggccggctttaacctgctgatgaccctgcggctgtggtccagc

SEQ ID NO: 4490 - DNA, 516 bp, synthetic construct
  source 1..516: mol_type = other DNA
gacaagcagctggacgccgacgtgtcccccaagcctaccatcttcctgccctctatcgccgagacaaagctccagaaggccggcacctacctgtgcctgctggaaaagttcttcccagatgtgattaagatccactggcaggaaaagaagtccaacaccatcctgggcagccaggaaggcaacaccatgaagaccaacgacacctacatgaagttcagctggctgaccgtgcccgagaagtccctggacaaagaacacagatgcatcgtgcggcacgaaaacaacaagaacggcgtggaccaggaaatcatcttcccacccatcaagaccgatgtgattacaatggaccccaaggacggcagagccgattgcggctttaccagcgagagctaccagcagggcgtgctgagcgccaccatcctgtacgagatcctgctgggcaaggccaccctgtacgccgtgctggtgtctgccctggtgctgatggctatggtcaagcggaaggacagccgggga

SEQ ID NO: 4491 - DNA, 510 bp, synthetic construct
  source 1..510: mol_type = other DNA
gacaagcagctggacgccgacgtgtcccccaagcctaccatcttcctgccctctatcgccgagacaaagctccagaaggccggcacctacctgtgcctgctggaaaagttcttcccagatgtgattaagatccactggcaggaaaagaagtccaacaccatcctgggcagccaggaaggcaacaccatgaagaccaacgacacctacatgaagttcagctggctgaccgtgcccgagaagtccctggacaaagaacacagatgcatcgtgcggcacgaaaacaacaagaacggcgtggaccaggaaatcatcttcccacccatcaagaccgatgtgattacaatggaccccaaggacgccgattgcggctttaccagcgagagctaccagcagggcgtgctgagcgccaccatcctgtacgagatcctgctgggcaaggccaccctgtacgccgtgctggtgtctgccctggtgctgatggctatggtcaagcggaaggacagccgggga

SEQ ID NO: 4492 - DNA, 540 bp, synthetic construct
  source 1..540: mol_type = other DNA
gacaagcagctggacgccgacgtgtcccccaagcctaccatcttcctgccctctatcgccgagacaaagctccagaaggccggcacctacctgtgcctgctggaaaagttcttcccagatgtgattaagatccactggcaggaaaagaagtccaacaccatcctgggcagccaggaaggcaacaccatgaagaccaacgacacctacatgaagttcagctggctgaccgtgcccgagaagtccctggacaaagaacacagatgcatcgtgcggcacgaaaacaacaagaacggcgtggaccaggaaatcatcttcccacccatcaagaccgatgtgattacaatggaccccaaggaccagatcgtgtctgccgaagcctggggcagagccgattgcggctttaccagcgagagctaccagcagggcgtgctgagcgccaccatcctgtacgagatcctgctgggcaaggccaccctgtacgccgtgctggtgtctgccctggtgctgatggctatggtcaagcggaaggacagccgggga

SEQ ID NO: 4493 - DNA, 561 bp, synthetic construct
  source 1..561: mol_type = other DNA
gacaagcagctggacgccgacgtgtcccccaagcctaccatcttcctgccctctatcgccgagacaaagctccagaaggccggcacctacctgtgcctgctggaaaagttcttcccagatgtgattaagatccactggcaggaaaagaagtccaacaccatcctgggcagccaggaaggcaacaccatgaagaccaacgacacctacatgaagttcagctggctgaccgtgcccgagaagtccctggacaaagaacacagatgcatcgtgcggcacgaaaacaacaagaacggcgtggaccaggaaatcatcttcccacccatcaagaccgatgtgattacaatggaccccaaggacgaagtgaaaaccgactccaccgaccacgtgaagcccaaagagacagagaacaccaagcagcccagcaagagctgccacaagcccaaggccatcgtgcacaccgagaaagtgaacatgatgagcctgaccgtgctgggcctgcggatgctgttcgccaaaaccgtggccgtgaacttcctgctgaccgccaagctgttcttcctc

SEQ ID NO: 4494 - DNA, 540 bp, synthetic construct
  source 1..540: mol_type = other DNA
gacaagcagctggacgccgacgtgtcccccaagcctaccatcttcctgccctctatcgccgagacaaagctccagaaggccggcacctacctgtgcctgctggaaaagttcttcccagatgtgattaagatccactggcaggaaaagaagtccaacaccatcctgggcagccaggaaggcaacaccatgaagaccaacgacacctacatgaagttcagctggctgaccgtgcccgagaagtccctggacaaagaacacagatgcatcgtgcggcacgaaaacaacaagaacggcgtggaccaggaaatcatcttcccacccatcaagaccgatgtgattacaatggaccccaaggacgaccacgtgaagcccaaagagacagagaacaccaagcagcccagcaagagctgccacaagcccaaggccatcgtgcacaccgagaaagtgaacatgatgagcctgaccgtgctgggcctgcggatgctgttcgccaaaaccgtggccgtgaacttcctgctgaccgccaagctgttcttcctc

SEQ ID NO: 4495 - DNA, 522 bp, synthetic construct; identical to SEQ ID NO: 4471
  source 1..522: mol_type = other DNA

SEQ ID NO: 4496 - DNA, 492 bp, synthetic construct; identical to SEQ ID NO: 4472
  source 1..492: mol_type = other DNA

SEQ ID NO: 4497 - DNA, 519 bp, synthetic construct; identical to SEQ ID NO: 4473
  source 1..519: mol_type = other DNA

SEQ ID NO: 4498 - DNA, 501 bp, synthetic construct; identical to SEQ ID NO: 4474
  source 1..501: mol_type = other DNA

SEQ ID NO: 4499 - DNA, 495 bp, synthetic construct; identical to SEQ ID NO: 4475
  source 1..495: mol_type = other DNA

SEQ ID NO: 4500 - DNA, 525 bp, synthetic construct; identical to SEQ ID NO: 4476
  source 1..525: mol_type = other DNA

SEQ ID NO: 4501 - DNA, 546 bp, synthetic construct; identical to SEQ ID NO: 4477
  source 1..546: mol_type = other DNA

SEQ ID NO: 4502 - DNA, 525 bp, synthetic construct; identical to SEQ ID NO: 4478
  source 1..525: mol_type = other DNA

SEQ ID NO: 4503 - DNA, 465 bp, synthetic construct
  source 1..465: mol_type = other DNA
cccaagcctaccatcttcctgccctctatcgccgagacaaagctccagaaggccggcacctacctgtgcctgctggaaaagttcttcccagatgtgattaagatccactggcaggaaaagaagtccaacaccatcctgggcagccaggaaggcaacaccatgaagaccaacgacacctacatgaagttcagctggctgaccgtgcccgagaagtccctggacaaagaacacagatgcatcgtgcggcacgaaaacaacaagaacggcgtggaccaggaaatcatcatccccgaggacacattcttcccaagccccgagagcagctgcgacgtgaagctggtggaaaagagcttcgagacagacaccaacctgaacttccagaacctgagcgtgatcggcttcagaatcctgctgctgaaagtggccggctttaacctgctgatgaccctgcggctgtggtccagc

SEQ ID NO: 4504 - DNA, 435 bp, synthetic construct
  source 1..435: mol_type = other DNA
cccaagcctaccatcttcctgccctctatcgccgagacaaagctccagaaggccggcacctacctgtgcctgctggaaaagttcttcccagatgtgattaagatccactggcaggaaaagaagtccaacaccatcctgggcagccaggaaggcaacaccatgaagaccaacgacacctacatgaagttcagctggctgaccgtgcccgagaagtccctggacaaagaacacagatgcatcgtgcggcacgaaaacaacaagaacggcgtggaccaggaaatcatcgagagcagctgcgacgtgaagctggtggaaaagagcttcgagacagacaccaacctgaacttccagaacctgagcgtgatcggcttcagaatcctgctgctgaaagtggccggctttaacctgctgatgaccctgcggctgtggtccagc

SEQ ID NO: 4505 - DNA, 462 bp, synthetic construct
  source 1..462: mol_type = other DNA
cccaagcctaccatcttcctgccctctatcgccgagacaaagctccagaaggccggcacctacctgtgcctgctggaaaagttcttcccagatgtgattaagatccactggcaggaaaagaagtccaacaccatcctgggcagccaggaaggcaacaccatgaagaccaacgacacctacatgaagttcagctggctgaccgtgcccgagaagtccctggacaaagaacacagatgcatcgtgcggcacgaaaacaacaagaacggcgtggaccaggaaatcatccccgaggacacattcttcccaagccccgagagcagctgcgacgtgaagctggtggaaaagagcttcgagacagacaccaacctgaacttccagaacctgagcgtgatcggcttcagaatcctgctgctgaaagtggccggctttaacctgctgatgaccctgcggctgtggtccagc

SEQ ID NO: 4506 - DNA, 444 bp, synthetic construct
  source 1..444: mol_type = other DNA
cccaagcctaccatcttcctgccctctatcgccgagacaaagctccagaaggccggcacctacctgtgcctgctggaaaagttcttcccagatgtgattaagatccactggcaggaaaagaagtccaacaccatcctgggcagccaggaaggcaacaccatgaagaccaacgacacctacatgaagttcagctggctgaccgtgcccgagaagtccctggacaaagaacacagatgcatcgtgcggcacgaaaacaacaagaacggcgtggaccaggaaatcatcggcagagccgattgcggctttaccagcgagagctaccagcagggcgtgctgagcgccaccatcctgtacgagatcctgctgggcaaggccaccctgtacgccgtgctggtgtctgccctggtgctgatggctatggtcaagcggaaggacagccgggga

SEQ ID NO: 4507 - DNA, 438 bp, synthetic construct
  source 1..438: mol_type = other DNA
cccaagcctaccatcttcctgccctctatcgccgagacaaagctccagaaggccggcacctacctgtgcctgctggaaaagttcttcccagatgtgattaagatccactggcaggaaaagaagtccaacaccatcctgggcagccaggaaggcaacaccatgaagaccaacgacacctacatgaagttcagctggctgaccgtgcccgagaagtccctggacaaagaacacagatgcatcgtgcggcacgaaaacaacaagaacggcgtggaccaggaaatcatcgccgattgcggctttaccagcgagagctaccagcagggcgtgctgagcgccaccatcctgtacgagatcctgctgggcaaggccaccctgtacgccgtgctggtgtctgccctggtgctgatggctatggtcaagcggaaggacagccgggga

SEQ ID NO: 4508 - DNA, 468 bp, synthetic construct
  source 1..468: mol_type = other DNA
cccaagcctaccatcttcctgccctctatcgccgagacaaagctccagaaggccggcacctacctgtgcctgctggaaaagttcttcccagatgtgattaagatccactggcaggaaaagaagtccaacaccatcctgggcagccaggaaggcaacaccatgaagaccaacgacacctacatgaagttcagctggctgaccgtgcccgagaagtccctggacaaagaacacagatgcatcgtgcggcacgaaaacaacaagaacggcgtggaccaggaaatcatccagatcgtgtctgccgaagcctggggcagagccgattgcggctttaccagcgagagctaccagcagggcgtgctgagcgccaccatcctgtacgagatcctgctgggcaaggccaccctgtacgccgtgctggtgtctgccctggtgctgatggctatggtcaagcggaaggacagccgggga

SEQ ID NO: 4509 - DNA, 492 bp, synthetic construct
  source 1..492: mol_type = other DNA
cccaagcctaccatcttcctgccctctatcgccgagacaaagctccagaaggccggcacctacctgtgcctgctggaaaagttcttcccagatgtgattaagatccactggcaggaaaagaagtccaacaccatcctgggcagccaggaaggcaacaccatgaagaccaacgacacctacatgaagttcagctggctgaccgtgcccgagaagtccctggacaaagaacacagatgcatcgtgcggcacgaaaacaacaagaacggcgtggaccaggaaatcatcttcccacccatcaagaccgatgtgattacaatggaccccaaggacaactgctccaaggacgccaacgataccctgctgctccagctgaccaacaccagcgcctactacatgtacttgttgctgctgctgaagtccgtggtgtacttcgccatcatcacatgctgcctgctgcggagaaccgccttctgctgcaacggcgagaagtct

SEQ ID NO: 4510 - DNA, 486 bp, synthetic construct
  source 1..486: mol_type = other DNA
cccaagcctaccatcttcctgccctctatcgccgagacaaagctccagaaggccggcacctacctgtgcctgctggaaaagttcttcccagatgtgattaagatccactggcaggaaaagaagtccaacaccatcctgggcagccaggaaggcaacaccatgaagaccaacgacacctacatgaagttcagctggctgaccgtgcccgagaagtccctggacaaagaacacagatgcatcgtgcggcacgaaaacaacaagaacggcgtggaccaggaaatcatccccatcaagaccgatgtgattacaatggaccccaaggacaactgctccaaggacgccaacgataccctgctgctccagctgaccaacaccagcgcctactacatgtacttgttgctgctgctgaagtccgtggtgtacttcgccatcatcacatgctgcctgctgcggagaaccgccttctgctgcaacggcgagaagtct

SEQ ID NO: 4511 - DNA, 462 bp, synthetic construct
  source 1..462: mol_type = other DNA
cccaagcctaccatcttcctgccctctatcgccgagacaaagctccagaaggccggcacctacctgtgcctgctggaaaagttcttcccagatgtgattaagatccactggcaggaaaagaagtccaacaccatcctgggcagccaggaaggcaacaccatgaagaccaacgacacctacatgaagttcagctggctgaccgtgcccgagaagtccctggacaaagaacacagatgcatcgtgcggcacgaaaacaacaagaacggcgtggaccaggaaatcatcatggaccccaaggacaactgctccaaggacgccaacgataccctgctgctccagctgaccaacaccagcgcctactacatgtacttgttgctgctgctgaagtccgtggtgtacttcgccatcatcacatgctgcctgctgcggagaaccgccttctgctgcaacggcgagaagtct

SEQ ID NO: 4512 - DNA, 486 bp, synthetic construct; identical to SEQ ID NO: 4510
  source 1..486: mol_type = other DNA

SEQ ID NO: 4513 - DNA, 444 bp, synthetic construct
  source 1..444: mol_type = other DNA
cccaagcctaccatcttcctgccctctatcgccgagacaaagctccagaaggccggcacctacctgtgcctgctggaaaagttcttcccagatgtgattaagatccactggcaggaaaagaagtccaacaccatcctgggcagccaggaaggcaacaccatgaagaccaacgacacctacatgaagttcagctggctgaccgtgcccgagaagtccctggacaaagaacacagatgcatcgtgcggcacgaaaacaacaagaacggcgtggaccaggaaatcatctgctccaaggacgccaacgataccctgctgctccagctgaccaacaccagcgcctactacatgtacttgttgctgctgctgaagtccgtggtgtacttcgccatcatcacatgctgcctgctgcggagaaccgccttctgctgcaacggcgagaagtct

SEQ ID NO: 4514 - DNA, 489 bp, synthetic construct
  source 1..489: mol_type = other DNA
cccaagcctaccatcttcctgccctctatcgccgagacaaagctccagaaggccggcacctacctgtgcctgctggaaaagttcttcccagatgtgattaagatccactggcaggaaaagaagtccaacaccatcctgggcagccaggaaggcaacaccatgaagaccaacgacacctacatgaagttcagctggctgaccgtgcccgagaagtccctggacaaagaacacagatgcatcgtgcggcacgaaaacaacaagaacggcgtggaccaggaaatcatcgaagtgaaaaccgactccaccgaccacgtgaagcccaaagagacagagaacaccaagcagcccagcaagagctgccacaagcccaaggccatcgtgcacaccgagaaagtgaacatgatgagcctgaccgtgctgggcctgcggatgctgttcgccaaaaccgtggccgtgaacttcctgctgaccgccaagctgttcttcctc

SEQ ID NO: 4515 - DNA, 468 bp, synthetic construct
  source 1..468: mol_type = other DNA
cccaagcctaccatcttcctgccctctatcgccgagacaaagctccagaaggccggcacctacctgtgcctgctggaaaagttcttcccagatgtgattaagatccactggcaggaaaagaagtccaacaccatcctgggcagccaggaaggcaacaccatgaagaccaacgacacctacatgaagttcagctggctgaccgtgcccgagaagtccctggacaaagaacacagatgcatcgtgcggcacgaaaacaacaagaacggcgtggaccaggaaatcatcgaccacgtgaagcccaaagagacagagaacaccaagcagcccagcaagagctgccacaagcccaaggccatcgtgcacaccgagaaagtgaacatgatgagcctgaccgtgctgggcctgcggatgctgttcgccaaaaccgtggccgtgaacttcctgctgaccgccaagctgttcttcctc

SEQ ID NO: 4516 - DNA, 435 bp, synthetic construct
  source 1..435: mol_type = other DNA
agccagcctcacaccaagcccagcgtgttcgtgatgaagaacggcaccaacgtggcctgcctcgtgaaagagttctaccccaaggacatcaggatcaacctggtgtccagcaagaagatcaccgagttcgaccccgccatcgtgatctcccccagcggcaagtacaacgccgtgaagctggggaagtacgaggacagcaacagcgtgacctgctccgtgcagcacgacaacaagaccgtgcacagcaccgactttatccccgaggacacattcttcccaagccccgagagcagctgcgacgtgaagctggtggaaaagagcttcgagacagacaccaacctgaacttccagaacctgagcgtgatcggcttcagaatcctgctgctgaaagtggccggctttaacctgctgatgaccctgcggctgtggtccagc

SEQ ID NO: 4517 - DNA, 405 bp, synthetic construct
  source 1..405: mol_type = other DNA
agccagcctcacaccaagcccagcgtgttcgtgatgaagaacggcaccaacgtggcctgcctcgtgaaagagttctaccccaaggacatcaggatcaacctggtgtccagcaagaagatcaccgagttcgaccccgccatcgtgatctcccccagcggcaagtacaacgccgtgaagctggggaagtacgaggacagcaacagcgtgacctgctccgtgcagcacgacaacaagaccgtgcacagcaccgactttgagagcagctgcgacgtgaagctggtggaaaagagcttcgagacagacaccaacctgaacttccagaacctgagcgtgatcggcttcagaatcctgctgctgaaagtggccggctttaacctgctgatgaccctgcggctgtggtccagc

SEQ ID NO: 4518 - DNA, 432 bp, synthetic construct
  source 1..432: mol_type = other DNA
agccagcctcacaccaagcccagcgtgttcgtgatgaagaacggcaccaacgtggcctgcctcgtgaaagagttctaccccaaggacatcaggatcaacctggtgtccagcaagaagatcaccgagttcgaccccgccatcgtgatctcccccagcggcaagtacaacgccgtgaagctggggaagtacgaggacagcaacagcgtgacctgctccgtgcagcacgacaacaagaccgtgcacagcaccgactttcccgaggacacattcttcccaagccccgagagcagctgcgacgtgaagctggtggaaaagagcttcgagacagacaccaacctgaacttccagaacctgagcgtgatcggcttcagaatcctgctgctgaaagtggccggctttaacctgctgatgaccctgcggctgtggtccagc

SEQ ID NO: 4519 - DNA, 414 bp, synthetic construct
  source 1..414: mol_type = other DNA
agccagcctcacaccaagcccagcgtgttcgtgatgaagaacggcaccaacgtggcctgcctcgtgaaagagttctaccccaaggacatcaggatcaacctggtgtccagcaagaagatcaccgagttcgaccccgccatcgtgatctcccccagcggcaagtacaacgccgtgaagctggggaagtacgaggacagcaacagcgtgacctgctccgtgcagcacgacaacaagaccgtgcacagcaccgactttggcagagccgattgcggctttaccagcgagagctaccagcagggcgtgctgagcgccaccatcctgtacgagatcctgctgggcaaggccaccctgtacgccgtgctggtgtctgccctggtgctgatggctatggtcaagcggaaggacagccgggga

SEQ ID NO: 4520 - DNA, 408 bp, synthetic construct
  source 1..408: mol_type = other DNA
agccagcctcacaccaagcccagcgtgttcgtgatgaagaacggcaccaacgtggcctgcctcgtgaaagagttctaccccaaggacatcaggatcaacctggtgtccagcaagaagatcaccgagttcgaccccgccatcgtgatctcccccagcggcaagtacaacgccgtgaagctggggaagtacgaggacagcaacagcgtgacctgctccgtgcagcacgacaacaagaccgtgcacagcaccgactttgccgattgcggctttaccagcgagagctaccagcagggcgtgctgagcgccaccatcctgtacgagatcctgctgggcaaggccaccctgtacgccgtgctggtgtctgccctggtgctgatggctatggtcaagcggaaggacagccgggga

SEQ ID NO: 4521 - DNA, 438 bp, synthetic construct
  source 1..438: mol_type = other DNA
agccagcctcacaccaagcccagcgtgttcgtgatgaagaacggcaccaacgtggcctgcctcgtgaaagagttctaccccaaggacatcaggatcaacctggtgtccagcaagaagatcaccgagttcgaccccgccatcgtgatctcccccagcggcaagtacaacgccgtgaagctggggaagtacgaggacagcaacagcgtgacctgctccgtgcagcacgacaacaagaccgtgcacagcaccgactttcagatcgtgtctgccgaagcctggggcagagccgattgcggctttaccagcgagagctaccagcagggcgtgctgagcgccaccatcctgtacgagatcctgctgggcaaggccaccctgtacgccgtgctggtgtctgccctggtgctgatggctatggtcaagcggaaggacagccgggga

SEQ ID NO: 4522 - DNA, 462 bp, synthetic construct
  source 1..462: mol_type = other DNA
agccagcctcacaccaagcccagcgtgttcgtgatgaagaacggcaccaacgtggcctgcctcgtgaaagagttctaccccaaggacatcaggatcaacctggtgtccagcaagaagatcaccgagttcgaccccgccatcgtgatctcccccagcggcaagtacaacgccgtgaagctggggaagtacgaggacagcaacagcgtgacctgctccgtgcagcacgacaacaagaccgtgcacagcaccgactttttcccacccatcaagaccgatgtgattacaatggaccccaaggacaactgctccaaggacgccaacgataccctgctgctccagctgaccaacaccagcgcctactacatgtacttgttgctgctgctgaagtccgtggtgtacttcgccatcatcacatgctgcctgctgcggagaaccgccttctgctgcaacggcgagaagtct

SEQ ID NO: 4523 - DNA, 456 bp, synthetic construct
  source 1..456: mol_type = other DNA
agccagcctcacaccaagcccagcgtgttcgtgatgaagaacggcaccaacgtggcctgcctcgtgaaagagttctaccccaaggacatcaggatcaacctggtgtccagcaagaagatcaccgagttcgaccccgccatcgtgatctcccccagcggcaagtacaacgccgtgaagctggggaagtacgaggacagcaacagcgtgacctgctccgtgcagcacgacaacaagaccgtgcacagcaccgactttcccatcaagaccgatgtgattacaatggaccccaaggacaactgctccaaggacgccaacgataccctgctgctccagctgaccaacaccagcgcctactacatgtacttgttgctgctgctgaagtccgtggtgtacttcgccatcatcacatgctgcctgctgcggagaaccgccttctgctgcaacggcgagaagtct

SEQ ID NO: 4524 - DNA, 432 bp, synthetic construct
  source 1..432: mol_type = other DNA
agccagcctcacaccaagcccagcgtgttcgtgatgaagaacggcaccaacgtggcctgcctcgtgaaagagttctaccccaaggacatcaggatcaacctggtgtccagcaagaagatcaccgagttcgaccccgccatcgtgatctcccccagcggcaagtacaacgccgtgaagctggggaagtacgaggacagcaacagcgtgacctgctccgtgcagcacgacaacaagaccgtgcacagcaccgactttatggaccccaaggacaactgctccaaggacgccaacgataccctgctgctccagctgaccaacaccagcgcctactacatgtacttgttgctgctgctgaagtccgtggtgtacttcgccatcatcacatgctgcctgctgcggagaaccgccttctgctgcaacggcgagaagtct

SEQ ID NO: 4525 - DNA, 459 bp, synthetic construct; identical to SEQ ID NO: 3841
  source 1..459: mol_type = other DNA

SEQ ID NO: 4526 - DNA, 438 bp, synthetic construct
  source 1..438: mol_type = other DNA
agccagcctcacaccaagcccagcgtgttcgtgatgaagaacggcaccaacgtggcctgcctcgtgaaagagttctaccccaaggacatcaggatcaacctggtgtccagcaagaagatcaccgagttcgaccccgccatcgtgatctcccccagcggcaagtacaacgccgtgaagctggggaagtacgaggacagcaacagcgtgacctgctccgtgcagcacgacaacaagaccgtgcacagcaccgactttgaccacgtgaagcccaaagagacagagaacaccaagcagcccagcaagagctgccacaagcccaaggccatcgtgcacaccgagaaagtgaacatgatgagcctgaccgtgctgggcctgcggatgctgttcgccaaaaccgtggccgtgaacttcctgctgaccgccaagctgttcttcctc

SEQ ID NO: 4527 - DNA, 456 bp, synthetic construct
  source 1..456: mol_type = other DNA
agccagcctcacaccaagcccagcgtgttcgtgatgaagaacggcaccaacgtggcctgcctcgtgaaagagttctaccccaaggacatcaggatcaacctggtgtccagcaagaagatcaccgagttcgaccccgccatcgtgatctcccccagcggcaagtacaacgccgtgaagctggggaagtacgaggacagcaacagcgtgacctgctccgtgcagcacgacaacaagaccgtgcacagcaccgactttgaagtgaaaaccgactccaccatccccgaggacacattcttcccaagccccgagagcagctgcgacgtgaagctggtggaaaagagcttcgagacagacaccaacctgaacttccagaacctgagcgtgatcggcttcagaatcctgctgctgaaagtggccggctttaacctgctgatgaccctgcggctgtggtccagc

SEQ ID NO: 4528 - DNA, 426 bp, synthetic construct
  source 1..426: mol_type = other DNA
agccagcctcacaccaagcccagcgtgttcgtgatgaagaacggcaccaacgtggcctgcctcgtgaaagagttctaccccaaggacatcaggatcaacctggtgtccagcaagaagatcaccgagttcgaccccgccatcgtgatctcccccagcggcaagtacaacgccgtgaagctggggaagtacgaggacagcaacagcgtgacctgctccgtgcagcacgacaacaagaccgtgcacagcaccgactttgaagtgaaaaccgactccaccgagagcagctgcgacgtgaagctggtggaaaagagcttcgagacagacaccaacctgaacttccagaacctgagcgtgatcggcttcagaatcctgctgctgaaagtggccggctttaacctgctgatgaccctgcggctgtggtccagc

SEQ ID NO: 4529 - DNA, 453 bp, synthetic construct
  source 1..453: mol_type = other DNA
agccagcctcacaccaagcccagcgtgttcgtgatgaagaacggcaccaacgtggcctgcctcgtgaaagagttctaccccaaggacatcaggatcaacctggtgtccagcaagaagatcaccgagttcgaccccgccatcgtgatctcccccagcggcaagtacaacgccgtgaagctggggaagtacgaggacagcaacagcgtgacctgctccgtgcagcacgacaacaagaccgtgcacagcaccgactttgaagtgaaaaccgactccacccccgaggacacattcttcccaagccccgagagcagctgcgacgtgaagctggtggaaaagagcttcgagacagacaccaacctgaacttccagaacctgagcgtgatcggcttcagaatcctgctgctgaaagtggccggctttaacctgctgatgaccctgcggctgtggtccagc

SEQ ID NO: 4530 - DNA, 435 bp, synthetic construct
  source 1..435: mol_type = other DNA
agccagcctcacaccaagcccagcgtgttcgtgatgaagaacggcaccaacgtggcctgcctcgtgaaagagttctaccccaaggacatcaggatcaacctggtgtccagcaagaagatcaccgagttcgaccccgccatcgtgatctcccccagcggcaagtacaacgccgtgaagctggggaagtacgaggacagcaacagcgtgacctgctccgtgcagcacgacaacaagaccgtgcacagcaccgactttgaagtgaaaaccgactccaccggcagagccgattgcggctttaccagcgagagctaccagcagggcgtgctgagcgccaccatcctgtacgagatcctgctgggcaaggccaccctgtacgccgtgctggtgtctgccctggtgctgatggctatggtcaagcggaaggacagccgggga

SEQ ID NO: 4531 - DNA, 429 bp, synthetic construct
  source 1..429: mol_type = other DNA
agccagcctcacaccaagcccagcgtgttcgtgatgaagaacggcaccaacgtggcctgcctcgtgaaagagttctaccccaaggacatcaggatcaacctggtgtccagcaagaagatcaccgagttcgaccccgccatcgtgatctcccccagcggcaagtacaacgccgtgaagctggggaagtacgaggacagcaacagcgtgacctgctccgtgcagcacgacaacaagaccgtgcacagcaccgactttgaagtgaaaaccgactccaccgccgattgcggctttaccagcgagagctaccagcagggcgtgctgagcgccaccatcctgtacgagatcctgctgggcaaggccaccctgtacgccgtgctggtgtctgccctggtgctgatggctatggtcaagcggaaggacagccgggga

SEQ ID NO: 4532 - DNA, 459 bp, synthetic construct
  source 1..459: mol_type = other DNA
agccagcctcacaccaagcccagcgtgttcgtgatgaagaacggcaccaacgtggcctgcctcgtgaaagagttctaccccaaggacatcaggatcaacctggtgtccagcaagaagatcaccgagttcgaccccgccatcgtgatctcccccagcggcaagtacaacgccgtgaagctggggaagtacgaggacagcaacagcgtgacctgctccgtgcagcacgacaacaagaccgtgcacagcaccgactttgaagtgaaaaccgactccacccagatcgtgtctgccgaagcctggggcagagccgattgcggctttaccagcgagagctaccagcagggcgtgctgagcgccaccatcctgtacgagatcctgctgggcaaggccaccctgtacgccgtgctggtgtctgccctggtgctgatggctatggtcaagcggaaggacagccgggga

SEQ ID NO: 4533 - DNA, 483 bp, synthetic construct
  source 1..483: mol_type = other DNA
agccagcctcacaccaagcccagcgtgttcgtgatgaagaacggcaccaacgtggcctgcctcgtgaaagagttctaccccaaggacatcaggatcaacctggtgtccagcaagaagatcaccgagttcgaccccgccatcgtgatctcccccagcggcaagtacaacgccgtgaagctggggaagtacgaggacagcaacagcgtgacctgctccgtgcagcacgacaacaagaccgtgcacagcaccgactttgaagtgaaaaccgactccaccttcccacccatcaagaccgatgtgattacaatggaccccaaggacaactgctccaaggacgccaacgataccctgctgctccagctgaccaacaccagcgcctactacatgtacttgttgctgctgctgaagtccgtggtgtacttcgccatcatcacatgctgcctgctgcggagaaccgccttctgctgcaacggcgagaagtct

SEQ ID NO: 4534 - DNA, 477 bp, synthetic construct
  source 1..477: mol_type = other DNA
agccagcctcacaccaagcccagcgtgttcgtgatgaagaacggcaccaacgtggcctgcctcgtgaaagagttctaccccaaggacatcaggatcaacctggtgtccagcaagaagatcaccgagttcgaccccgccatcgtgatctcccccagcggcaagtacaacgccgtgaagctggggaagtacgaggacagcaacagcgtgacctgctccgtgcagcacgacaacaagaccgtgcacagcaccgactttgaagtgaaaaccgactccacccccatcaagaccgatgtgattacaatggaccccaaggacaactgctccaaggacgccaacgataccctgctgctccagctgaccaacaccagcgcctactacatgtacttgttgctgctgctgaagtccgtggtgtacttcgccatcatcacatgctgcctgctgcggagaaccgccttctgctgcaacggcgagaagtct

SEQ ID NO: 4535 - DNA, 453 bp, synthetic construct
  source 1..453: mol_type = other DNA
agccagcctcacaccaagcccagcgtgttcgtgatgaagaacggcaccaacgtggcctgcctcgtgaaagagttctaccccaaggacatcaggatcaacctggtgtccagcaagaagatcaccgagttcgaccccgccatcgtgatctcccccagcggcaagtacaacgccgtgaagctggggaagtacgaggacagcaacagcgtgacctgctccgtgcagcacgacaacaagaccgtgcacagcaccgactttgaagtgaaaaccgactccaccatggaccccaaggacaactgctccaaggacgccaacgataccctgctgctccagctgaccaacaccagcgcctactacatgtacttgttgctgctgctgaagtccgtggtgtacttcgccatcatcacatgctgcctgctgcggagaaccgccttctgctgcaacggcgagaagtct

SEQ ID NO: 4536 - DNA, 477 bp, synthetic construct; identical to SEQ ID NO: 4534
  source 1..477: mol_type = other DNA

SEQ ID NO: 4537 - DNA, 435 bp, synthetic construct
  source 1..435: mol_type = other DNA
agccagcctcacaccaagcccagcgtgttcgtgatgaagaacggcaccaacgtggcctgcctcgtgaaagagttctaccccaaggacatcaggatcaacctggtgtccagcaagaagatcaccgagttcgaccccgccatcgtgatctcccccagcggcaagtacaacgccgtgaagctggggaagtacgaggacagcaacagcgtgacctgctccgtgcagcacgacaacaagaccgtgcacagcaccgactttgaagtgaaaaccgactccacctgctccaaggacgccaacgataccctgctgctccagctgaccaacaccagcgcctactacatgtacttgttgctgctgctgaagtccgtggtgtacttcgccatcatcacatgctgcctgctgcggagaaccgccttctgctgcaacggcgagaagtct

SEQ ID NO: 4538 - DNA, 435 bp, synthetic construct; identical to SEQ ID NO: 4516
  source 1..435: mol_type = other DNA

SEQ ID NO: 4539 - DNA, 405 bp, synthetic construct; identical to SEQ ID NO: 4517
  source 1..405: mol_type = other DNA

SEQ ID NO: 4540 - DNA, 432 bp, synthetic construct; identical to SEQ ID NO: 4518
  source 1..432: mol_type = other DNA

SEQ ID NO: 4541 - DNA, 414 bp, synthetic construct; identical to SEQ ID NO: 4519
  source 1..414: mol_type = other DNA

SEQ ID NO: 4542 - DNA, 408 bp, synthetic construct; identical to SEQ ID NO: 4520
  source 1..408: mol_type = other DNA

SEQ ID NO: 4543 - DNA, 438 bp, synthetic construct; identical to SEQ ID NO: 4521
  source 1..438: mol_type = other DNA

SEQ ID NO: 4544 - DNA, 462 bp, synthetic construct; identical to SEQ ID NO: 4522
  source 1..462: mol_type = other DNA

SEQ ID NO: 4545 - DNA, 456 bp, synthetic construct; identical to SEQ ID NO: 4523
  source 1..456: mol_type = other DNA

SEQ ID NO: 4546 - DNA, 432 bp, synthetic construct; identical to SEQ ID NO: 4524
  source 1..432: mol_type = other DNA

SEQ ID NO: 4547 - DNA, 456 bp, synthetic construct; identical to SEQ ID NO: 4523
  source 1..456: mol_type = other DNA

SEQ ID NO: 4548 - DNA, 414 bp, synthetic construct
  source 1..414: mol_type = other DNA
agccagcctcacaccaagcccagcgtgttcgtgatgaagaacggcaccaacgtggcctgcctcgtgaaagagttctaccccaaggacatcaggatcaacctggtgtccagcaagaagatcaccgagttcgaccccgccatcgtgatctcccccagcggcaagtacaacgccgtgaagctggggaagtacgaggacagcaacagcgtgacctgctccgtgcagcacgacaacaagaccgtgcacagcaccgacttttgctccaaggacgccaacgataccctgctgctccagctgaccaacaccagcgcctactacatgtacttgttgctgctgctgaagtccgtggtgtacttcgccatcatcacatgctgcctgctgcggagaaccgccttctgctgcaacggcgagaagtct

SEQ ID NO: 4549 - DNA, 456 bp, synthetic construct; identical to SEQ ID NO: 4527
  source 1..456: mol_type = other DNA

SEQ ID NO: 4550 - DNA, 426 bp, synthetic construct; identical to SEQ ID NO: 4528
  source 1..426: mol_type = other DNA

SEQ ID NO: 4551 - DNA, 453 bp, synthetic construct; identical to SEQ ID NO: 4529
  source 1..453: mol_type = other DNA

SEQ ID NO: 4552 - DNA, 435 bp, synthetic construct; identical to SEQ ID NO: 4530
  source 1..435: mol_type = other DNA

SEQ ID NO: 4553 - DNA, 429 bp, synthetic construct; identical to SEQ ID NO: 4531
  source 1..429: mol_type = other DNA

SEQ ID NO: 4554 - DNA, 459 bp, synthetic construct; identical to SEQ ID NO: 4532
  source 1..459: mol_type = other DNA

SEQ ID NO: 4555 - DNA, 483 bp, synthetic construct; identical to SEQ ID NO: 4533
  source 1..483: mol_type = other DNA

SEQ ID NO: 4556 - DNA, 477 bp, synthetic construct; identical to SEQ ID NO: 4534
  source 1..477: mol_type = other DNA

SEQ ID NO: 4557 - DNA, 453 bp, synthetic construct; identical to SEQ ID NO: 4535
  source 1..453: mol_type = other DNA

SEQ ID NO: 4558 - DNA, 477 bp, synthetic construct; identical to SEQ ID NO: 4534
  source 1..477: mol_type = other DNA

SEQ ID NO: 4559 - DNA, 435 bp, synthetic construct; identical to SEQ ID NO: 4537
  source 1..435: mol_type = other DNA

SEQ ID NO: 4560 - DNA, 354 bp, synthetic construct
  source 1..354: mol_type = other DNA
gaggacctgaagaacgtgttcccacctgaggtggccgtgttcgagcctagcgaggccgagatcagccacacccagaaagccaccctcgtgtgcctggctaccggcttctaccccgaccatgtggaactgtcttggtgggtcaacggcaaagaggtgcacagcggcgtgtctaccgacccccagccactgaaagaacagcccgccctgaacgacagccggtactgcctgagcagcagactgagagtgtccgccaccttctggcagaacccccggaaccacttcagatgccaggtgcagttctacggcctgagcgagaacgacgagtggacccaggacagagccaagcccgtgacc

SEQ ID NO: 4561 - DNA, 183 bp, synthetic construct
  source 1..183: mol_type = other DNA
cagatcgtgtctgccgaagcctggggcagagccgattgcggctttaccagcgagagctaccagcagggcgtgctgagcgccaccatcctgtacgagatcctgctgggcaaggccaccctgtacgccgtgctggtgtctgccctggtgctgatggctatggtcaagcggaaggacagccgggga

SEQ ID NO: 4562 - DNA, 318 bp, synthetic construct; identical to SEQ ID NO: 3928
  source 1..318: mol_type = other DNA

SEQ ID NO: 4563 - DNA, 357 bp, synthetic construct
  source 1..357: mol_type = other DNA
gacaagcagctggacgccgacgtgtcccccaagcctaccatcttcctgccctctatcgccgagacaaagctccagaaggccggcacctacctgtgcctgctggaaaagttcttcccagatgtgattaagatccactggcaggaaaagaagtccaacaccatcctgggcagccaggaaggcaacaccatgaagaccaacgacacctacatgaagttcagctggctgaccgtgcccgagaagtccctggacaaagaacacagatgcatcgtgcggcacgaaaacaacaagaacggcgtggaccaggaaatcatcttcccacccatcaagaccgatgtgattacaatggaccccaaggac

SEQ ID NO: 4564 - DNA, 201 bp, synthetic construct; identical to SEQ ID NO: 3865
  source 1..201: mol_type = other DNA

SEQ ID NO: 4565 - DNA, 159 bp, synthetic construct
  source 1..159: mol_type = other DNA
tgctccaaggacgccaacgataccctgctgctccagctgaccaacaccagcgcctactacatgtacttgttgctgctgctgaagtccgtggtgtacttcgccatcatcacatgctgcctgctgcggagaaccgccttctgctgcaacggcgagaagtct

SEQ ID NO: 4566 - DNA, 255 bp, synthetic construct; identical to SEQ ID NO: 3930
  source 1..255: mol_type = other DNA

SEQ ID NO: 4567 - DNA, 204 bp, synthetic construct; identical to SEQ ID NO: 3868
  source 1..204: mol_type = other DNA

SEQ ID NO: 4568 - DNA, 351 bp, synthetic construct
  source 1..351: mol_type = other DNA
atccagaaccctgatcctgccgtgtaccagctgcgggatagcaagagcagcgacaagagcgtgtgtctgttcaccgacttcgacagccagaccaacgtgtcccagagcaaggactccgacgtgtacatcaccgataagtgcgtgctggacatgcggagcatggacttcaagagcaactccgccgtggcctggtccaacaagtccgatttcgcctgcgccaacgccttcaacaacagcattatccccgaggacacattcttcccaagccccgagagcagctgcgacgtgaagctggtggaaaagagcttcgagacagacaccaacctgaacttccagaacctgagcgtgatc

SEQ ID NO: 4569 - DNA, 348 bp, synthetic construct
  source 1..348: mol_type = other DNA
atccagaaccctgatcctgccgtgtaccagctgcgggatagcaagagcagcgacaagagcgtgtgtctgttcaccgacttcgacagccagaccaacgtgtcccagagcaaggactccgacgtgtacatcaccgataagtgcgtgctggacatgcggagcatggacttcaagagcaactccgccgtggcctggtccaacaagtccgatttcgcctgcgccaacgccttcaacaacagcattatccccgaggacacattcttcccaagccccgagagcagctgcgacgtgaagctggtggaaaagagcttcgagacagacaccaacctgaacttccagaacctgagcgtg

SEQ ID NO: 4570 - DNA, 345 bp, synthetic construct
  source 1..345: mol_type = other DNA
atccagaaccctgatcctgccgtgtaccagctgcgggatagcaagagcagcgacaagagcgtgtgtctgttcaccgacttcgacagccagaccaacgtgtcccagagcaaggactccgacgtgtacatcaccgataagtgcgtgctggacatgcggagcatggacttcaagagcaactccgccgtggcctggtccaacaagtccgatttcgcctgcgccaacgccttcaacaacagcattatccccgaggacacattcttcccaagccccgagagcagctgcgacgtgaagctggtggaaaagagcttcgagacagacaccaacctgaacttccagaacctgagc

SEQ ID NO: 4571 - DNA, 69 bp, synthetic construct
  source 1..69: mol_type = other DNA
ggcttcagaatcctgctgctgaaagtggccggctttaacctgctgatgaccctgcggctgtggtccagc

SEQ ID NO: 4572 - DNA, 72 bp, synthetic construct
  source 1..72: mol_type = other DNA
atcggcttcagaatcctgctgctgaaagtggccggctttaacctgctgatgaccctgcggctgtggtccagc

SEQ ID NO: 4573 - DNA, 75 bp, synthetic construct
  source 1..75: mol_type = other DNA
gtgatcggcttcagaatcctgctgctgaaagtggccggctttaacctgctgatgaccctgcggctgtggtccagc

SEQ ID NO: 4574 - DNA, 390 bp, synthetic construct
  source 1..390: mol_type = other DNA
agccagcctcacaccaagcccagcgtgttcgtgatgaagaacggcaccaacgtggcctgcctcgtgaaagagttctaccccaaggacatcaggatcaacctggtgtccagcaagaagatcaccgagttcgaccccgccatcgtgatctcccccagcggcaagtacaacgccgtgaagctggggaagtacgaggacagcaacagcgtgacctgctccgtgcagcacgacaacaagaccgtgcacagcaccgactttgaagtgaaaaccgactccaccgaccacgtgaagcccaaagagacagagaacaccaagcagcccagcaagagctgccacaagcccaaggccatcgtgcacaccgagaaagtgaacatgatgagcctgaccgtgctg

SEQ ID NO: 4575 - DNA, 387 bp, synthetic construct
  source 1..387: mol_type = other DNA
agccagcctcacaccaagcccagcgtgttcgtgatgaagaacggcaccaacgtggcctgcctcgtgaaagagttctaccccaaggacatcaggatcaacctggtgtccagcaagaagatcaccgagttcgaccccgccatcgtgatctcccccagcggcaagtacaacgccgtgaagctggggaagtacgaggacagcaacagcgtgacctgctccgtgcagcacgacaacaagaccgtgcacagcaccgactttgaagtgaaaaccgactccaccgaccacgtgaagcccaaagagacagagaacaccaagcagcccagcaagagctgccacaagcccaaggccatcgtgcacaccgagaaagtgaacatgatgagcctgaccgtg

SEQ ID NO: 4576 - DNA, 384 bp, synthetic construct
  source 1..384: mol_type = other DNA
agccagcctcacaccaagcccagcgtgttcgtgatgaagaacggcaccaacgtggcctgcctcgtgaaagagttctaccccaaggacatcaggatcaacctggtgtccagcaagaagatcaccgagttcgaccccgccatcgtgatctcccccagcggcaagtacaacgccgtgaagctggggaagtacgaggacagcaacagcgtgacctgctccgtgcagcacgacaacaagaccgtgcacagcaccgactttgaagtgaaaaccgactccaccgaccacgtgaagcccaaagagacagagaacaccaagcagcccagcaagagctgccacaagcccaaggccatcgtgcacaccgagaaagtgaacatgatgagcctgacc

SEQ ID NO: 4577 - DNA, 69 bp, synthetic construct
  source 1..69: mol_type = other DNA
ggcctgcggatgctgttcgccaaaaccgtggccgtgaacttcctgctgaccgccaagctgttcttcctc

SEQ ID NO: 4578 - DNA, 72 bp, synthetic construct
  source 1..72: mol_type = other DNA
ctgggcctgcggatgctgttcgccaaaaccgtggccgtgaacttcctgctgaccgccaagctgttcttcctc

SEQ ID NO: 4579 - DNA, 75 bp, synthetic construct
  source 1..75: mol_type = other DNA
gtgctgggcctgcggatgctgttcgccaaaaccgtggccgtgaacttcctgctgaccgccaagctgttcttcctc

SEQ ID NO: 4580 - DNA, 447 bp, synthetic construct
  source 1..447: mol_type = other DNA
gaggacctgaagaacgtgttcccacctgaggtggccgtgttcgagcctagcgaggccgagatcagccacacccagaaagccaccctcgtgtgcctggctaccggcttctaccccgaccatgtggaactgtcttggtgggtcaacggcaaagaggtgcacagcggcgtgtgtaccgacccccagccactgaaagaacagcccgccctgaacgacagccggtactgcctgagcagcagactgagagtgtccgccaccttctggcagaacccccggaaccacttcagatgccaggtgcagttctacggcctgagcgagaacgacgagtggacccaggacagagccaagcccgtgacccagatcgtgtctgccgaagcctggggcagagccgattgcggctttaccagcgagagctaccagcagggcgtgctgagcgccaccatcctgtac

SEQ ID NO: 4581 - DNA, 435 bp, synthetic construct
  source 1..435: mol_type = other DNA
gaggacctgaagaacgtgttcccacctgaggtggccgtgttcgagcctagcgaggccgagatcagccacacccagaaagccaccctcgtgtgcctggctaccggcttctaccccgaccatgtggaactgtcttggtgggtcaacggcaaagaggtgcacagcggcgtgtgtaccgacccccagccactgaaagaacagcccgccctgaacgacagccggtactgcctgagcagcagactgagagtgtccgccaccttctggcagaacccccggaaccacttcagatgccaggtgcagttctacggcctgagcgagaacgacgagtggacccaggacagagccaagcccgtgacccagatcgtgtctgccgaagcctggggcagagccgattgcggctttaccagcgagagctaccagcagggcgtgctgagcgcc

SEQ ID NO: 4582 - DNA, 90 bp, synthetic construct
  source 1..90: mol_type = other DNA
gagatcctgctgggcaaggccaccctgtacgccgtgctggtgtctgccctggtgctgatggctatggtcaagcggaaggacagccgggga

SEQ ID NO: 4583 - DNA, 102 bp, synthetic construct
  source 1..102: mol_type = other DNA
accatcctgtacgagatcctgctgggcaaggccaccctgtacgccgtgctggtgtctgccctggtgctgatggctatggtcaagcggaaggacagccgggga

SEQ ID NO: 4584 - DNA, 426 bp, synthetic construct
  source 1..426: mol_type = other DNA
gacaagcagctggacgccgacgtgtcccccaagcctaccatcttcctgccctctatcgccgagacaaagctccagaaggccggcacctacctgtgcctgctggaaaagttcttcccagatgtgattaagatccactggcaggaaaagaagtccaacaccatcctgggcagccaggaaggcaacaccatgaagaccaacgacacctacatgaagttcagctggctgaccgtgcccgagaagtccctggacaaagaacacagatgcatcgtgcggcacgaaaacaacaagaacggcgtggaccaggaaatcatcttcccacccatcaagaccgatgtgattacaatggaccccaaggacaactgctccaaggacgccaacgataccctgctgctccagctgaccaacaccagcgcctactacatgtac

SEQ ID NO: 4585 - DNA, 414 bp, synthetic construct
  source 1..414: mol_type = other DNA
gacaagcagctggacgccgacgtgtcccccaagcctaccatcttcctgccctctatcgccgagacaaagctccagaaggccggcacctacctgtgcctgctggaaaagttcttcccagatgtgattaagatccactggcaggaaaagaagtccaacaccatcctgggcagccaggaaggcaacaccatgaagaccaacgacacctacatgaagttcagctggctgaccgtgcccgagaagtccctggacaaagaacacagatgcatcgtgcggcacgaaaacaacaagaacggcgtggaccaggaaatcatcttcccacccatcaagaccgatgtgattacaatggaccccaaggacaactgctccaaggacgccaacgataccctgctgctccagctgaccaacaccagcgcc

SEQ ID NO: 4586 - DNA, 93 bp, synthetic construct
  source 1..93: mol_type = other DNA
ttgttgctgctgctgaagtccgtggtgtacttcgccatcatcacatgctgcctgctgcggagaaccgccttctgctgcaacggcgagaagtct

SEQ ID NO: 4587 - DNA, 105 bp, synthetic construct
  source 1..105: mol_type = other DNA
tactacatgtacttgttgctgctgctgaagtccgtggtgtacttcgccatcatcacatgctgcctgctgcggagaaccgccttctgctgcaacggcgagaagtct

SEQ ID NO: 4588 - DNA, 498 bp, synthetic construct; identical to SEQ ID NO: 4332
  source 1..498: mol_type = other DNA

SEQ ID NO: 4589 - DNA, 528 bp, synthetic construct; identical to SEQ ID NO: 4333
  source 1..528: mol_type = other DNA

SEQ ID NO: 4590 - DNA, 519 bp, synthetic construct; identical to SEQ ID NO: 4334
  source 1..519: mol_type = other DNA

SEQ ID NO: 4591 - DNA, 543 bp, synthetic construct
  source 1..543: mol_type = other DNA
ctcgaggacctgaagcacgtgttcccacctgaggtggccgtgttcgagcctagcgacgccgagatctggcacacccagaaagccaccctcgtgtgcctggctaccggcttctaccccgaccatgtggaactgtcttggtgggtcaacggcaaagaggtgcacagcggcgtgtctaccgacccccagccactgaaagaacagcccgccctgaacgacagccggtactgcctgagcagcagactgagagtgtccgccaccttctggcagaacccccggaaccacttcagatgccaggtgcagttctacggcctgagcgagaacgacgagtggacccaggacagagccaagcccgtgacccagatcgtgtctgccgaagcctggggcagagccgattgcggctttaccagcgagagctaccagcagggcgtgctgagcgcctactacatgtacttgttgctgctgctgaagtccgtggtgtacttcgccatcatcacatgctgcctgctgcggagaaccgccttctgctgcaacggcgagaagtct

SEQ ID NO: 4592 - DNA, 543 bp, synthetic construct
  source 1..543: mol_type = other DNA
ctcgaggacctgaagcacgtgttcccacctgaggtggccgtgttcgagcctagcgacgccgagatctggcacacccagaaagccaccctcgtgtgcctggctaccggcttctaccccgaccatgtggaactgtcttggtgggtcaacggcaaagaggtgcacagcggcgtgtctaccgacccccagccactgaaagaacagcccgccctgaacgacagccggtactgcctgagcagcagactgagagtgtccgccaccttctggcagaacccccggaaccacttcagatgccaggtgcagttctacggcctgagcgagaacgacgagtggacccaggacagagccaagcccgtgacccagatcgtgtctgccgaagcctggggcagagccgattgcggctttaccagcgagagctaccagcagggcgtgctgagcgccaccatcctgtacttgttgctgctgctgaagtccgtggtgtacttcgccatcatcacatgctgcctgctgcggagaaccgccttctgctgcaacggcgagaagtct

SEQ ID NO: 4593 - DNA, 546 bp, synthetic construct; identical to SEQ ID NO: 4477
  source 1..546: mol_type = other DNA

SEQ ID NO: 4594 - DNA, 522 bp, synthetic construct; identical to SEQ ID NO: 4469
  source 1..522: mol_type = other DNA

SEQ ID NO: 4595 - DNA, 561 bp, synthetic construct; identical to SEQ ID NO: 4493
  source 1..561: mol_type = other DNA

SEQ ID NO: 4596 - DNA, 456 bp, synthetic construct; identical to SEQ ID NO: 4523
  source 1..456: mol_type = other DNA

SEQ ID NO: 4597 - DNA, 414 bp, synthetic construct; identical to SEQ ID NO: 4548
  source 1..414: mol_type = other DNA

SEQ ID NO: 4598 - DNA, 480 bp, synthetic construct
  source 1..480: mol_type = other DNA
ggacagcctaaggccaatcctaccgtgacactgttccctccaagcagcgaagaactccaggccaacaaggccacacttgtgtgcctgatctccgacttctaccctggggctgtgacagtggcttggaaggccgatggatctcctgtgaaagccggcgtggaaaccaccaagccatccaagcagagcaacaacaaatacgccgccagctcctacctgagcctgacacctgagcagtggaagtcccacagatcctacagctgccaagtgacccacgaaggcagcaccgtggaaaagacagtggcccctacagagtgcagcggcagagccgattgcggctttaccagcgagagctaccagcagggcgtgctgagcgccaccatcctgtacttgttgctgctgctgaagtccgtggtgtacttcgccatcatcacatgctgcctgctgcggagaaccgccttctgctgcaacggcgagaagtct

SEQ ID NO: 4599 - DNA, 480 bp, synthetic construct
  source 1..480: mol_type = other DNA
ggacagcctaaggccaatcctaccgtgacactgttccctccaagcagcgaagaactccaggccaacaaggccacacttgtgtgcctgatctccgacttctaccctggggctgtgacagtggcttggaaggccgatggatctcctgtgaaagccggcgtggaaaccaccaagccatccaagcagagcaacaacaaatacgccgccagctcctacctgagcctgacacctgagcagtggaagtcccacagatcctacagctgccaagtgacccacgaaggcagcaccgtggaaaagacagtggcccctacagagtgcagcggcagagccgattgcggctttaccagcgagagctaccagcagggcgtgctgagcgcctactacatgtacttgttgctgctgctgaagtccgtggtgtacttcgccatcatcacatgctgcctgctgcggagaaccgccttctgctgcaacggcgagaagtct

SEQ ID NO: 4600 - DNA, 480 bp, synthetic construct
  source 1..480: mol_type = other DNA
ggacagcctaaggccaatcctaccgtgacactgttccctccaagcagcgaagaactccaggccaacaaggccacacttgtgtgcctgatctccgacttctaccctggggctgtgacagtggcttggaaggccgatggatctcctgtgaaagccggcgtggaaaccaccaagccatccaagcagagcaacaacaaatacgccgccagctcctacctgagcctgacacctgagcagtggaagtcccacagatcctacagctgccaagtgacccacgaaggcagcaccgtggaaaagacagtggcccctacagagtgcagcggcagagccgattgcggctttaccagcgagagctaccagcagggcgtgctgagcgcctactacacatacctgctgctgctcctcaagagcgtgatctacctggccatcatcagcttcagcctgctgcggagaacaagcgtgtgcggcaacgagaagaagtcc

SEQ ID NO: 4601 - DNA, 477 bp, synthetic construct
  source 1..477: mol_type = other DNA
ggacagcctaaggccaatcctaccgtgacactgttccctccaagcagcgaagaactccaggccaacaaggccacacttgtgtgcctgatctccgacttctaccctggggctgtgacagtggcttggaaggccgatggatctcctgtgaaagccggcgtggaaaccaccaagccatccaagcagagcaacaacaaatacgccgccagctcctacctgagcctgacacctgagcagtggaagtcccacagatcctacagctgccaagtgacccacgaaggcagcaccgtggaaaagacagtggcccctacagagtgcagcggcagagccgattgcggctttaccagcgagagctaccagcagggcgtgctgagcgcctactacatgtacttgttgctgctgctgaagtccgtggtgtacttcgccatcatcacatgctgcctgctgatggctatggtcaagcggaaggacagccgggga

SEQ ID NO: 4602 - DNA, 480 bp, synthetic construct
  source 1..480: mol_type = other DNA
ggacagcctaaggccaatcctaccgtgacactgttccctccaagcagcgaagaactccaggccaacaaggccacacttgtgtgcctgatctccgacttctaccctggggctgtgacagtggcttggaaggccgatggatctcctgtgaaagccggcgtggaaaccaccaagccatccaagcagagcaacaacaaatacgccgccagctcctacctgagcctgacacctgagcagtggaagtcccacagatcctacagctgccaagtgacccacgaaggcagcaccgtggaaaagacagtggcccctacagagtgcagcggcagagccgattgcggctttaccagcgagagctaccagcagggcgtgctgagcgccaccatcctgtacttgttgctgctgctgaagtccgtggtgtacctggccatcatcagcttcagcctgctgcggagaaccgccttctgctgcaacggcgagaagtct

SEQ ID NO: 4603 - DNA, 162 bp, synthetic construct
  source 1..162: mol_type = other DNA
ggcagagccgattgcggctttaccagcgagagctaccagcagggcgtgctgagcgccaccatcctgtacttgttgctgctgctgaagtccgtggtgtacttcgccatcatcacatgctgcctgctgcggagaaccgccttctgctgcaacggcgagaagtct

SEQ ID NO: 4604 - DNA, 162 bp, synthetic construct
  source 1..162: mol_type = other DNA
ggcagagccgattgcggctttaccagcgagagctaccagcagggcgtgctgagcgcctactacatgtacttgttgctgctgctgaagtccgtggtgtacttcgccatcatcacatgctgcctgctgcggagaaccgccttctgctgcaacggcgagaagtct

SEQ ID NO: 4605 - DNA, 162 bp, synthetic construct
  source 1..162: mol_type = other DNA
ggcagagccgattgcggctttaccagcgagagctaccagcagggcgtgctgagcgcctactacacatacctgctgctgctcctcaagagcgtgatctacctggccatcatcagcttcagcctgctgcggagaacaagcgtgtgcggcaacgagaagaagtcc

SEQ ID NO: 4606 - DNA, 159 bp, synthetic construct
  source 1..159: mol_type = other DNA
ggcagagccgattgcggctttaccagcgagagctaccagcagggcgtgctgagcgcctactacatgtacttgttgctgctgctgaagtccgtggtgtacttcgccatcatcacatgctgcctgctgatggctatggtcaagcggaaggacagccgggga

SEQ ID NO: 4607 - DNA, 162 bp, synthetic construct
  source 1..162: mol_type = other DNA
ggcagagccgattgcggctttaccagcgagagctaccagcagggcgtgctgagcgccaccatcctgtacttgttgctgctgctgaagtccgtggtgtacctggccatcatcagcttcagcctgctgcggagaaccgccttctgctgcaacggcgagaagtct

SEQ ID NO: 4608 - DNA, 489 bp, synthetic construct
  source 1..489: mol_type = other DNA
gcctctacaaagggaccctccgtgtttcctctggctcccagcagcaagtctacaagcggaggaacagccgctctgggctgcctggtcaaggattactttcccgagcctgtgaccgtgtcctggaatagcggagcactgacaagcggcgtgcacacctttccagccgtgctgcaaagcagcggcctgtactctctgagcagcgtggtcacagtgcctagctctagcctgggcacccagacctacatctgcaatgtgaaccacaagcctagcaacaccaaggtggacaagagagtggaacccaagagctgtatccccgaggacacattcttcccaagccccgagagcagctgcgacgtgaagctggtggaaaagagcttcgagacagacaccaacctgaacttccagaacctgagcgtgatcggcctgcggatgctgttcgccaaaaccgtggccgtgaacttcctgctgaccgccaagctgttcttcctc

SEQ ID NO: 4609 - DNA, 489 bp, synthetic construct
  source 1..489: mol_type = other DNA
gcctctacaaagggaccctccgtgtttcctctggctcccagcagcaagtctacaagcggaggaacagccgctctgggctgcctggtcaaggattactttcccgagcctgtgaccgtgtcctggaatagcggagcactgacaagcggcgtgcacacctttccagccgtgctgcaaagcagcggcctgtactctctgagcagcgtggtcacagtgcctagctctagcctgggcacccagacctacatctgcaatgtgaaccacaagcctagcaacaccaaggtggacaagagagtggaacccaagagctgtatccccgaggacacattcttcccaagccccgagagcagctgcgacgtgaagctggtggaaaagagcttcgagacagacaccaacctgaacttccagaacctgagcgtgctgggcctgcggatgctgttcgccaaaaccgtggccgtgaacttcctgctgaccgccaagctgttcttcctc

SEQ ID NO: 4610 - DNA, 489 bp, synthetic construct
  source 1..489: mol_type = other DNA
gcctctacaaagggaccctccgtgtttcctctggctcccagcagcaagtctacaagcggaggaacagccgctctgggctgcctggtcaaggattactttcccgagcctgtgaccgtgtcctggaatagcggagcactgacaagcggcgtgcacacctttccagccgtgctgcaaagcagcggcctgtactctctgagcagcgtggtcacagtgcctagctctagcctgggcacccagacctacatctgcaatgtgaaccacaagcctagcaacaccaaggtggacaagagagtggaacccaagagctgtatccccgaggacacattcttcccaagccccgagagcagctgcgacgtgaagctggtggaaaagagcttcgagacagacaccaacctgaacttccagaacctgaccgtgctgggcctgcggatgctgttcgccaaaaccgtggccgtgaacttcctgctgaccgccaagctgttcttcctc

SEQ ID NO: 4611 - DNA, 489 bp, synthetic construct; identical to SEQ ID NO: 4610
  source 1..489: mol_type = other DNA

SEQ ID NO: 4612 - DNA, 495 bp, synthetic construct
  source 1..495: mol_type = other DNA
gcctctacaaagggaccctccgtgtttcctctggctcccagcagcaagtctacaagcggaggaacagccgctctgggctgcctggtcaaggattactttcccgagcctgtgaccgtgtcctggaatagcggagcactgacaagcggcgtgcacacctttccagccgtgctgcaaagcagcggcctgtactctctgagcagcgtggtcacagtgcctagctctagcctgggcacccagacctacatctgcaatgtgaaccacaagcctagcaacaccaaggtggacaagagagtggaacccaagagctgtatcttcaaagagacaaacgccacctacccctccagcgacgtgccctgtgacgccaccctgaccgagaagtccttcgagacagacatgaacctcaacttccagaacctgaccgtgctgggcctgcggatgctgttcgccaaaaccgtggccgtgaacttcctgctgaccgccaagctgttcttcctc

SEQ ID NO: 4613 - DNA, 180 bp, synthetic construct
  source 1..180: mol_type = other DNA
atccccgaggacacattcttcccaagccccgagagcagctgcgacgtgaagctggtggaaaagagcttcgagacagacaccaacctgaacttccagaacctgagcgtgatcggcctgcggatgctgttcgccaaaaccgtggccgtgaacttcctgctgaccgccaagctgttcttcctc

SEQ ID NO: 4614 - DNA, 180 bp, synthetic construct
  source 1..180: mol_type = other DNA
atccccgaggacacattcttcccaagccccgagagcagctgcgacgtgaagctggtggaaaagagcttcgagacagacaccaacctgaacttccagaacctgagcgtgctgggcctgcggatgctgttcgccaaaaccgtggccgtgaacttcctgctgaccgccaagctgttcttcctc

SEQ ID NO: 4615 - DNA, 180 bp, synthetic construct
  source 1..180: mol_type = other DNA
atccccgaggacacattcttcccaagccccgagagcagctgcgacgtgaagctggtggaaaagagcttcgagacagacaccaacctgaacttccagaacctgaccgtgctgggcctgcggatgctgttcgccaaaaccgtggccgtgaacttcctgctgaccgccaagctgttcttcctc

SEQ ID NO: 4616 - DNA, 180 bp, synthetic construct; identical to SEQ ID NO: 4615
  source 1..180: mol_type = other DNA

SEQ ID NO: 4617 - DNA, 186 bp, synthetic construct
  source 1..186: mol_type = other DNA
atcttcaaagagacaaacgccacctacccctccagcgacgtgccctgtgacgccaccctgaccgagaagtccttcgagacagacatgaacctcaacttccagaacctgaccgtgctgggcctgcggatgctgttcgccaaaaccgtggccgtgaacttcctgctgaccgccaagctgttcttcctc

SEQ ID NO: 4618 - DNA, 516 bp, synthetic construct
  source 1..516: mol_type = other DNA
ggacagcctaaggccaatcctaccgtgacactgttccctccaagcagcgaagaactccaggccaacaaggccacacttgtgtgcctgatctccgacttctaccctggggctgtgacagtggcttggaaggccgatggatctcctgtgaaagccggcgtggaaaccaccaagccatccaagcagagcaacaacaaatacgccgccagctcctacctgagcctgacacctgagcagtggaagtcccacagatcctacagctgccaagtgacccacgaaggcagcaccgtggaaaagacagtggcccctacagagtgcagccccatcaagaccgatgtgattacaatggaccccaaggacaactgctccaaggacgccaacgataccctgctgctccagctgaccaacaccagcgcctactacatgtacgagatcctgctgggcaaggccaccctgtacgccgtgctggtgtctgccctggtgctgatggctatggtcaagcggaaggacagccgggga

SEQ ID NO: 4619 - DNA, 516 bp, synthetic construct
  source 1..516: mol_type = other DNA
ggacagcctaaggccaatcctaccgtgacactgttccctccaagcagcgaagaactccaggccaacaaggccacacttgtgtgcctgatctccgacttctaccctggggctgtgacagtggcttggaaggccgatggatctcctgtgaaagccggcgtggaaaccaccaagccatccaagcagagcaacaacaaatacgccgccagctcctacctgagcctgacacctgagcagtggaagtcccacagatcctacagctgccaagtgacccacgaaggcagcaccgtggaaaagacagtggcccctacagagtgcagccccatcaagaccgatgtgattacaatggaccccaaggacaactgctccaaggacgccaacgataccctgctgctccagctgaccaacaccagcgccaccatcctgtacgagatcctgctgggcaaggccaccctgtacgccgtgctggtgtctgccctggtgctgatggctatggtcaagcggaaggacagccgggga

SEQ ID NO: 4620 - DNA, 519 bp, synthetic construct
  source 1..519: mol_type = other DNA
ggacagcctaaggccaatcctaccgtgacactgttccctccaagcagcgaagaactccaggccaacaaggccacacttgtgtgcctgatctccgacttctaccctggggctgtgacagtggcttggaaggccgatggatctcctgtgaaagccggcgtggaaaccaccaagccatccaagcagagcaacaacaaatacgccgccagctcctacctgagcctgacacctgagcagtggaagtcccacagatcctacagctgccaagtgacccacgaaggcagcaccgtggaaaagacagtggcccctacagagtgcagccccatcaagaccgatgtgattacaatggaccccaaggacaactgctccaaggacgccaacgataccctgctgctccagctgaccaacaccagcgcctactacacatacctgctgctgctcctcaagagcgtgatctacctggccatcatcagcttcagcctgctgcggagaacaagcgtgtgcggcaacgagaagaagtcc

SEQ ID NO: 4621 - DNA, 516 bp, synthetic construct
  source 1..516: mol_type = other DNA
ggacagcctaaggccaatcctaccgtgacactgttccctccaagcagcgaagaactccaggccaacaaggccacacttgtgtgcctgatctccgacttctaccctggggctgtgacagtggcttggaaggccgatggatctcctgtgaaagccggcgtggaaaccaccaagccatccaagcagagcaacaacaaatacgccgccagctcctacctgagcctgacacctgagcagtggaagtcccacagatcctacagctgccaagtgacccacgaaggcagcaccgtggaaaagacagtggcccctacagagtgcagcagcatcaagaaagtggccgtgtccaccaagccaaccacctgttggcaggacaagaacgacgtgctccagctccagttcaccatcaccagcgcctactacacatacctgctgctgctcctcaagagcgtgatctacctggccatcatcagcttcagcctgctgcggagaacaagcgtgtgcggcaacgagaagaagtcc

SEQ ID NO: 4622 - DNA, 540 bp, synthetic construct
  source 1..540: mol_type = other DNA
gaggacctgaagaacgtgttcccacctgaggtggccgtgttcgagcctagcgaggccgagatcagccacacccagaaagccaccctcgtgtgcctggctaccggcttctaccccgaccatgtggaactgtcttggtgggtcaacggcaaagaggtgcacagcggcgtgtgtaccgacccccagccactgaaagaacagcccgccctgaacgacagccggtactgcctgagcagcagactgagagtgtccgccaccttctggcagaacccccggaaccacttcagatgccaggtgcagttctacggcctgagcgagaacgacgagtggacccaggacagagccaagcccgtgacccagatcgtgtctgccgaagcctggggcagagccgattgcggctttaccagcgagagctaccagcagggcgtgctgagcgcctactacatgtacttgttgctgctgctgaagtccgtggtgtacttcgccatcatcacatgctgcctgctgcggagaaccgccttctgctgcaacggcgagaagtct

SEQ ID NO: 4623 - DNA, 339 bp, synthetic construct
  source 1..339: mol_type = other DNA
gacgacatccagttgacccagtcccccagctcactcagcgccagtgtgggggaccgggtgaccattacctgtaaagccagtcagagtgtggactatgagggggatagcttcctgaattggtatcagcagaagcctggcaaagccccaaagctgctgatctacgctgcatctaatctggagtcaggcgtgccttctaggttctccggtagtgggtctgggaccgatttcacattgaccatttcatccctccaacccgaggatttcgctacatattactgtcagcagtccaatgaggaccctctcacctttggccagggcaccaaagttgaaattaagaga

SEQ ID NO: 4624 - DNA, 336 bp, synthetic construct; identical to SEQ ID NO: 3226
  source 1..336: mol_type = other DNA

SEQ ID NO: 4625 - DNA, 339 bp, synthetic construct
  source 1..339: mol_type = other DNA
gacgacatccagttgacccagtcccccagctcactcagcgccagtgtgggggaccgggtgaccattacctgtaaagccagtcagagtgtggactatgacggggatagcttcctgaattggtatcagcagaagcctggcaaagccccaaagctgctgatctacgctgcatctaatctggagtcaggcgtgccttccaggttctccggtagtgggtctgggaccgatttcacattgaccatttcatccctccaacccgaggatttcgctacatattactgtcagcagtccaatgaggaccctctcacctttggccagggcaccaaagttgaaattaagaga

SEQ ID NO: 4626 - DNA, 336 bp, synthetic construct; identical to SEQ ID NO: 3224
  source 1..336: mol_type = other DNA

SEQ ID NO: 4627 - DNA, 333 bp, synthetic construct; identical to SEQ ID NO: 3228
  source 1..333: mol_type = other DNA

SEQ ID NO: 4628 - DNA, 333 bp, synthetic construct; identical to SEQ ID NO: 3230
  source 1..333: mol_type = other DNA

SEQ ID NO: 4629 - DNA, 351 bp, synthetic construct; identical to SEQ ID NO: 3349
  source 1..351: mol_type = other DNA

SEQ ID NO: 4630 - DNA, 351 bp, synthetic construct; identical to SEQ ID NO: 3350
  source 1..351: mol_type = other DNA

SEQ ID NO: 4631 - DNA, 354 bp, synthetic construct
  source 1..354: mol_type = other DNA
gaagaagtccaacttgtggagtctggagggggcctggtgcagcccggcggctctctcagactgtcttgtgcggcaagcggctacaccttcagctcttactggatagaatgggtgaggcaggcacctggaaagggactggagtggattggagagattctgccaggagggggagatacaaattacaatgaaatcttcaaggggcgggccaccttttcagcggataccagcaagaatacagcttacctgcagatgaatagcctccgggcagaagataccgctgtttattattgcacgagacgggtgccaataagactggactattgggggcaagggactcttgtcaccgtcagttca

SEQ ID NO: 4632 - DNA, 354 bp, synthetic construct
  source 1..354: mol_type = other DNA
gaagaagtccaacttgtggagtctggagggggcctggtgcagcccggcggctctctcagactgtcttgtgcggcaagcggctacaccttcacctcttactggatagaatgggtgaggcaggcacctggaaagggactggagtggattggagagattctgccaggagggggagatacaaattacaatgaaatcttcaaggggcgggccaccttttcagcggataccagcaagaatacagcttacctgcagatgaatagcctccgggcagaagataccgctgtttattattgcacgagacgggtgccaataagactggactattgggggcaagggactcttgtcaccgtcagttca

SEQ ID NO: 4633 - DNA, 339 bp, synthetic construct
  source 1..339: mol_type = other DNA
gacatcgtgatgacccagacccccctgaccctgagcgtgacaatcggacagcctgccagcatctcctgcaagagcagccagagcctgctggacagcgacggcaagacctacctgaactggctgctgcagaggccaggccagagccccgagagactgatctacctggtgtccaagctggactccggcgtgcccgatagattcacaggcagcggctccggcaccgacttcaccctgaagatcagccgggtggaagccgaggacctgggcgtgtactgttgttggcagggcacccacttcccttacaccttcggcggagggaccaaggtggaaatcaagggc

SEQ ID NO: 4634 - DNA, 339 bp, synthetic construct; identical to SEQ ID NO: 3366
  source 1..339: mol_type = other DNA

SEQ ID NO: 4635 - DNA, 828 bp, synthetic construct; identical to SEQ ID NO: 3830
  source 1..828: mol_type = other DNA

SEQ ID NO: 4636 - DNA, 831 bp, synthetic construct
  source 1..831: mol_type = other DNA
ctcgaggacctgaagaacgtgttcccacctgaggtggccgtgttcgagcctagcgaggccgagatcagccacacccagaaagccaccctcgtgtgcctggctaccggcttctaccccgaccatgtggaactgtcttggtgggtcaacggcaaagaggtgcacagcggcgtgtctaccgacccccagccactgaaagaacagcccgccctgaacgacagccggtactgcctgagcagcagactgagagtgtccgccaccttctggcagaacccccggaaccacttcagatgccaggtgcagttctacggcctgagcgagaacgacgagtggacccaggacagagccaagcccgtgacccagatcgtgtctgccgaagcctggggcagagccgattgcggatcccagagcttcggcctgctggaccccaagctgtgctacctgctggatggcatcctgttcatctacggcgtgatcctgaccgccctgttcctgagagtgaagttcagcagaagcgccgacgcccctgcctaccagcagggacagaaccaactgtacaacgagctgaacctgggcagacgggaagagtacgacgtgctggacaagcggagaggcagggaccctgagatgggcggaaagccccagcggagaaagaacccccaggaaggactgtataacgaactccagaaagacaagatggccgaagcctacagcgagatcggcatgaagggcgagcggagaagaggcaagggccacgatggcctgtaccagggcctgagcaccgccaccaaggacacctatgacgccctgcacatgcaggccctgcctccaaga

SEQ ID NO: 4637 - DNA, 483 bp, synthetic construct
  source 1..483: mol_type = other DNA
atccagaaccctgatcctgccgtgtaccagctgcgggatagcaagagcagcgacaagagcgtgtgtctgttcaccgacttcgacagccagaccaacgtgtcccagagcaaggactccgacgtgtacatcaccgataagaccgtgctggacatgcggagcatggacttcaagagcaactccgccgtggcctggtccaacaagtccgatttcgcctgcgccaacgccttcaacaacagcattatccccgaggacacattcttcccaagccccgagagcagctgcggtaccatcactcaaggtttggcagtgtcaaccatctcatcattctttccacctggctaccaagtgtccttctgcctggtcatggtgctgctgttcgccgtggataccggcctgtacttcagcgtcaagaccaacatccggtccagcaccagagactggaaggaccacaagttcaagtggcggaaggaccctcaggacaag

SEQ ID NO: 4638 - DNA, 489 bp, synthetic construct
  source 1..489: mol_type = other DNA
acgcgtatccagaaccctgatcctgccgtgtaccagctgcgggatagcaagagcagcgacaagagcgtgtgtctgttcaccgacttcgacagccagaccaacgtgtcccagagcaaggactccgacgtgtacatcaccgataagaccgtgctggacatgcggagcatggacttcaagagcaactccgccgtggcctggtccaacaagtccgatttcgcctgcgccaacgccttcaacaacagcattatccccgaggacacattcttcccaagccccgagagcagctgcggtaccatcactcaaggtttggcagtgtcaaccatctcatcattctttccacctggctaccaagtgtccttctgcctggtcatggtgctgctgttcgccgtggataccggcctgtacttcagcgtcaagaccaacatccggtccagcaccagagactggaaggaccacaagttcaagtggcggaaggaccctcaggacaag

SEQ ID NO: 4639 - DNA, 537 bp, synthetic construct; identical to SEQ ID NO: 3807
  source 1..537: mol_type = other DNA

SEQ ID NO: 4640 - DNA, 540 bp, synthetic construct
  source 1..540: mol_type = other DNA
ctcgaggacctgaagaacgtgttcccacctgaggtggccgtgttcgagcctagcgaggccgagatcagccacacccagaaagccaccctcgtgtgcctggctaccggcttctaccccgaccatgtggaactgtcttggtgggtcaacggcaaagaggtgcacagcggcgtgtgtaccgacccccagccactgaaagaacagcccgccctgaacgacagccggtactgcctgagcagcagactgagagtgtccgccaccttctggcagaacccccggaaccacttcagatgccaggtgcagttctacggcctgagcgagaacgacgagtggacccaggacagagccaagcccgtgacccagatcgtgtctgccgaagcctggggcagagccgattgcggctttaccagcgagagctaccagcagggcgtgctgagcgccaccatcctgtacgagatcctgctgggcaaggccaccctgtacgccgtgctggtgtctgccctggtgctgatggctatggtcaagcggaaggacagccgggga

SEQ ID NO: 4641 - DNA, 420 bp, synthetic construct; identical to SEQ ID NO: 3787
  source 1..420: mol_type = other DNA

SEQ ID NO: 4642 - DNA, 425 bp, synthetic construct
  source 1..425: mol_type = other DNA
acgctatccagaaccctgatcctgccgtgtaccagctgcgggatagcaagagcagcgacaagagcgtgtgtctgttcaccgacttcgacagccagaccaacgtgtcccagagcaaggactccgacgtgtacatcaccgataagtgcgtgctggacatgcggagcatggacttcaagagcaactccgccgtggcctggtccaacaagtccgatttcgcctgcgccaacgccttcaacaacagcattatccccgaggacacattcttcccaagccccgagagcagctgcgacgtgaagctggtggaaaagagcttcgagacagacaccaacctgaacttccagaacctgagcgtgatcggcttcagaatcctgctgctgaaagtggccggctttaacctgctgatgaccctgcggctgtggtccagc

SEQ ID NO: 4643 - DNA, 825 bp, synthetic construct; identical to SEQ ID NO: 4273
  source 1..825: mol_type = other DNA

SEQ ID NO: 4644 - DNA, 828 bp, synthetic construct
  source 1..828: mol_type = other DNA
ctcgaggacctgaagaacgtgttcccacctgaggtggccgtgttcgagcctagcgaggccgagatcagccacacccagaaagccaccctcgtgtgcctggctaccggcttctaccccgaccatgtggaactgtcttggtgggtcaacggcaaagaggtgcacagcggcgtgtctaccgacccccagccactgaaagaacagcccgccctgaacgacagccggtactgcctgagcagcagactgagagtgtccgccaccttctggcagaacccccggaaccacttcagatgccaggtgcagttctacggcctgagcgagaacgacgagtggacccaggacagagccaagcccgtgacccagatcgtgtctgccgaagcctggggcagagccgattgcggatcccagagcttcggcctgctggaccccaagctgtgctacctgctggatggcatcctgttcatctacggcgtgatcctgaccgccctgttcctgagagtgaagttcagcagaagcgccgacgcccctgcctaccagcagggacagaaccaactgtacaacgagctgaacctgggcagacgggaagagtacgacgtgctggacaagcggagaggcagggaccctgagatgggcggaaagccccggagaaagaacccccaggaaggactgtataacgaactccagaaagacaagatggccgaagcctacagcgagatcggcatgaagggcgagcggagaagaggcaagggccacgatggcctgtaccagggcctgagcaccgccaccaaggacacctatgacgccctgcacatgcaggccctgcctccaaga

SEQ ID NO: 4645 - DNA, 714 bp, synthetic construct; identical to SEQ ID NO: 4272
  source 1..714: mol_type = other DNA

SEQ ID NO: 4646 - DNA, 720 bp, synthetic construct
  source 1..720: mol_type = other DNA
acgcgtatccagaaccctgatcctgccgtgtaccagctgcgggatagcaagagcagcgacaagagcgtgtgtctgttcaccgacttcgacagccagaccaacgtgtcccagagcaaggactccgacgtgtacatcaccgataagaccgtgctggacatgcggagcatggacttcaagagcaactccgccgtggcctggtccaacaagtccgatttcgcctgcgccaacgccttcaacaacagcattatccccgaggacacattcttcccaagccccgagagcagctgcggtacccagagttttgggttgttggaccctaaattgtgctatctgttggacggaatcctgttcatttacggagtgatcctgaccgcattgttcctgcgggttaagttttccagatccgcagacgcacccgcttaccaacaagggcagaaccaactctacaatgaacttaatttggggcggagggaagagtacgacgttctggacaaaaggaggggacgagatcccgagatgggcggaaagcctcgaaggaagaatccgcaagaggggctttataacgaactccagaaagataaaatggcagaagcctatagtgagattgggatgaagggagaaaggaggaggggtaaaggtcacgatgggttgtaccaaggattgagcacagccactaaagatacctatgatgcgctccacatgcaggccctgccgccaaga

SEQ ID NO: 4647 - DNA, 2214 bp, synthetic construct
  source 1..2214: mol_type = other DNA
atggccttaccagtgaccgccttgctcctgccgctggccttgctgctccacgccgccaggccggacatcgtgatgacccagacccccctgaccctgagcgtgacaatcggacagcctgccagcatctcctgcaagagcagccagagcctgctggacagcgacggcaagacctacctgaactggctgctgcagaggccaggccagagccccgagagactgatctacctggtgtccaagctggactccggcgtgcccgatagattcacaggcagcggctccggcaccgacttcaccctgaagatcagccgggtggaagccgaggacctgggcgtgtactgttgttggcagggcacccacttcccttacaccttcggcggagggaccaaggtggaaatcaagggcctcgaggacctgaagaacgtgttcccacctgaggtggccgtgttcgagcctagcgaggccgagatcagccacacccagaaagccaccctcgtgtgcctggctaccggcttctaccccgaccatgtggaactgtcttggtgggtcaacggcaaagaggtgcacagcggcgtgtctaccgacccccagccactgaaagaacagcccgccctgaacgacagccggtactgcctgagcagcagactgagagtgtccgccaccttctggcagaacccccggaaccacttcagatgccaggtgcagttctacggcctgagcgagaacgacgagtggacccaggacagagccaagcccgtgacccagatcgtgtctgccgaagcctggggcagagccgattgcggatcccagagcttcggcctgctggaccccaagctgtgctacctgctggatggcatcctgttcatctacggcgtgatcctgaccgccctgttcctgagagtgaagttcagcagaagcgccgacgcccctgcctaccagcagggacagaaccaactgtacaacgagctgaacctgggcagacgggaagagtacgacgtgctggacaagcggagaggcagggaccctgagatgggcggaaagccccagcggagaaagaacccccaggaaggactgtataacgaactccagaaagacaagatggccgaagcctacagcgagatcggcatgaagggcgagcggagaagaggcaagggccacgatggcctgtaccagggcctgagcaccgccaccaaggacacctatgacgccctgcacatgcaggccctgcctccaagaagggccaagcgatctggatctggagcaacaaacttctcactactcaaacaagcaggtgacgtggaggagaatcccgggcctactagtatggactggatttggcgcatccttttccttgtcggcgctgctaccggcgcgcattccttcgaacaggtgcaactgcagcagcctggcgctgaacttgtgcggccaggcgcctctgtgaagctgagctgtaaagccagcggctacaccttcaccagctactggatgaactgggtcaagcagcgcccaggccagggcctggaatggatcggaatgatcgaccccagcgacagcgagacacactacaaccacatcttcaaggacaaggccaccctgaccgtggacaagtccagcagcacagcctacctgcaactgtccagcctgaccagcgaggacagcgccgtgtactactgcgcccggaacctgtatctgtggggccagggaacaagcgtgaccgtgtctagcacgcgtatccagaaccctgatcctgccgtgtaccagctgcgggatagcaagagcagcgacaagagcgtgtgtctgttcaccgacttcgacagccagaccaacgtgtcccagagcaaggactccgacgtgtacatcaccgataagaccgtgctggacatgcggagcatggacttcaagagcaactccgccgtggcctggtccaacaagtccgatttcgcctgcgccaacgccttcaacaacagcattatccccgaggacacattcttcccaagccccgagagcagctgcggtaccatcactcaaggtttggcagtgtcaaccatctcatcattctttccacctggctaccaagtgtccttctgcctggtcatggtgctgctgttcgccgtggataccggcctgtacttcagcgtcaagaccaacatccggtccagcaccagagactggaaggaccacaagttcaagtggcggaaggaccctcaggacaagtaa

SEQ ID NO: 4648 - DNA, 2220 bp, synthetic construct
  source 1..2220: mol_type = other DNA
atggccttaccagtgaccgccttgctcctgccgctggccttgctgctccacgccgccaggccggacgacatccagttgacccagtcccccagctcactcagcgccagtgtgggggaccgggtgaccattacctgtaaagccagtcagagtgtggactatgagggggatagcttcctgaattggtatcagcagaagcctggcaaagccccaaagctgctgatctacgctgcatctaatctggagtcaggcgtgccttctaggttctccggtagtgggtctgggaccgatttcacattgaccatttcatccctccaacccgaggatttcgctacatattactgtcagcagtccaatgaggaccctctcacctttggccagggcaccaaagttgaaattaagagactcgaggacctgaagaacgtgttcccacctgaggtggccgtgttcgagcctagcgaggccgagatcagccacacccagaaagccaccctcgtgtgcctggctaccggcttctaccccgaccatgtggaactgtcttggtgggtcaacggcaaagaggtgcacagcggcgtgtctaccgacccccagccactgaaagaacagcccgccctgaacgacagccggtactgcctgagcagcagactgagagtgtccgccaccttctggcagaacccccggaaccacttcagatgccaggtgcagttctacggcctgagcgagaacgacgagtggacccaggacagagccaagcccgtgacccagatcgtgtctgccgaagcctggggcagagccgattgcggatcccagagcttcggcctgctggaccccaagctgtgctacctgctggatggcatcctgttcatctacggcgtgatcctgaccgccctgttcctgagagtgaagttcagcagaagcgccgacgcccctgcctaccagcagggacagaaccaactgtacaacgagctgaacctgggcagacgggaagagtacgacgtgctggacaagcggagaggcagggaccctgagatgggcggaaagccccagcggagaaagaacccccaggaaggactgtataacgaactccagaaagacaagatggccgaagcctacagcgagatcggcatgaagggcgagcggagaagaggcaagggccacgatggcctgtaccagggcctgagcaccgccaccaaggacacctatgacgccctgcacatgcaggccctgcctccaagaagggccaagcgatctggatctggagcaacaaacttctcactactcaaacaagcaggtgacgtggaggagaatcccgggcctactagtatggactggatttggcgcatccttttccttgtcggcgctgctaccggcgcgcattccttcgaagtccaacttgtggagtctggagggggcctggtgcagcccggcggctctctcagactgtcttgtgcggcaagcggctacaccttcagctcttactggatagaatgggtgaggcaggcacctggaaagggactggagtggattggagagattctgccaggagggggagatacaaattacaatgaaatcttcaaggggcgggccaccttttcagcggataccagcaagaatacagcttacctgcagatgaatagcctccgggcagaagataccgctgtttattattgcacgagacgggtgccaataagactggactattgggggcaagggactcttgtcaccgtcagttcaacgcgtatccagaaccctgatcctgccgtgtaccagctgcgggatagcaagagcagcgacaagagcgtgtgtctgttcaccgacttcgacagccagaccaacgtgtcccagagcaaggactccgacgtgtacatcaccgataagaccgtgctggacatgcggagcatggacttcaagagcaactccgccgtggcctggtccaacaagtccgatttcgcctgcgccaacgccttcaacaacagcattatccccgaggacacattcttcccaagccccgagagcagctgcggtaccatcactcaaggtttggcagtgtcaaccatctcatcattctttccacctggctaccaagtgtccttctgcctggtcatggtgctgctgttcgccgtggataccggcctgtacttcagcgtcaagaccaacatccggtccagcaccagagactggaaggaccacaagttcaagtggcggaaggaccctcaggacaag

SEQ ID NO: 4649 - DNA, 2217 bp, synthetic construct
  source 1..2217: mol_type = other DNA
atggccttaccagtgaccgccttgctcctgccgctggccttgctgctccacgccgccaggccggacatccagttgacccagtcccccagctcactcagcgccagtgtgggggaccgggtgaccattacctgtaaagccagtcagagtgtggactatgagggggatagcttcctgaattggtatcagcagaagcctggcaaagccccaaagctgctgatctacgctgcatctaatctggagtcaggcgtgccttctaggttctccggtagtgggtctgggaccgatttcacattgaccatttcatccctccaacccgaggatttcgctacatattactgtcagcagtccaatgaggaccctctcacctttggccagggcaccaaagttgaaattaagagactcgaggacctgaagaacgtgttcccacctgaggtggccgtgttcgagcctagcgaggccgagatcagccacacccagaaagccaccctcgtgtgcctggctaccggcttctaccccgaccatgtggaactgtcttggtgggtcaacggcaaagaggtgcacagcggcgtgtctaccgacccccagccactgaaagaacagcccgccctgaacgacagccggtactgcctgagcagcagactgagagtgtccgccaccttctggcagaacccccggaaccacttcagatgccaggtgcagttctacggcctgagcgagaacgacgagtggacccaggacagagccaagcccgtgacccagatcgtgtctgccgaagcctggggcagagccgattgcggatcccagagcttcggcctgctggaccccaagctgtgctacctgctggatggcatcctgttcatctacggcgtgatcctgaccgccctgttcctgagagtgaagttcagcagaagcgccgacgcccctgcctaccagcagggacagaaccaactgtacaacgagctgaacctgggcagacgggaagagtacgacgtgctggacaagcggagaggcagggaccctgagatgggcggaaagccccagcggagaaagaacccccaggaaggactgtataacgaactccagaaagacaagatggccgaagcctacagcgagatcggcatgaagggcgagcggagaagaggcaagggccacgatggcctgtaccagggcctgagcaccgccaccaaggacacctatgacgccctgcacatgcaggccctgcctccaagaagggccaagcgatctggatctggagcaacaaacttctcactactcaaacaagcaggtgacgtggaggagaatcccgggcctactagtatggactggatttggcgcatccttttccttgtcggcgctgctaccggcgcgcattccttcgaagtccaacttgtggagtctggagggggcctggtgcagcccggcggctctctcagactgtcttgtgcggcaagcggctacaccttcagctcttactggatagaatgggtgaggcaggcacctggaaagggactggagtggattggagagattctgccaggagggggagatacaaattacaatgaaatcttcaaggggcgggccaccttttcagcggataccagcaagaatacagcttacctgcagatgaatagcctccgggcagaagataccgctgtttattattgcacgagacgggtgccaataagactggactattgggggcaagggactcttgtcaccgtcagttcaacgcgtatccagaaccctgatcctgccgtgtaccagctgcgggatagcaagagcagcgacaagagcgtgtgtctgttcaccgacttcgacagccagaccaacgtgtcccagagcaaggactccgacgtgtacatcaccgataagaccgtgctggacatgcggagcatggacttcaagagcaactccgccgtggcctggtccaacaagtccgatttcgcctgcgccaacgccttcaacaacagcattatccccgaggacacattcttcccaagccccgagagcagctgcggtaccatcactcaaggtttggcagtgtcaaccatctcatcattctttccacctggctaccaagtgtccttctgcctggtcatggtgctgctgttcgccgtggataccggcctgtacttcagcgtcaagaccaacatccggtccagcaccagagactggaaggaccacaagttcaagtggcggaaggaccctcaggacaag

SEQ ID NO: 4650 - DNA, 2226 bp, synthetic construct
  source 1..2226: mol_type = other DNA
atggccttaccagtgaccgccttgctcctgccgctggccttgctgctccacgccgccaggccggacgacatccagttgacccagtcccccagctcactcagcgccagtgtgggggaccgggtgaccattacctgtaaagccagtcagagtgtggactatgagggggatagcttcctgaattggtatcagcagaagcctggcaaagccccaaagctgctgatctacgctgcatctaatctggagtcaggcgtgccttctaggttctccggtagtgggtctgggaccgatttcacattgaccatttcatccctccaacccgaggatttcgctacatattactgtcagcagtccaatgaggaccctctcacctttggccagggcaccaaagttgaaattaagagactcgaggacctgaagaacgtgttcccacctgaggtggccgtgttcgagcctagcgaggccgagatcagccacacccagaaagccaccctcgtgtgcctggctaccggcttctaccccgaccatgtggaactgtcttggtgggtcaacggcaaagaggtgcacagcggcgtgtctaccgacccccagccactgaaagaacagcccgccctgaacgacagccggtactgcctgagcagcagactgagagtgtccgccaccttctggcagaacccccggaaccacttcagatgccaggtgcagttctacggcctgagcgagaacgacgagtggacccaggacagagccaagcccgtgacccagatcgtgtctgccgaagcctggggcagagccgattgcggatcccagagcttcggcctgctggaccccaagctgtgctacctgctggatggcatcctgttcatctacggcgtgatcctgaccgccctgttcctgagagtgaagttcagcagaagcgccgacgcccctgcctaccagcagggacagaaccaactgtacaacgagctgaacctgggcagacgggaagagtacgacgtgctggacaagcggagaggcagggaccctgagatgggcggaaagccccagcggagaaagaacccccaggaaggactgtataacgaactccagaaagacaagatggccgaagcctacagcgagatcggcatgaagggcgagcggagaagaggcaagggccacgatggcctgtaccagggcctgagcaccgccaccaaggacacctatgacgccctgcacatgcaggccctgcctccaagaagggccaagcgatctggatctggagcaacaaacttctcactactcaaacaagcaggtgacgtggaggagaatcccgggcctactagtatggactggatttggcgcatccttttccttgtcggcgctgctaccggcgcgcattccttcgaagaagtccaacttgtggagtctggagggggcctggtgcagcccggcggctctctcagactgtcttgtgcggcaagcggctacaccttcagctcttactggatagaatgggtgaggcaggcacctggaaagggactggagtggattggagagattctgccaggagggggagatacaaattacaatgaaatcttcaaggggcgggccaccttttcagcggataccagcaagaatacagcttacctgcagatgaatagcctccgggcagaagataccgctgtttattattgcacgagacgggtgccaataagactggactattgggggcaagggactcttgtcaccgtcagttcaacgcgtatccagaaccctgatcctgccgtgtaccagctgcgggatagcaagagcagcgacaagagcgtgtgtctgttcaccgacttcgacagccagaccaacgtgtcccagagcaaggactccgacgtgtacatcaccgataagaccgtgctggacatgcggagcatggacttcaagagcaactccgccgtggcctggtccaacaagtccgatttcgcctgcgccaacgccttcaacaacagcattatccccgaggacacattcttcccaagccccgagagcagctgcggtaccatcactcaaggtttggcagtgtcaaccatctcatcattctttccacctggctaccaagtgtccttctgcctggtcatggtgctgctgttcgccgtggataccggcctgtacttcagcgtcaagaccaacatccggtccagcaccagagactggaaggaccacaagttcaagtggcggaaggaccctcaggacaagtaa

SEQ ID NO: 4651 - DNA, 2223 bp, synthetic construct
  source 1..2223: mol_type = other DNA
atggccttaccagtgaccgccttgctcctgccgctggccttgctgctccacgccgccaggccggacatccagttgacccagtcccccagctcactcagcgccagtgtgggggaccgggtgaccattacctgtaaagccagtcagagtgtggactatgagggggatagcttcctgaattggtatcagcagaagcctggcaaagccccaaagctgctgatctacgctgcatctaatctggagtcaggcgtgccttctaggttctccggtagtgggtctgggaccgatttcacattgaccatttcatccctccaacccgaggatttcgctacatattactgtcagcagtccaatgaggaccctctcacctttggccagggcaccaaagttgaaattaagagactcgaggacctgaagaacgtgttcccacctgaggtggccgtgttcgagcctagcgaggccgagatcagccacacccagaaagccaccctcgtgtgcctggctaccggcttctaccccgaccatgtggaactgtcttggtgggtcaacggcaaagaggtgcacagcggcgtgtctaccgacccccagccactgaaagaacagcccgccctgaacgacagccggtactgcctgagcagcagactgagagtgtccgccaccttctggcagaacccccggaaccacttcagatgccaggtgcagttctacggcctgagcgagaacgacgagtggacccaggacagagccaagcccgtgacccagatcgtgtctgccgaagcctggggcagagccgattgcggatcccagagcttcggcctgctggaccccaagctgtgctacctgctggatggcatcctgttcatctacggcgtgatcctgaccgccctgttcctgagagtgaagttcagcagaagcgccgacgcccctgcctaccagcagggacagaaccaactgtacaacgagctgaacctgggcagacgggaagagtacgacgtgctggacaagcggagaggcagggaccctgagatgggcggaaagccccagcggagaaagaacccccaggaaggactgtataacgaactccagaaagacaagatggccgaagcctacagcgagatcggcatgaagggcgagcggagaagaggcaagggccacgatggcctgtaccagggcctgagcaccgccaccaaggacacctatgacgccctgcacatgcaggccctgcctccaagaagggccaagcgatctggatctggagcaacaaacttctcactactcaaacaagcaggtgacgtggaggagaatcccgggcctactagtatggactggatttggcgcatccttttccttgtcggcgctgctaccggcgcgcattccttcgaagaagtccaacttgtggagtctggagggggcctggtgcagcccggcggctctctcagactgtcttgtgcggcaagcggctacaccttcagctcttactggatagaatgggtgaggcaggcacctggaaagggactggagtggattggagagattctgccaggagggggagatacaaattacaatgaaatcttcaaggggcgggccaccttttcagcggataccagcaagaatacagcttacctgcagatgaatagcctccgggcagaagataccgctgtttattattgcacgagacgggtgccaataagactggactattgggggcaagggactcttgtcaccgtcagttcaacgcgtatccagaaccctgatcctgccgtgtaccagctgcgggatagcaagagcagcgacaagagcgtgtgtctgttcaccgacttcgacagccagaccaacgtgtcccagagcaaggactccgacgtgtacatcaccgataagaccgtgctggacatgcggagcatggacttcaagagcaactccgccgtggcctggtccaacaagtccgatttcgcctgcgccaacgccttcaacaacagcattatccccgaggacacattcttcccaagccccgagagcagctgcggtaccatcactcaaggtttggcagtgtcaaccatctcatcattctttccacctggctaccaagtgtccttctgcctggtcatggtgctgctgttcgccgtggataccggcctgtacttcagcgtcaagaccaacatccggtccagcaccagagactggaaggaccacaagttcaagtggcggaaggaccctcaggacaagtaa

SEQ ID NO: 4652 - DNA, 2223 bp, synthetic construct
  source 1..2223: mol_type = other DNA
atggccttaccagtgaccgccttgctcctgccgctggccttgctgctccacgccgccaggccggacgacatccagttgacccagtcccccagctcactcagcgccagtgtgggggaccgggtgaccattacctgtaaagccagtcagagtgtggactatgacggggatagcttcctgaattggtatcagcagaagcctggcaaagccccaaagctgctgatctacgctgcatctaatctggagtcaggcgtgccttccaggttctccggtagtgggtctgggaccgatttcacattgaccatttcatccctccaacccgaggatttcgctacatattactgtcagcagtccaatgaggaccctctcacctttggccagggcaccaaagttgaaattaagagactcgaggacctgaagaacgtgttcccacctgaggtggccgtgttcgagcctagcgaggccgagatcagccacacccagaaagccaccctcgtgtgcctggctaccggcttctaccccgaccatgtggaactgtcttggtgggtcaacggcaaagaggtgcacagcggcgtgtctaccgacccccagccactgaaagaacagcccgccctgaacgacagccggtactgcctgagcagcagactgagagtgtccgccaccttctggcagaacccccggaaccacttcagatgccaggtgcagttctacggcctgagcgagaacgacgagtggacccaggacagagccaagcccgtgacccagatcgtgtctgccgaagcctggggcagagccgattgcggatcccagagcttcggcctgctggaccccaagctgtgctacctgctggatggcatcctgttcatctacggcgtgatcctgaccgccctgttcctgagagtgaagttcagcagaagcgccgacgcccctgcctaccagcagggacagaaccaactgtacaacgagctgaacctgggcagacgggaagagtacgacgtgctggacaagcggagaggcagggaccctgagatgggcggaaagccccagcggagaaagaacccccaggaaggactgtataacgaactccagaaagacaagatggccgaagcctacagcgagatcggcatgaagggcgagcggagaagaggcaagggccacgatggcctgtaccagggcctgagcaccgccaccaaggacacctatgacgccctgcacatgcaggccctgcctccaagaagggccaagcgatctggatctggagcaacaaacttctcactactcaaacaagcaggtgacgtggaggagaatcccgggcctactagtatggactggatttggcgcatccttttccttgtcggcgctgctaccggcgcgcattccttcgaagaagtccaacttgtggagtctggagggggcctggtgcagcccggcggctctctcagactgtcttgtgcggcaagcggctacaccttcagctcttactggatagaatgggtgaggcaggcacctggaaagggactggagtggattggagagattctgccaggagggggagatacaaattacaatgaaatcttcaaggggcgggccaccttttcagcggataccagcaagaatacagcttacctgcagatgaatagcctccgggcagaagataccgctgtttattattgcacgagacgggtgccaataagactggactattgggggcaagggactcttgtcaccgtcagttcaacgcgtatccagaaccctgatcctgccgtgtaccagctgcgggatagcaagagcagcgacaagagcgtgtgtctgttcaccgacttcgacagccagaccaacgtgtcccagagcaaggactccgacgtgtacatcaccgataagaccgtgctggacatgcggagcatggacttcaagagcaactccgccgtggcctggtccaacaagtccgatttcgcctgcgccaacgccttcaacaacagcattatccccgaggacacattcttcccaagccccgagagcagctgcggtaccatcactcaaggtttggcagtgtcaaccatctcatcattctttccacctggctaccaagtgtccttctgcctggtcatggtgctgctgttcgccgtggataccggcctgtacttcagcgtcaagaccaacatccggtccagcaccagagactggaaggaccacaagttcaagtggcggaaggaccctcaggacaag

SEQ ID NO: 4653 - DNA, 2220 bp, synthetic construct
  source 1..2220: mol_type = other DNA
atggccttaccagtgaccgccttgctcctgccgctggccttgctgctccacgccgccaggccggacatccagttgacccagtcccccagctcactcagcgccagtgtgggggaccgggtgaccattacctgtaaagccagtcagagtgtggactatgacggggatagcttcctgaattggtatcagcagaagcctggcaaagccccaaagctgctgatctacgctgcatctaatctggagtcaggcgtgccttccaggttctccggtagtgggtctgggaccgatttcacattgaccatttcatccctccaacccgaggatttcgctacatattactgtcagcagtccaatgaggaccctctcacctttggccagggcaccaaagttgaaattaagagactcgaggacctgaagaacgtgttcccacctgaggtggccgtgttcgagcctagcgaggccgagatcagccacacccagaaagccaccctcgtgtgcctggctaccggcttctaccccgaccatgtggaactgtcttggtgggtcaacggcaaagaggtgcacagcggcgtgtctaccgacccccagccactgaaagaacagcccgccctgaacgacagccggtactgcctgagcagcagactgagagtgtccgccaccttctggcagaacccccggaaccacttcagatgccaggtgcagttctacggcctgagcgagaacgacgagtggacccaggacagagccaagcccgtgacccagatcgtgtctgccgaagcctggggcagagccgattgcggatcccagagcttcggcctgctggaccccaagctgtgctacctgctggatggcatcctgttcatctacggcgtgatcctgaccgccctgttcctgagagtgaagttcagcagaagcgccgacgcccctgcctaccagcagggacagaaccaactgtacaacgagctgaacctgggcagacgggaagagtacgacgtgctggacaagcggagaggcagggaccctgagatgggcggaaagccccagcggagaaagaacccccaggaaggactgtataacgaactccagaaagacaagatggccgaagcctacagcgagatcggcatgaagggcgagcggagaagaggcaagggccacgatggcctgtaccagggcctgagcaccgccaccaaggacacctatgacgccctgcacatgcaggccctgcctccaagaagggccaagcgatctggatctggagcaacaaacttctcactactcaaacaagcaggtgacgtggaggagaatcccgggcctactagtatggactggatttggcgcatccttttccttgtcggcgctgctaccggcgcgcattccttcgaagaagtccaacttgtggagtctggagggggcctggtgcagcccggcggctctctcagactgtcttgtgcggcaagcggctacaccttcagctcttactggatagaatgggtgaggcaggcacctggaaagggactggagtggattggagagattctgccaggagggggagatacaaattacaatgaaatcttcaaggggcgggccaccttttcagcggataccagcaagaatacagcttacctgcagatgaatagcctccgggcagaagataccgctgtttattattgcacgagacgggtgccaataagactggactattgggggcaagggactcttgtcaccgtcagttcaacgcgtatccagaaccctgatcctgccgtgtaccagctgcgggatagcaagagcagcgacaagagcgtgtgtctgttcaccgacttcgacagccagaccaacgtgtcccagagcaaggactccgacgtgtacatcaccgataagaccgtgctggacatgcggagcatggacttcaagagcaactccgccgtggcctggtccaacaagtccgatttcgcctgcgccaacgccttcaacaacagcattatccccgaggacacattcttcccaagccccgagagcagctgcggtaccatcactcaaggtttggcagtgtcaaccatctcatcattctttccacctggctaccaagtgtccttctgcctggtcatggtgctgctgttcgccgtggataccggcctgtacttcagcgtcaagaccaacatccggtccagcaccagagactggaaggaccacaagttcaagtggcggaaggaccctcaggacaag

SEQ ID NO: 4654 - DNA, 2217 bp, synthetic construct
  source 1..2217: mol_type = other DNA
atggccttaccagtgaccgccttgctcctgccgctggccttgctgctccacgccgccaggccggacatcgtgatgacacagagccctgatagcctggccgtgtctctgggagagagagccaccattaactgcaaggccagccagagcgtggactacgagggcgacagcttcctgaactggtatcagcagaagcccggccagcctcctaagctgctgatctacgccgccagcaatctggaaagcggcgtgccaagcagattttccggctctggcagcggcaccgatttcaccctgacaatatccagcctccagcctgaggacgtggccgtgtactactgccagcagagcaatgaggaccctctgacctttggccagggcaccaaggtggaaatcaagctcgaggacctgaagaacgtgttcccacctgaggtggccgtgttcgagcctagcgaggccgagatcagccacacccagaaagccaccctcgtgtgcctggctaccggcttctaccccgaccatgtggaactgtcttggtgggtcaacggcaaagaggtgcacagcggcgtgtctaccgacccccagccactgaaagaacagcccgccctgaacgacagccggtactgcctgagcagcagactgagagtgtccgccaccttctggcagaacccccggaaccacttcagatgccaggtgcagttctacggcctgagcgagaacgacgagtggacccaggacagagccaagcccgtgacccagatcgtgtctgccgaagcctggggcagagccgattgcggatcccagagcttcggcctgctggaccccaagctgtgctacctgctggatggcatcctgttcatctacggcgtgatcctgaccgccctgttcctgagagtgaagttcagcagaagcgccgacgcccctgcctaccagcagggacagaaccaactgtacaacgagctgaacctgggcagacgggaagagtacgacgtgctggacaagcggagaggcagggaccctgagatgggcggaaagccccagcggagaaagaacccccaggaaggactgtataacgaactccagaaagacaagatggccgaagcctacagcgagatcggcatgaagggcgagcggagaagaggcaagggccacgatggcctgtaccagggcctgagcaccgccaccaaggacacctatgacgccctgcacatgcaggccctgcctccaagaagggccaagcgatctggatctggagcaacaaacttctcactactcaaacaagcaggtgacgtggaggagaatcccgggcctactagtatggactggatttggcgcatccttttccttgtcggcgctgctaccggcgcgcattccttcgaagaagtccaacttgtggagtctggagggggcctggtgcagcccggcggctctctcagactgtcttgtgcggcaagcggctacaccttcagctcttactggatagaatgggtgaggcaggcacctggaaagggactggagtggattggagagattctgccaggagggggagatacaaattacaatgaaatcttcaaggggcgggccaccttttcagcggataccagcaagaatacagcttacctgcagatgaatagcctccgggcagaagataccgctgtttattattgcacgagacgggtgccaataagactggactattgggggcaagggactcttgtcaccgtcagttcaacgcgtatccagaaccctgatcctgccgtgtaccagctgcgggatagcaagagcagcgacaagagcgtgtgtctgttcaccgacttcgacagccagaccaacgtgtcccagagcaaggactccgacgtgtacatcaccgataagaccgtgctggacatgcggagcatggacttcaagagcaactccgccgtggcctggtccaacaagtccgatttcgcctgcgccaacgccttcaacaacagcattatccccgaggacacattcttcccaagccccgagagcagctgcggtaccatcactcaaggtttggcagtgtcaaccatctcatcattctttccacctggctaccaagtgtccttctgcctggtcatggtgctgctgttcgccgtggataccggcctgtacttcagcgtcaagaccaacatccggtccagcaccagagactggaaggaccacaagttcaagtggcggaaggaccctcaggacaag

SEQ ID NO: 4655 - DNA, 2217 bp, synthetic construct
  source 1..2217: mol_type = other DNA
atggccttaccagtgaccgccttgctcctgccgctggccttgctgctccacgccgccaggccggacatcgtgatgacacagagccctgatagcctggccgtgtctctgggagagagagccaccattaactgcaaggccagccagagcgtggactacgacggcgacagcttcctgaactggtatcagcagaagcccggccagcctcctaagctgctgatctacgccgccagcaatctggaaagcggcgtgccaagcagattttccggctctggcagcggcaccgatttcaccctgacaatatccagcctccagcctgaggacgtggccgtgtactactgccagcagagcaacgacgaccctctgacctttggacagggcaccaaggtggaaatcaaactcgaggacctgaagaacgtgttcccacctgaggtggccgtgttcgagcctagcgaggccgagatcagccacacccagaaagccaccctcgtgtgcctggctaccggcttctaccccgaccatgtggaactgtcttggtgggtcaacggcaaagaggtgcacagcggcgtgtctaccgacccccagccactgaaagaacagcccgccctgaacgacagccggtactgcctgagcagcagactgagagtgtccgccaccttctggcagaacccccggaaccacttcagatgccaggtgcagttctacggcctgagcgagaacgacgagtggacccaggacagagccaagcccgtgacccagatcgtgtctgccgaagcctggggcagagccgattgcggatcccagagcttcggcctgctggaccccaagctgtgctacctgctggatggcatcctgttcatctacggcgtgatcctgaccgccctgttcctgagagtgaagttcagcagaagcgccgacgcccctgcctaccagcagggacagaaccaactgtacaacgagctgaacctgggcagacgggaagagtacgacgtgctggacaagcggagaggcagggaccctgagatgggcggaaagccccagcggagaaagaacccccaggaaggactgtataacgaactccagaaagacaagatggccgaagcctacagcgagatcggcatgaagggcgagcggagaagaggcaagggccacgatggcctgtaccagggcctgagcaccgccaccaaggacacctatgacgccctgcacatgcaggccctgcctccaagaagggccaagcgatctggatctggagcaacaaacttctcactactcaaacaagcaggtgacgtggaggagaatcccgggcctactagtatggactggatttggcgcatccttttccttgtcggcgctgctaccggcgcgcattccttcgaagaagtccaacttgtggagtctggagggggcctggtgcagcccggcggctctctcagactgtcttgtgcggcaagcggctacaccttcagctcttactggatagaatgggtgaggcaggcacctggaaagggactggagtggattggagagattctgccaggagggggagatacaaattacaatgaaatcttcaaggggcgggccaccttttcagcggataccagcaagaatacagcttacctgcagatgaatagcctccgggcagaagataccgctgtttattattgcacgagacgggtgccaataagactggactattgggggcaagggactcttgtcaccgtcagttcaacgcgtatccagaaccctgatcctgccgtgtaccagctgcgggatagcaagagcagcgacaagagcgtgtgtctgttcaccgacttcgacagccagaccaacgtgtcccagagcaaggactccgacgtgtacatcaccgataagaccgtgctggacatgcggagcatggacttcaagagcaactccgccgtggcctggtccaacaagtccgatttcgcctgcgccaacgccttcaacaacagcattatccccgaggacacattcttcccaagccccgagagcagctgcggtaccatcactcaaggtttggcagtgtcaaccatctcatcattctttccacctggctaccaagtgtccttctgcctggtcatggtgctgctgttcgccgtggataccggcctgtacttcagcgtcaagaccaacatccggtccagcaccagagactggaaggaccacaagttcaagtggcggaaggaccctcaggacaag

SEQ ID NO: 4656 - DNA, 2223 bp, synthetic construct
  source 1..2223: mol_type = other DNA
atggccttaccagtgaccgccttgctcctgccgctggccttgctgctccacgccgccaggccggacgacatccagttgacccagtcccccagctcactcagcgccagtgtgggggaccgggtgaccattacctgtaaagccagtcagagtgtggactatgagggggatagcttcctgaattggtatcagcagaagcctggcaaagccccaaagctgctgatctacgctgcatctaatctggagtcaggcgtgccttctaggttctccggtagtgggtctgggaccgatttcacattgaccatttcatccctccaacccgaggatttcgctacatattactgtcagcagtccaatgaggaccctctcacctttggccagggcaccaaagttgaaattaagagactcgaggacctgaagaacgtgttcccacctgaggtggccgtgttcgagcctagcgaggccgagatcagccacacccagaaagccaccctcgtgtgcctggctaccggcttctaccccgaccatgtggaactgtcttggtgggtcaacggcaaagaggtgcacagcggcgtgtctaccgacccccagccactgaaagaacagcccgccctgaacgacagccggtactgcctgagcagcagactgagagtgtccgccaccttctggcagaacccccggaaccacttcagatgccaggtgcagttctacggcctgagcgagaacgacgagtggacccaggacagagccaagcccgtgacccagatcgtgtctgccgaagcctggggcagagccgattgcggatcccagagcttcggcctgctggaccccaagctgtgctacctgctggatggcatcctgttcatctacggcgtgatcctgaccgccctgttcctgagagtgaagttcagcagaagcgccgacgcccctgcctaccagcagggacagaaccaactgtacaacgagctgaacctgggcagacgggaagagtacgacgtgctggacaagcggagaggcagggaccctgagatgggcggaaagccccagcggagaaagaacccccaggaaggactgtataacgaactccagaaagacaagatggccgaagcctacagcgagatcggcatgaagggcgagcggagaagaggcaagggccacgatggcctgtaccagggcctgagcaccgccaccaaggacacctatgacgccctgcacatgcaggccctgcctccaagaagggccaagcgatctggatctggagcaacaaacttctcactactcaaacaagcaggtgacgtggaggagaatcccgggcctactagtatggactggatttggcgcatccttttccttgtcggcgctgctaccggcgcgcattccttcgaagaagtccaacttgtggagtctggagggggcctggtgcagcccggcggctctctcagactgtcttgtgcggcaagcggctacaccttcacctcttactggatagaatgggtgaggcaggcacctggaaagggactggagtggattggagagattctgccaggagggggagatacaaattacaatgaaatcttcaaggggcgggccaccttttcagcggataccagcaagaatacagcttacctgcagatgaatagcctccgggcagaagataccgctgtttattattgcacgagacgggtgccaataagactggactattgggggcaagggactcttgtcaccgtcagttcaacgcgtatccagaaccctgatcctgccgtgtaccagctgcgggatagcaagagcagcgacaagagcgtgtgtctgttcaccgacttcgacagccagaccaacgtgtcccagagcaaggactccgacgtgtacatcaccgataagaccgtgctggacatgcggagcatggacttcaagagcaactccgccgtggcctggtccaacaagtccgatttcgcctgcgccaacgccttcaacaacagcattatccccgaggacacattcttcccaagccccgagagcagctgcggtaccatcactcaaggtttggcagtgtcaaccatctcatcattctttccacctggctaccaagtgtccttctgcctggtcatggtgctgctgttcgccgtggataccggcctgtacttcagcgtcaagaccaacatccggtccagcaccagagactggaaggaccacaagttcaagtggcggaaggaccctcaggacaag

SEQ ID NO: 4657 - DNA, 2220 bp, synthetic construct
  source 1..2220: mol_type = other DNA
atggccttaccagtgaccgccttgctcctgccgctggccttgctgctccacgccgccaggccggacatccagttgacccagtcccccagctcactcagcgccagtgtgggggaccgggtgaccattacctgtaaagccagtcagagtgtggactatgagggggatagcttcctgaattggtatcagcagaagcctggcaaagccccaaagctgctgatctacgctgcatctaatctggagtcaggcgtgccttctaggttctccggtagtgggtctgggaccgatttcacattgaccatttcatccctccaacccgaggatttcgctacatattactgtcagcagtccaatgaggaccctctcacctttggccagggcaccaaagttgaaattaagagactcgaggacctgaagaacgtgttcccacctgaggtggccgtgttcgagcctagcgaggccgagatcagccacacccagaaagccaccctcgtgtgcctggctaccggcttctaccccgaccatgtggaactgtcttggtgggtcaacggcaaagaggtgcacagcggcgtgtctaccgacccccagccactgaaagaacagcccgccctgaacgacagccggtactgcctgagcagcagactgagagtgtccgccaccttctggcagaacccccggaaccacttcagatgccaggtgcagttctacggcctgagcgagaacgacgagtggacccaggacagagccaagcccgtgacccagatcgtgtctgccgaagcctggggcagagccgattgcggatcccagagcttcggcctgctggaccccaagctgtgctacctgctggatggcatcctgttcatctacggcgtgatcctgaccgccctgttcctgagagtgaagttcagcagaagcgccgacgcccctgcctaccagcagggacagaaccaactgtacaacgagctgaacctgggcagacgggaagagtacgacgtgctggacaagcggagaggcagggaccctgagatgggcggaaagccccagcggagaaagaacccccaggaaggactgtataacgaactccagaaagacaagatggccgaagcctacagcgagatcggcatgaagggcgagcggagaagaggcaagggccacgatggcctgtaccagggcctgagcaccgccaccaaggacacctatgacgccctgcacatgcaggccctgcctccaagaagggccaagcgatctggatctggagcaacaaacttctcactactcaaacaagcaggtgacgtggaggagaatcccgggcctactagtatggactggatttggcgcatccttttccttgtcggcgctgctaccggcgcgcattccttcgaagaagtccaacttgtggagtctggagggggcctggtgcagcccggcggctctctcagactgtcttgtgcggcaagcggctacaccttcacctcttactggatagaatgggtgaggcaggcacctggaaagggactggagtggattggagagattctgccaggagggggagatacaaattacaatgaaatcttcaaggggcgggccaccttttcagcggataccagcaagaatacagcttacctgcagatgaatagcctccgggcagaagataccgctgtttattattgcacgagacgggtgccaataagactggactattgggggcaagggactcttgtcaccgtcagttcaacgcgtatccagaaccctgatcctgccgtgtaccagctgcgggatagcaagagcagcgacaagagcgtgtgtctgttcaccgacttcgacagccagaccaacgtgtcccagagcaaggactccgacgtgtacatcaccgataagaccgtgctggacatgcggagcatggacttcaagagcaactccgccgtggcctggtccaacaagtccgatttcgcctgcgccaacgccttcaacaacagcattatccccgaggacacattcttcccaagccccgagagcagctgcggtaccatcactcaaggtttggcagtgtcaaccatctcatcattctttccacctggctaccaagtgtccttctgcctggtcatggtgctgctgttcgccgtggataccggcctgtacttcagcgtcaagaccaacatccggtccagcaccagagactggaaggaccacaagttcaagtggcggaaggaccctcaggacaag

SEQ ID NO: 4658 - DNA, 2226 bp, synthetic construct
  source 1..2226: mol_type = other DNA
atggccttaccagtgaccgccttgctcctgccgctggccttgctgctccacgccgccaggccggacgacatccagttgacccagtcccccagctcactcagcgccagtgtgggggaccgggtgaccattacctgtaaagccagtcagagtgtggactatgagggggatagcttcctgaattggtatcagcagaagcctggcaaagccccaaagctgctgatctacgctgcatctaatctggagtcaggcgtgccttctaggttctccggtagtgggtctgggaccgatttcacattgaccatttcatccctccaacccgaggatttcgctacatattactgtcagcagtccaatgaggaccctctcacctttggccagggcaccaaagttgaaattaagagactcgaggacctgaagaacgtgttcccacctgaggtggccgtgttcgagcctagcgaggccgagatcagccacacccagaaagccaccctcgtgtgcctggctaccggcttctaccccgaccatgtggaactgtcttggtgggtcaacggcaaagaggtgcacagcggcgtgtctaccgacccccagccactgaaagaacagcccgccctgaacgacagccggtactgcctgagcagcagactgagagtgtccgccaccttctggcagaacccccggaaccacttcagatgccaggtgcagttctacggcctgagcgagaacgacgagtggacccaggacagagccaagcccgtgacccagatcgtgtctgccgaagcctggggcagagccgattgcggatcccagagcttcggcctgctggaccccaagctgtgctacctgctggatggcatcctgttcatctacggcgtgatcctgaccgccctgttcctgagagtgaagttcagcagaagcgccgacgcccctgcctaccagcagggacagaaccaactgtacaacgagctgaacctgggcagacgggaagagtacgacgtgctggacaagcggagaggcagggaccctgagatgggcggaaagccccagcggagaaagaacccccaggaaggactgtataacgaactccagaaagacaagatggccgaagcctacagcgagatcggcatgaagggcgagcggagaagaggcaagggccacgatggcctgtaccagggcctgagcaccgccaccaaggacacctatgacgccctgcacatgcaggccctgcctccaagaagggccaagcgatctggatctggagcaacaaacttctcactactcaaacaagcaggtgacgtggaggagaatcccgggcctactagtatggactggatttggcgcatccttttccttgtcggcgctgctaccggcgcgcattccttcgaagaagtccaacttgtggagtctggagggggcctggtgcagcccggcggctctctcagactgtcttgtgcggcaagcggctacaccttcacctcttactggatagaatgggtgaggcaggcacctggaaagggactggagtggattggagagattctgccaggagggggagatacaaattacaatgaaatcttcaaggggcgggccaccttttcagcggataccagcaagaatacagcttacctgcagatgaatagcctccgggcagaagataccgctgtttattattgcacgagacgggtgccaataagactggactattgggggcaagggactcttgtcaccgtcagttcaacgcgtatccagaaccctgatcctgccgtgtaccagctgcgggatagcaagagcagcgacaagagcgtgtgtctgttcaccgacttcgacagccagaccaacgtgtcccagagcaaggactccgacgtgtacatcaccgataagaccgtgctggacatgcggagcatggacttcaagagcaactccgccgtggcctggtccaacaagtccgatttcgcctgcgccaacgccttcaacaacagcattatccccgaggacacattcttcccaagccccgagagcagctgcggtaccatcactcaaggtttggcagtgtcaaccatctcatcattctttccacctggctaccaagtgtccttctgcctggtcatggtgctgctgttcgccgtggataccggcctgtacttcagcgtcaagaccaacatccggtccagcaccagagactggaaggaccacaagttcaagtggcggaaggaccctcaggacaagtaa

SEQ ID NO: 4659 - DNA, 2223 bp, synthetic construct
  source 1..2223: mol_type = other DNA
atggccttaccagtgaccgccttgctcctgccgctggccttgctgctccacgccgccaggccggacgacatccagttgacccagtcccccagctcactcagcgccagtgtgggggaccgggtgaccattacctgtaaagccagtcagagtgtggactatgacggggatagcttcctgaattggtatcagcagaagcctggcaaagccccaaagctgctgatctacgctgcatctaatctggagtcaggcgtgccttccaggttctccggtagtgggtctgggaccgatttcacattgaccatttcatccctccaacccgaggatttcgctacatattactgtcagcagtccaatgaggaccctctcacctttggccagggcaccaaagttgaaattaagagactcgaggacctgaagaacgtgttcccacctgaggtggccgtgttcgagcctagcgaggccgagatcagccacacccagaaagccaccctcgtgtgcctggctaccggcttctaccccgaccatgtggaactgtcttggtgggtcaacggcaaagaggtgcacagcggcgtgtctaccgacccccagccactgaaagaacagcccgccctgaacgacagccggtactgcctgagcagcagactgagagtgtccgccaccttctggcagaacccccggaaccacttcagatgccaggtgcagttctacggcctgagcgagaacgacgagtggacccaggacagagccaagcccgtgacccagatcgtgtctgccgaagcctggggcagagccgattgcggatcccagagcttcggcctgctggaccccaagctgtgctacctgctggatggcatcctgttcatctacggcgtgatcctgaccgccctgttcctgagagtgaagttcagcagaagcgccgacgcccctgcctaccagcagggacagaaccaactgtacaacgagctgaacctgggcagacgggaagagtacgacgtgctggacaagcggagaggcagggaccctgagatgggcggaaagccccagcggagaaagaacccccaggaaggactgtataacgaactccagaaagacaagatggccgaagcctacagcgagatcggcatgaagggcgagcggagaagaggcaagggccacgatggcctgtaccagggcctgagcaccgccaccaaggacacctatgacgccctgcacatgcaggccctgcctccaagaagggccaagcgatctggatctggagcaacaaacttctcactactcaaacaagcaggtgacgtggaggagaatcccgggcctactagtatggactggatttggcgcatccttttccttgtcggcgctgctaccggcgcgcattccttcgaagaagtccaacttgtggagtctggagggggcctggtgcagcccggcggctctctcagactgtcttgtgcggcaagcggctacaccttcacctcttactggatagaatgggtgaggcaggcacctggaaagggactggagtggattggagagattctgccaggagggggagatacaaattacaatgaaatcttcaaggggcgggccaccttttcagcggataccagcaagaatacagcttacctgcagatgaatagcctccgggcagaagataccgctgtttattattgcacgagacgggtgccaataagactggactattgggggcaagggactcttgtcaccgtcagttcaacgcgtatccagaaccctgatcctgccgtgtaccagctgcgggatagcaagagcagcgacaagagcgtgtgtctgttcaccgacttcgacagccagaccaacgtgtcccagagcaaggactccgacgtgtacatcaccgataagaccgtgctggacatgcggagcatggacttcaagagcaactccgccgtggcctggtccaacaagtccgatttcgcctgcgccaacgccttcaacaacagcattatccccgaggacacattcttcccaagccccgagagcagctgcggtaccatcactcaaggtttggcagtgtcaaccatctcatcattctttccacctggctaccaagtgtccttctgcctggtcatggtgctgctgttcgccgtggataccggcctgtacttcagcgtcaagaccaacatccggtccagcaccagagactggaaggaccacaagttcaagtggcggaaggaccctcaggacaag

SEQ ID NO: 4660 - DNA, 2220 bp, synthetic construct
  source 1..2220: mol_type = other DNA
atggccttaccagtgaccgccttgctcctgccgctggccttgctgctccacgccgccaggccggacatccagttgacccagtcccccagctcactcagcgccagtgtgggggaccgggtgaccattacctgtaaagccagtcagagtgtggactatgacggggatagcttcctgaattggtatcagcagaagcctggcaaagccccaaagctgctgatctacgctgcatctaatctggagtcaggcgtgccttccaggttctccggtagtgggtctgggaccgatttcacattgaccatttcatccctccaacccgaggatttcgctacatattactgtcagcagtccaatgaggaccctctcacctttggccagggcaccaaagttgaaattaagagactcgaggacctgaagaacgtgttcccacctgaggtggccgtgttcgagcctagcgaggccgagatcagccacacccagaaagccaccctcgtgtgcctggctaccggcttctaccccgaccatgtggaactgtcttggtgggtcaacggcaaagaggtgcacagcggcgtgtctaccgacccccagccactgaaagaacagcccgccctgaacgacagccggtactgcctgagcagcagactgagagtgtccgccaccttctggcagaacccccggaaccacttcagatgccaggtgcagttctacggcctgagcgagaacgacgagtggacccaggacagagccaagcccgtgacccagatcgtgtctgccgaagcctggggcagagccgattgcggatcccagagcttcggcctgctggaccccaagctgtgctacctgctggatggcatcctgttcatctacggcgtgatcctgaccgccctgttcctgagagtgaagttcagcagaagcgccgacgcccctgcctaccagcagggacagaaccaactgtacaacgagctgaacctgggcagacgggaagagtacgacgtgctggacaagcggagaggcagggaccctgagatgggcggaaagccccagcggagaaagaacccccaggaaggactgtataacgaactccagaaagacaagatggccgaagcctacagcgagatcggcatgaagggcgagcggagaagaggcaagggccacgatggcctgtaccagggcctgagcaccgccaccaaggacacctatgacgccctgcacatgcaggccctgcctccaagaagggccaagcgatctggatctggagcaacaaacttctcactactcaaacaagcaggtgacgtggaggagaatcccgggcctactagtatggactggatttggcgcatccttttccttgtcggcgctgctaccggcgcgcattccttcgaagaagtccaacttgtggagtctggagggggcctggtgcagcccggcggctctctcagactgtcttgtgcggcaagcggctacaccttcacctcttactggatagaatgggtgaggcaggcacctggaaagggactggagtggattggagagattctgccaggagggggagatacaaattacaatgaaatcttcaaggggcgggccaccttttcagcggataccagcaagaatacagcttacctgcagatgaatagcctccgggcagaagataccgctgtttattattgcacgagacgggtgccaataagactggactattgggggcaagggactcttgtcaccgtcagttcaacgcgtatccagaaccctgatcctgccgtgtaccagctgcgggatagcaagagcagcgacaagagcgtgtgtctgttcaccgacttcgacagccagaccaacgtgtcccagagcaaggactccgacgtgtacatcaccgataagaccgtgctggacatgcggagcatggacttcaagagcaactccgccgtggcctggtccaacaagtccgatttcgcctgcgccaacgccttcaacaacagcattatccccgaggacacattcttcccaagccccgagagcagctgcggtaccatcactcaaggtttggcagtgtcaaccatctcatcattctttccacctggctaccaagtgtccttctgcctggtcatggtgctgctgttcgccgtggataccggcctgtacttcagcgtcaagaccaacatccggtccagcaccagagactggaaggaccacaagttcaagtggcggaaggaccctcaggacaag

SEQ ID NO: 4661 - DNA, 2217 bp, synthetic construct
  source 1..2217: mol_type = other DNA
atggccttaccagtgaccgccttgctcctgccgctggccttgctgctccacgccgccaggccggacatcgtgatgacacagagccctgatagcctggccgtgtctctgggagagagagccaccattaactgcaaggccagccagagcgtggactacgagggcgacagcttcctgaactggtatcagcagaagcccggccagcctcctaagctgctgatctacgccgccagcaatctggaaagcggcgtgccaagcagattttccggctctggcagcggcaccgatttcaccctgacaatatccagcctccagcctgaggacgtggccgtgtactactgccagcagagcaatgaggaccctctgacctttggccagggcaccaaggtggaaatcaagctcgaggacctgaagaacgtgttcccacctgaggtggccgtgttcgagcctagcgaggccgagatcagccacacccagaaagccaccctcgtgtgcctggctaccggcttctaccccgaccatgtggaactgtcttggtgggtcaacggcaaagaggtgcacagcggcgtgtctaccgacccccagccactgaaagaacagcccgccctgaacgacagccggtactgcctgagcagcagactgagagtgtccgccaccttctggcagaacccccggaaccacttcagatgccaggtgcagttctacggcctgagcgagaacgacgagtggacccaggacagagccaagcccgtgacccagatcgtgtctgccgaagcctggggcagagccgattgcggatcccagagcttcggcctgctggaccccaagctgtgctacctgctggatggcatcctgttcatctacggcgtgatcctgaccgccctgttcctgagagtgaagttcagcagaagcgccgacgcccctgcctaccagcagggacagaaccaactgtacaacgagctgaacctgggcagacgggaagagtacgacgtgctggacaagcggagaggcagggaccctgagatgggcggaaagccccagcggagaaagaacccccaggaaggactgtataacgaactccagaaagacaagatggccgaagcctacagcgagatcggcatgaagggcgagcggagaagaggcaagggccacgatggcctgtaccagggcctgagcaccgccaccaaggacacctatgacgccctgcacatgcaggccctgcctccaagaagggccaagcgatctggatctggagcaacaaacttctcactactcaaacaagcaggtgacgtggaggagaatcccgggcctactagtatggactggatttggcgcatccttttccttgtcggcgctgctaccggcgcgcattccttcgaagaagtccaacttgtggagtctggagggggcctggtgcagcccggcggctctctcagactgtcttgtgcggcaagcggctacaccttcacctcttactggatagaatgggtgaggcaggcacctggaaagggactggagtggattggagagattctgccaggagggggagatacaaattacaatgaaatcttcaaggggcgggccaccttttcagcggataccagcaagaatacagcttacctgcagatgaatagcctccgggcagaagataccgctgtttattattgcacgagacgggtgccaataagactggactattgggggcaagggactcttgtcaccgtcagttcaacgcgtatccagaaccctgatcctgccgtgtaccagctgcgggatagcaagagcagcgacaagagcgtgtgtctgttcaccgacttcgacagccagaccaacgtgtcccagagcaaggactccgacgtgtacatcaccgataagaccgtgctggacatgcggagcatggacttcaagagcaactccgccgtggcctggtccaacaagtccgatttcgcctgcgccaacgccttcaacaacagcattatccccgaggacacattcttcccaagccccgagagcagctgcggtaccatcactcaaggtttggcagtgtcaaccatctcatcattctttccacctggctaccaagtgtccttctgcctggtcatggtgctgctgttcgccgtggataccggcctgtacttcagcgtcaagaccaacatccggtccagcaccagagactggaaggaccacaagttcaagtggcggaaggaccctcaggacaag

SEQ ID NO: 4662 - DNA, 2217 bp, synthetic construct
  source 1..2217: mol_type = other DNA
atggccttaccagtgaccgccttgctcctgccgctggccttgctgctccacgccgccaggccggacatcgtgatgacacagagccctgatagcctggccgtgtctctgggagagagagccaccattaactgcaaggccagccagagcgtggactacgacggcgacagcttcctgaactggtatcagcagaagcccggccagcctcctaagctgctgatctacgccgccagcaatctggaaagcggcgtgccaagcagattttccggctctggcagcggcaccgatttcaccctgacaatatccagcctccagcctgaggacgtggccgtgtactactgccagcagagcaacgacgaccctctgacctttggacagggcaccaaggtggaaatcaaactcgaggacctgaagaacgtgttcccacctgaggtggccgtgttcgagcctagcgaggccgagatcagccacacccagaaagccaccctcgtgtgcctggctaccggcttctaccccgaccatgtggaactgtcttggtgggtcaacggcaaagaggtgcacagcggcgtgtctaccgacccccagccactgaaagaacagcccgccctgaacgacagccggtactgcctgagcagcagactgagagtgtccgccaccttctggcagaacccccggaaccacttcagatgccaggtgcagttctacggcctgagcgagaacgacgagtggacccaggacagagccaagcccgtgacccagatcgtgtctgccgaagcctggggcagagccgattgcggatcccagagcttcggcctgctggaccccaagctgtgctacctgctggatggcatcctgttcatctacggcgtgatcctgaccgccctgttcctgagagtgaagttcagcagaagcgccgacgcccctgcctaccagcagggacagaaccaactgtacaacgagctgaacctgggcagacgggaagagtacgacgtgctggacaagcggagaggcagggaccctgagatgggcggaaagccccagcggagaaagaacccccaggaaggactgtataacgaactccagaaagacaagatggccgaagcctacagcgagatcggcatgaagggcgagcggagaagaggcaagggccacgatggcctgtaccagggcctgagcaccgccaccaaggacacctatgacgccctgcacatgcaggccctgcctccaagaagggccaagcgatctggatctggagcaacaaacttctcactactcaaacaagcaggtgacgtggaggagaatcccgggcctactagtatggactggatttggcgcatccttttccttgtcggcgctgctaccggcgcgcattccttcgaagaagtccaacttgtggagtctggagggggcctggtgcagcccggcggctctctcagactgtcttgtgcggcaagcggctacaccttcacctcttactggatagaatgggtgaggcaggcacctggaaagggactggagtggattggagagattctgccaggagggggagatacaaattacaatgaaatcttcaaggggcgggccaccttttcagcggataccagcaagaatacagcttacctgcagatgaatagcctccgggcagaagataccgctgtttattattgcacgagacgggtgccaataagactggactattgggggcaagggactcttgtcaccgtcagttcaacgcgtatccagaaccctgatcctgccgtgtaccagctgcgggatagcaagagcagcgacaagagcgtgtgtctgttcaccgacttcgacagccagaccaacgtgtcccagagcaaggactccgacgtgtacatcaccgataagaccgtgctggacatgcggagcatggacttcaagagcaactccgccgtggcctggtccaacaagtccgatttcgcctgcgccaacgccttcaacaacagcattatccccgaggacacattcttcccaagccccgagagcagctgcggtaccatcactcaaggtttggcagtgtcaaccatctcatcattctttccacctggctaccaagtgtccttctgcctggtcatggtgctgctgttcgccgtggataccggcctgtacttcagcgtcaagaccaacatccggtccagcaccagagactggaaggaccacaagttcaagtggcggaaggaccctcaggacaag

SEQ ID NO: 4663 - DNA, 2217 bp, synthetic construct; identical to SEQ ID NO: 4655
  source 1..2217: mol_type = other DNA

SEQ ID NO: 4664 - DNA, 2220 bp, synthetic construct
  source 1..2220: mol_type = other DNA
atggccttaccagtgaccgccttgctcctgccgctggccttgctgctccacgccgccaggccggacgacatccagttgacccagtcccccagctcactcagcgccagtgtgggggaccgggtgaccattacctgtaaagccagtcagagtgtggactatgagggggatagcttcctgaattggtatcagcagaagcctggcaaagccccaaagctgctgatctacgctgcatctaatctggagtcaggcgtgccttctaggttctccggtagtgggtctgggaccgatttcacattgaccatttcatccctccaacccgaggatttcgctacatattactgtcagcagtccaatgaggaccctctcacctttggccagggcaccaaagttgaaattaagagactcgaggacctgaagaacgtgttcccacctgaggtggccgtgttcgagcctagcgaggccgagatcagccacacccagaaagccaccctcgtgtgcctggctaccggcttctaccccgaccatgtggaactgtcttggtgggtcaacggcaaagaggtgcacagcggcgtgtctaccgacccccagccactgaaagaacagcccgccctgaacgacagccggtactgcctgagcagcagactgagagtgtccgccaccttctggcagaacccccggaaccacttcagatgccaggtgcagttctacggcctgagcgagaacgacgagtggacccaggacagagccaagcccgtgacccagatcgtgtctgccgaagcctggggcagagccgattgcggatcccagagcttcggcctgctggaccccaagctgtgctacctgctggatggcatcctgttcatctacggcgtgatcctgaccgccctgttcctgagagtgaagttcagcagaagcgccgacgcccctgcctaccagcagggacagaaccaactgtacaacgagctgaacctgggcagacgggaagagtacgacgtgctggacaagcggagaggcagggaccctgagatgggcggaaagccccagcggagaaagaacccccaggaaggactgtataacgaactccagaaagacaagatggccgaagcctacagcgagatcggcatgaagggcgagcggagaagaggcaagggccacgatggcctgtaccagggcctgagcaccgccaccaaggacacctatgacgccctgcacatgcaggccctgcctccaagaagggccaagcgatctggatctggagcaacaaacttctcactactcaaacaagcaggtgacgtggaggagaatcccgggcctactagtatggactggatttggcgcatccttttccttgtcggcgctgctaccggcgcgcattccttcgaagtccaacttgtggagtctggagggggcctggtgcagcccggcggctctctcagactgtcttgtgcggcaagcggctacaccttcacctcttactggatagaatgggtgaggcaggcacctggaaagggactggagtggattggagagattctgccaggagggggagatacaaattacaatgaaatcttcaaggggcgggccaccttttcagcggataccagcaagaatacagcttacctgcagatgaatagcctccgggcagaagataccgctgtttattattgcacgagacgggtgccaataagactggactattgggggcaagggactcttgtcaccgtcagttcaacgcgtatccagaaccctgatcctgccgtgtaccagctgcgggatagcaagagcagcgacaagagcgtgtgtctgttcaccgacttcgacagccagaccaacgtgtcccagagcaaggactccgacgtgtacatcaccgataagaccgtgctggacatgcggagcatggacttcaagagcaactccgccgtggcctggtccaacaagtccgatttcgcctgcgccaacgccttcaacaacagcattatccccgaggacacattcttcccaagccccgagagcagctgcggtaccatcactcaaggtttggcagtgtcaaccatctcatcattctttccacctggctaccaagtgtccttctgcctggtcatggtgctgctgttcgccgtggataccggcctgtacttcagcgtcaagaccaacatccggtccagcaccagagactggaaggaccacaagttcaagtggcggaaggaccctcaggacaag

SEQ ID NO: 4665 - DNA, 2217 bp, synthetic construct
  source 1..2217: mol_type = other DNA
atggccttaccagtgaccgccttgctcctgccgctggccttgctgctccacgccgccaggccggacatccagttgacccagtcccccagctcactcagcgccagtgtgggggaccgggtgaccattacctgtaaagccagtcagagtgtggactatgagggggatagcttcctgaattggtatcagcagaagcctggcaaagccccaaagctgctgatctacgctgcatctaatctggagtcaggcgtgccttctaggttctccggtagtgggtctgggaccgatttcacattgaccatttcatccctccaacccgaggatttcgctacatattactgtcagcagtccaatgaggaccctctcacctttggccagggcaccaaagttgaaattaagagactcgaggacctgaagaacgtgttcccacctgaggtggccgtgttcgagcctagcgaggccgagatcagccacacccagaaagccaccctcgtgtgcctggctaccggcttctaccccgaccatgtggaactgtcttggtgggtcaacggcaaagaggtgcacagcggcgtgtctaccgacccccagccactgaaagaacagcccgccctgaacgacagccggtactgcctgagcagcagactgagagtgtccgccaccttctggcagaacccccggaaccacttcagatgccaggtgcagttctacggcctgagcgagaacgacgagtggacccaggacagagccaagcccgtgacccagatcgtgtctgccgaagcctggggcagagccgattgcggatcccagagcttcggcctgctggaccccaagctgtgctacctgctggatggcatcctgttcatctacggcgtgatcctgaccgccctgttcctgagagtgaagttcagcagaagcgccgacgcccctgcctaccagcagggacagaaccaactgtacaacgagctgaacctgggcagacgggaagagtacgacgtgctggacaagcggagaggcagggaccctgagatgggcggaaagccccagcggagaaagaacccccaggaaggactgtataacgaactccagaaagacaagatggccgaagcctacagcgagatcggcatgaagggcgagcggagaagaggcaagggccacgatggcctgtaccagggcctgagcaccgccaccaaggacacctatgacgccctgcacatgcaggccctgcctccaagaagggccaagcgatctggatctggagcaacaaacttctcactactcaaacaagcaggtgacgtggaggagaatcccgggcctactagtatggactggatttggcgcatccttttccttgtcggcgctgctaccggcgcgcattccttcgaagtccaacttgtggagtctggagggggcctggtgcagcccggcggctctctcagactgtcttgtgcggcaagcggctacaccttcacctcttactggatagaatgggtgaggcaggcacctggaaagggactggagtggattggagagattctgccaggagggggagatacaaattacaatgaaatcttcaaggggcgggccaccttttcagcggataccagcaagaatacagcttacctgcagatgaatagcctccgggcagaagataccgctgtttattattgcacgagacgggtgccaataagactggactattgggggcaagggactcttgtcaccgtcagttcaacgcgtatccagaaccctgatcctgccgtgtaccagctgcgggatagcaagagcagcgacaagagcgtgtgtctgttcaccgacttcgacagccagaccaacgtgtcccagagcaaggactccgacgtgtacatcaccgataagaccgtgctggacatgcggagcatggacttcaagagcaactccgccgtggcctggtccaacaagtccgatttcgcctgcgccaacgccttcaacaacagcattatccccgaggacacattcttcccaagccccgagagcagctgcggtaccatcactcaaggtttggcagtgtcaaccatctcatcattctttccacctggctaccaagtgtccttctgcctggtcatggtgctgctgttcgccgtggataccggcctgtacttcagcgtcaagaccaacatccggtccagcaccagagactggaaggaccacaagttcaagtggcggaaggaccctcaggacaag

SEQ ID NO: 4666 - DNA, 2223 bp, synthetic construct
  source 1..2223: mol_type = other DNA
atggccttaccagtgaccgccttgctcctgccgctggccttgctgctccacgccgccaggccggacgacatccagttgacccagtcccccagctcactcagcgccagtgtgggggaccgggtgaccattacctgtaaagccagtcagagtgtggactatgagggggatagcttcctgaattggtatcagcagaagcctggcaaagccccaaagctgctgatctacgctgcatctaatctggagtcaggcgtgccttctaggttctccggtagtgggtctgggaccgatttcacattgaccatttcatccctccaacccgaggatttcgctacatattactgtcagcagtccaatgaggaccctctcacctttggccagggcaccaaagttgaaattaagagactcgaggacctgaagaacgtgttcccacctgaggtggccgtgttcgagcctagcgaggccgagatcagccacacccagaaagccaccctcgtgtgcctggctaccggcttctaccccgaccatgtggaactgtcttggtgggtcaacggcaaagaggtgcacagcggcgtgtctaccgacccccagccactgaaagaacagcccgccctgaacgacagccggtactgcctgagcagcagactgagagtgtccgccaccttctggcagaacccccggaaccacttcagatgccaggtgcagttctacggcctgagcgagaacgacgagtggacccaggacagagccaagcccgtgacccagatcgtgtctgccgaagcctggggcagagccgattgcggatcccagagcttcggcctgctggaccccaagctgtgctacctgctggatggcatcctgttcatctacggcgtgatcctgaccgccctgttcctgagagtgaagttcagcagaagcgccgacgcccctgcctaccagcagggacagaaccaactgtacaacgagctgaacctgggcagacgggaagagtacgacgtgctggacaagcggagaggcagggaccctgagatgggcggaaagccccagcggagaaagaacccccaggaaggactgtataacgaactccagaaagacaagatggccgaagcctacagcgagatcggcatgaagggcgagcggagaagaggcaagggccacgatggcctgtaccagggcctgagcaccgccaccaaggacacctatgacgccctgcacatgcaggccctgcctccaagaagggccaagcgatctggatctggagcaacaaacttctcactactcaaacaagcaggtgacgtggaggagaatcccgggcctactagtatggactggatttggcgcatccttttccttgtcggcgctgctaccggcgcgcattccttcgaagtccaacttgtggagtctggagggggcctggtgcagcccggcggctctctcagactgtcttgtgcggcaagcggctacaccttcacctcttactggatagaatgggtgaggcaggcacctggaaagggactggagtggattggagagattctgccaggagggggagatacaaattacaatgaaatcttcaaggggcgggccaccttttcagcggataccagcaagaatacagcttacctgcagatgaatagcctccgggcagaagataccgctgtttattattgcacgagacgggtgccaataagactggactattgggggcaagggactcttgtcaccgtcagttcaacgcgtatccagaaccctgatcctgccgtgtaccagctgcgggatagcaagagcagcgacaagagcgtgtgtctgttcaccgacttcgacagccagaccaacgtgtcccagagcaaggactccgacgtgtacatcaccgataagaccgtgctggacatgcggagcatggacttcaagagcaactccgccgtggcctggtccaacaagtccgatttcgcctgcgccaacgccttcaacaacagcattatccccgaggacacattcttcccaagccccgagagcagctgcggtaccatcactcaaggtttggcagtgtcaaccatctcatcattctttccacctggctaccaagtgtccttctgcctggtcatggtgctgctgttcgccgtggataccggcctgtacttcagcgtcaagaccaacatccggtccagcaccagagactggaaggaccacaagttcaagtggcggaaggaccctcaggacaagtaa

SEQ ID NO: 4667 - DNA, 2220 bp, synthetic construct
  source 1..2220: mol_type = other DNA
atggccttaccagtgaccgccttgctcctgccgctggccttgctgctccacgccgccaggccggacgacatccagttgacccagtcccccagctcactcagcgccagtgtgggggaccgggtgaccattacctgtaaagccagtcagagtgtggactatgacggggatagcttcctgaattggtatcagcagaagcctggcaaagccccaaagctgctgatctacgctgcatctaatctggagtcaggcgtgccttccaggttctccggtagtgggtctgggaccgatttcacattgaccatttcatccctccaacccgaggatttcgctacatattactgtcagcagtccaatgaggaccctctcacctttggccagggcaccaaagttgaaattaagagactcgaggacctgaagaacgtgttcccacctgaggtggccgtgttcgagcctagcgaggccgagatcagccacacccagaaagccaccctcgtgtgcctggctaccggcttctaccccgaccatgtggaactgtcttggtgggtcaacggcaaagaggtgcacagcggcgtgtctaccgacccccagccactgaaagaacagcccgccctgaacgacagccggtactgcctgagcagcagactgagagtgtccgccaccttctggcagaacccccggaaccacttcagatgccaggtgcagttctacggcctgagcgagaacgacgagtggacccaggacagagccaagcccgtgacccagatcgtgtctgccgaagcctggggcagagccgattgcggatcccagagcttcggcctgctggaccccaagctgtgctacctgctggatggcatcctgttcatctacggcgtgatcctgaccgccctgttcctgagagtgaagttcagcagaagcgccgacgcccctgcctaccagcagggacagaaccaactgtacaacgagctgaacctgggcagacgggaagagtacgacgtgctggacaagcggagaggcagggaccctgagatgggcggaaagccccagcggagaaagaacccccaggaaggactgtataacgaactccagaaagacaagatggccgaagcctacagcgagatcggcatgaagggcgagcggagaagaggcaagggccacgatggcctgtaccagggcctgagcaccgccaccaaggacacctatgacgccctgcacatgcaggccctgcctccaagaagggccaagcgatctggatctggagcaacaaacttctcactactcaaacaagcaggtgacgtggaggagaatcccgggcctactagtatggactggatttggcgcatccttttccttgtcggcgctgctaccggcgcgcattccttcgaagtccaacttgtggagtctggagggggcctggtgcagcccggcggctctctcagactgtcttgtgcggcaagcggctacaccttcacctcttactggatagaatgggtgaggcaggcacctggaaagggactggagtggattggagagattctgccaggagggggagatacaaattacaatgaaatcttcaaggggcgggccaccttttcagcggataccagcaagaatacagcttacctgcagatgaatagcctccgggcagaagataccgctgtttattattgcacgagacgggtgccaataagactggactattgggggcaagggactcttgtcaccgtcagttcaacgcgtatccagaaccctgatcctgccgtgtaccagctgcgggatagcaagagcagcgacaagagcgtgtgtctgttcaccgacttcgacagccagaccaacgtgtcccagagcaaggactccgacgtgtacatcaccgataagaccgtgctggacatgcggagcatggacttcaagagcaactccgccgtggcctggtccaacaagtccgatttcgcctgcgccaacgccttcaacaacagcattatccccgaggacacattcttcccaagccccgagagcagctgcggtaccatcactcaaggtttggcagtgtcaaccatctcatcattctttccacctggctaccaagtgtccttctgcctggtcatggtgctgctgttcgccgtggataccggcctgtacttcagcgtcaagaccaacatccggtccagcaccagagactggaaggaccacaagttcaagtggcggaaggaccctcaggacaag

SEQ ID NO: 4668 - DNA, 2217 bp, synthetic construct
  source 1..2217: mol_type = other DNA
atggccttaccagtgaccgccttgctcctgccgctggccttgctgctccacgccgccaggccggacatccagttgacccagtcccccagctcactcagcgccagtgtgggggaccgggtgaccattacctgtaaagccagtcagagtgtggactatgacggggatagcttcctgaattggtatcagcagaagcctggcaaagccccaaagctgctgatctacgctgcatctaatctggagtcaggcgtgccttccaggttctccggtagtgggtctgggaccgatttcacattgaccatttcatccctccaacccgaggatttcgctacatattactgtcagcagtccaatgaggaccctctcacctttggccagggcaccaaagttgaaattaagagactcgaggacctgaagaacgtgttcccacctgaggtggccgtgttcgagcctagcgaggccgagatcagccacacccagaaagccaccctcgtgtgcctggctaccggcttctaccccgaccatgtggaactgtcttggtgggtcaacggcaaagaggtgcacagcggcgtgtctaccgacccccagccactgaaagaacagcccgccctgaacgacagccggtactgcctgagcagcagactgagagtgtccgccaccttctggcagaacccccggaaccacttcagatgccaggtgcagttctacggcctgagcgagaacgacgagtggacccaggacagagccaagcccgtgacccagatcgtgtctgccgaagcctggggcagagccgattgcggatcccagagcttcggcctgctggaccccaagctgtgctacctgctggatggcatcctgttcatctacggcgtgatcctgaccgccctgttcctgagagtgaagttcagcagaagcgccgacgcccctgcctaccagcagggacagaaccaactgtacaacgagctgaacctgggcagacgggaagagtacgacgtgctggacaagcggagaggcagggaccctgagatgggcggaaagccccagcggagaaagaacccccaggaaggactgtataacgaactccagaaagacaagatggccgaagcctacagcgagatcggcatgaagggcgagcggagaagaggcaagggccacgatggcctgtaccagggcctgagcaccgccaccaaggacacctatgacgccctgcacatgcaggccctgcctccaagaagggccaagcgatctggatctggagcaacaaacttctcactactcaaacaagcaggtgacgtggaggagaatcccgggcctactagtatggactggatttggcgcatccttttccttgtcggcgctgctaccggcgcgcattccttcgaagtccaacttgtggagtctggagggggcctggtgcagcccggcggctctctcagactgtcttgtgcggcaagcggctacaccttcacctcttactggatagaatgggtgaggcaggcacctggaaagggactggagtggattggagagattctgccaggagggggagatacaaattacaatgaaatcttcaaggggcgggccaccttttcagcggataccagcaagaatacagcttacctgcagatgaatagcctccgggcagaagataccgctgtttattattgcacgagacgggtgccaataagactggactattgggggcaagggactcttgtcaccgtcagttcaacgcgtatccagaaccctgatcctgccgtgtaccagctgcgggatagcaagagcagcgacaagagcgtgtgtctgttcaccgacttcgacagccagaccaacgtgtcccagagcaaggactccgacgtgtacatcaccgataagaccgtgctggacatgcggagcatggacttcaagagcaactccgccgtggcctggtccaacaagtccgatttcgcctgcgccaacgccttcaacaacagcattatccccgaggacacattcttcccaagccccgagagcagctgcggtaccatcactcaaggtttggcagtgtcaaccatctcatcattctttccacctggctaccaagtgtccttctgcctggtcatggtgctgctgttcgccgtggataccggcctgtacttcagcgtcaagaccaacatccggtccagcaccagagactggaaggaccacaagttcaagtggcggaaggaccctcaggacaag

SEQ ID NO: 4669 - DNA, 2214 bp, synthetic construct
  source 1..2214: mol_type = other DNA
atggccttaccagtgaccgccttgctcctgccgctggccttgctgctccacgccgccaggccggacatcgtgatgacacagagccctgatagcctggccgtgtctctgggagagagagccaccattaactgcaaggccagccagagcgtggactacgagggcgacagcttcctgaactggtatcagcagaagcccggccagcctcctaagctgctgatctacgccgccagcaatctggaaagcggcgtgccaagcagattttccggctctggcagcggcaccgatttcaccctgacaatatccagcctccagcctgaggacgtggccgtgtactactgccagcagagcaatgaggaccctctgacctttggccagggcaccaaggtggaaatcaagctcgaggacctgaagaacgtgttcccacctgaggtggccgtgttcgagcctagcgaggccgagatcagccacacccagaaagccaccctcgtgtgcctggctaccggcttctaccccgaccatgtggaactgtcttggtgggtcaacggcaaagaggtgcacagcggcgtgtctaccgacccccagccactgaaagaacagcccgccctgaacgacagccggtactgcctgagcagcagactgagagtgtccgccaccttctggcagaacccccggaaccacttcagatgccaggtgcagttctacggcctgagcgagaacgacgagtggacccaggacagagccaagcccgtgacccagatcgtgtctgccgaagcctggggcagagccgattgcggatcccagagcttcggcctgctggaccccaagctgtgctacctgctggatggcatcctgttcatctacggcgtgatcctgaccgccctgttcctgagagtgaagttcagcagaagcgccgacgcccctgcctaccagcagggacagaaccaactgtacaacgagctgaacctgggcagacgggaagagtacgacgtgctggacaagcggagaggcagggaccctgagatgggcggaaagccccagcggagaaagaacccccaggaaggactgtataacgaactccagaaagacaagatggccgaagcctacagcgagatcggcatgaagggcgagcggagaagaggcaagggccacgatggcctgtaccagggcctgagcaccgccaccaaggacacctatgacgccctgcacatgcaggccctgcctccaagaagggccaagcgatctggatctggagcaacaaacttctcactactcaaacaagcaggtgacgtggaggagaatcccgggcctactagtatggactggatttggcgcatccttttccttgtcggcgctgctaccggcgcgcattccttcgaagtccaacttgtggagtctggagggggcctggtgcagcccggcggctctctcagactgtcttgtgcggcaagcggctacaccttcacctcttactggatagaatgggtgaggcaggcacctggaaagggactggagtggattggagagattctgccaggagggggagatacaaattacaatgaaatcttcaaggggcgggccaccttttcagcggataccagcaagaatacagcttacctgcagatgaatagcctccgggcagaagataccgctgtttattattgcacgagacgggtgccaataagactggactattgggggcaagggactcttgtcaccgtcagttcaacgcgtatccagaaccctgatcctgccgtgtaccagctgcgggatagcaagagcagcgacaagagcgtgtgtctgttcaccgacttcgacagccagaccaacgtgtcccagagcaaggactccgacgtgtacatcaccgataagaccgtgctggacatgcggagcatggacttcaagagcaactccgccgtggcctggtccaacaagtccgatttcgcctgcgccaacgccttcaacaacagcattatccccgaggacacattcttcccaagccccgagagcagctgcggtaccatcactcaaggtttggcagtgtcaaccatctcatcattctttccacctggctaccaagtgtccttctgcctggtcatggtgctgctgttcgccgtggataccggcctgtacttcagcgtcaagaccaacatccggtccagcaccagagactggaaggaccacaagttcaagtggcggaaggaccctcaggacaag

SEQ ID NO: 4670 - DNA, 2214 bp, synthetic construct
  source 1..2214: mol_type = other DNA
atggccttaccagtgaccgccttgctcctgccgctggccttgctgctccacgccgccaggccggacatcgtgatgacacagagccctgatagcctggccgtgtctctgggagagagagccaccattaactgcaaggccagccagagcgtggactacgacggcgacagcttcctgaactggtatcagcagaagcccggccagcctcctaagctgctgatctacgccgccagcaatctggaaagcggcgtgccaagcagattttccggctctggcagcggcaccgatttcaccctgacaatatccagcctccagcctgaggacgtggccgtgtactactgccagcagagcaacgacgaccctctgacctttggacagggcaccaaggtggaaatcaaactcgaggacctgaagaacgtgttcccacctgaggtggccgtgttcgagcctagcgaggccgagatcagccacacccagaaagccaccctcgtgtgcctggctaccggcttctaccccgaccatgtggaactgtcttggtgggtcaacggcaaagaggtgcacagcggcgtgtctaccgacccccagccactgaaagaacagcccgccctgaacgacagccggtactgcctgagcagcagactgagagtgtccgccaccttctggcagaacccccggaaccacttcagatgccaggtgcagttctacggcctgagcgagaacgacgagtggacccaggacagagccaagcccgtgacccagatcgtgtctgccgaagcctggggcagagccgattgcggatcccagagcttcggcctgctggaccccaagctgtgctacctgctggatggcatcctgttcatctacggcgtgatcctgaccgccctgttcctgagagtgaagttcagcagaagcgccgacgcccctgcctaccagcagggacagaaccaactgtacaacgagctgaacctgggcagacgggaagagtacgacgtgctggacaagcggagaggcagggaccctgagatgggcggaaagccccagcggagaaagaacccccaggaaggactgtataacgaactccagaaagacaagatggccgaagcctacagcgagatcggcatgaagggcgagcggagaagaggcaagggccacgatggcctgtaccagggcctgagcaccgccaccaaggacacctatgacgccctgcacatgcaggccctgcctccaagaagggccaagcgatctggatctggagcaacaaacttctcactactcaaacaagcaggtgacgtggaggagaatcccgggcctactagtatggactggatttggcgcatccttttccttgtcggcgctgctaccggcgcgcattccttcgaagtccaacttgtggagtctggagggggcctggtgcagcccggcggctctctcagactgtcttgtgcggcaagcggctacaccttcacctcttactggatagaatgggtgaggcaggcacctggaaagggactggagtggattggagagattctgccaggagggggagatacaaattacaatgaaatcttcaaggggcgggccaccttttcagcggataccagcaagaatacagcttacctgcagatgaatagcctccgggcagaagataccgctgtttattattgcacgagacgggtgccaataagactggactattgggggcaagggactcttgtcaccgtcagttcaacgcgtatccagaaccctgatcctgccgtgtaccagctgcgggatagcaagagcagcgacaagagcgtgtgtctgttcaccgacttcgacagccagaccaacgtgtcccagagcaaggactccgacgtgtacatcaccgataagaccgtgctggacatgcggagcatggacttcaagagcaactccgccgtggcctggtccaacaagtccgatttcgcctgcgccaacgccttcaacaacagcattatccccgaggacacattcttcccaagccccgagagcagctgcggtaccatcactcaaggtttggcagtgtcaaccatctcatcattctttccacctggctaccaagtgtccttctgcctggtcatggtgctgctgttcgccgtggataccggcctgtacttcagcgtcaagaccaacatccggtccagcaccagagactggaaggaccacaagttcaagtggcggaaggaccctcaggacaag

SEQ ID NO: 4671 - DNA, 2214 bp, synthetic construct
  source 1..2214: mol_type = other DNA
atggccttaccagtgaccgccttgctcctgccgctggccttgctgctccacgccgccaggccggacatcgtgatgacacagagccctgatagcctggccgtgtctctgggagagagagccaccattaactgcaaggccagccagagcgtggactacgacggcgacagcttcctgaactggtatcagcagaagcccggccagcctcctaagctgctgatctacgccgccagcaatctggaaagcggcgtgccaagcagattttccggctctggcagcggcaccgatttcaccctgacaatatccagcctccagcctgaggacgtggccgtgtactactgccagcagagcaacgacgaccctctgacctttggacagggcaccaaggtggaaatcaaactcgaggacctgaagaacgtgttcccacctgaggtggccgtgttcgagcctagcgaggccgagatcagccacacccagaaagccaccctcgtgtgcctggctaccggcttctaccccgaccatgtggaactgtcttggtgggtcaacggcaaagaggtgcacagcggcgtgtctaccgacccccagccactgaaagaacagcccgccctgaacgacagccggtactgcctgagcagcagactgagagtgtccgccaccttctggcagaacccccggaaccacttcagatgccaggtgcagttctacggcctgagcgagaacgacgagtggacccaggacagagccaagcccgtgacccagatcgtgtctgccgaagcctggggcagagccgattgcggatcccagagcttcggcctgctggaccccaagctgtgctacctgctggatggcatcctgttcatctacggcgtgatcctgaccgccctgttcctgagagtgaagttcagcagaagcgccgacgcccctgcctaccagcagggacagaaccaactgtacaacgagctgaacctgggcagacgggaagagtacgacgtgctggacaagcggagaggcagggaccctgagatgggcggaaagccccagcggagaaagaacccccaggaaggactgtataacgaactccagaaagacaagatggccgaagcctacagcgagatcggcatgaagggcgagcggagaagaggcaagggccacgatggcctgtaccagggcctgagcaccgccaccaaggacacctatgacgccctgcacatgcaggccctgcctccaagaagggccaagcgatctggatctggagcaacaaacttctcactactcaaacaagcaggtgacgtggaggagaatcccgggcctactagtatggactggatttggcgcatccttttccttgtcggcgctgctaccggcgcgcattccttcgaagtccaacttgtggagtctggagggggcctggtgcagcccggcggctctctcagactgtcttgtgcggcaagcggctacaccttcagctcttactggatagaatgggtgaggcaggcacctggaaagggactggagtggattggagagattctgccaggagggggagatacaaattacaatgaaatcttcaaggggcgggccaccttttcagcggataccagcaagaatacagcttacctgcagatgaatagcctccgggcagaagataccgctgtttattattgcacgagacgggtgccaataagactggactattgggggcaagggactcttgtcaccgtcagttcaacgcgtatccagaaccctgatcctgccgtgtaccagctgcgggatagcaagagcagcgacaagagcgtgtgtctgttcaccgacttcgacagccagaccaacgtgtcccagagcaaggactccgacgtgtacatcaccgataagaccgtgctggacatgcggagcatggacttcaagagcaactccgccgtggcctggtccaacaagtccgatttcgcctgcgccaacgccttcaacaacagcattatccccgaggacacattcttcccaagccccgagagcagctgcggtaccatcactcaaggtttggcagtgtcaaccatctcatcattctttccacctggctaccaagtgtccttctgcctggtcatggtgctgctgttcgccgtggataccggcctgtacttcagcgtcaagaccaacatccggtccagcaccagagactggaaggaccacaagttcaagtggcggaaggaccctcaggacaag

SEQ ID NO: 4672 - DNA, 2217 bp, synthetic construct
  source 1..2217: mol_type = other DNA
atggccttaccagtgaccgccttgctcctgccgctggccttgctgctccacgccgccaggccggacgacatccagttgacccagtcccccagctcactcagcgccagtgtgggggaccgggtgaccattacctgtaaagccagtcagagtgtggactatgagggggatagcttcctgaattggtatcagcagaagcctggcaaagccccaaagctgctgatctacgctgcatctaatctggagtcaggcgtgccttctaggttctccggtagtgggtctgggaccgatttcacattgaccatttcatccctccaacccgaggatttcgctacatattactgtcagcagtccaatgaggaccctctcacctttggccagggcaccaaagttgaaattaagagactcgaggacctgaagaacgtgttcccacctgaggtggccgtgttcgagcctagcgaggccgagatcagccacacccagaaagccaccctcgtgtgcctggctaccggcttctaccccgaccatgtggaactgtcttggtgggtcaacggcaaagaggtgcacagcggcgtgtctaccgacccccagccactgaaagaacagcccgccctgaacgacagccggtactgcctgagcagcagactgagagtgtccgccaccttctggcagaacccccggaaccacttcagatgccaggtgcagttctacggcctgagcgagaacgacgagtggacccaggacagagccaagcccgtgacccagatcgtgtctgccgaagcctggggcagagccgattgcggatcccagagcttcggcctgctggaccccaagctgtgctacctgctggatggcatcctgttcatctacggcgtgatcctgaccgccctgttcctgagagtgaagttcagcagaagcgccgacgcccctgcctaccagcagggacagaaccaactgtacaacgagctgaacctgggcagacgggaagagtacgacgtgctggacaagcggagaggcagggaccctgagatgggcggaaagccccggagaaagaacccccaggaaggactgtataacgaactccagaaagacaagatggccgaagcctacagcgagatcggcatgaagggcgagcggagaagaggcaagggccacgatggcctgtaccagggcctgagcaccgccaccaaggacacctatgacgccctgcacatgcaggccctgcctccaagaagggccaagcgatctggatctggagcaacaaacttctcactactcaaacaagcaggtgacgtggaggagaatcccgggcctactagtatggactggatttggcgcatccttttccttgtcggcgctgctaccggcgcgcattccttcgaagtccaacttgtggagtctggagggggcctggtgcagcccggcggctctctcagactgtcttgtgcggcaagcggctacaccttcagctcttactggatagaatgggtgaggcaggcacctggaaagggactggagtggattggagagattctgccaggagggggagatacaaattacaatgaaatcttcaaggggcgggccaccttttcagcggataccagcaagaatacagcttacctgcagatgaatagcctccgggcagaagataccgctgtttattattgcacgagacgggtgccaataagactggactattgggggcaagggactcttgtcaccgtcagttcaacgcgtatccagaaccctgatcctgccgtgtaccagctgcgggatagcaagagcagcgacaagagcgtgtgtctgttcaccgacttcgacagccagaccaacgtgtcccagagcaaggactccgacgtgtacatcaccgataagaccgtgctggacatgcggagcatggacttcaagagcaactccgccgtggcctggtccaacaagtccgatttcgcctgcgccaacgccttcaacaacagcattatccccgaggacacattcttcccaagccccgagagcagctgcggtaccatcactcaaggtttggcagtgtcaaccatctcatcattctttccacctggctaccaagtgtccttctgcctggtcatggtgctgctgttcgccgtggataccggcctgtacttcagcgtcaagaccaacatccggtccagcaccagagactggaaggaccacaagttcaagtggcggaaggaccctcaggacaag

SEQ ID NO: 4673 - DNA, 2214 bp, synthetic construct
  source 1..2214: mol_type = other DNA
atggccttaccagtgaccgccttgctcctgccgctggccttgctgctccacgccgccaggccggacatccagttgacccagtcccccagctcactcagcgccagtgtgggggaccgggtgaccattacctgtaaagccagtcagagtgtggactatgagggggatagcttcctgaattggtatcagcagaagcctggcaaagccccaaagctgctgatctacgctgcatctaatctggagtcaggcgtgccttctaggttctccggtagtgggtctgggaccgatttcacattgaccatttcatccctccaacccgaggatttcgctacatattactgtcagcagtccaatgaggaccctctcacctttggccagggcaccaaagttgaaattaagagactcgaggacctgaagaacgtgttcccacctgaggtggccgtgttcgagcctagcgaggccgagatcagccacacccagaaagccaccctcgtgtgcctggctaccggcttctaccccgaccatgtggaactgtcttggtgggtcaacggcaaagaggtgcacagcggcgtgtctaccgacccccagccactgaaagaacagcccgccctgaacgacagccggtactgcctgagcagcagactgagagtgtccgccaccttctggcagaacccccggaaccacttcagatgccaggtgcagttctacggcctgagcgagaacgacgagtggacccaggacagagccaagcccgtgacccagatcgtgtctgccgaagcctggggcagagccgattgcggatcccagagcttcggcctgctggaccccaagctgtgctacctgctggatggcatcctgttcatctacggcgtgatcctgaccgccctgttcctgagagtgaagttcagcagaagcgccgacgcccctgcctaccagcagggacagaaccaactgtacaacgagctgaacctgggcagacgggaagagtacgacgtgctggacaagcggagaggcagggaccctgagatgggcggaaagccccggagaaagaacccccaggaaggactgtataacgaactccagaaagacaagatggccgaagcctacagcgagatcggcatgaagggcgagcggagaagaggcaagggccacgatggcctgtaccagggcctgagcaccgccaccaaggacacctatgacgccctgcacatgcaggccctgcctccaagaagggccaagcgatctggatctggagcaacaaacttctcactactcaaacaagcaggtgacgtggaggagaatcccgggcctactagtatggactggatttggcgcatccttttccttgtcggcgctgctaccggcgcgcattccttcgaagtccaacttgtggagtctggagggggcctggtgcagcccggcggctctctcagactgtcttgtgcggcaagcggctacaccttcagctcttactggatagaatgggtgaggcaggcacctggaaagggactggagtggattggagagattctgccaggagggggagatacaaattacaatgaaatcttcaaggggcgggccaccttttcagcggataccagcaagaatacagcttacctgcagatgaatagcctccgggcagaagataccgctgtttattattgcacgagacgggtgccaataagactggactattgggggcaagggactcttgtcaccgtcagttcaacgcgtatccagaaccctgatcctgccgtgtaccagctgcgggatagcaagagcagcgacaagagcgtgtgtctgttcaccgacttcgacagccagaccaacgtgtcccagagcaaggactccgacgtgtacatcaccgataagaccgtgctggacatgcggagcatggacttcaagagcaactccgccgtggcctggtccaacaagtccgatttcgcctgcgccaacgccttcaacaacagcattatccccgaggacacattcttcccaagccccgagagcagctgcggtaccatcactcaaggtttggcagtgtcaaccatctcatcattctttccacctggctaccaagtgtccttctgcctggtcatggtgctgctgttcgccgtggataccggcctgtacttcagcgtcaagaccaacatccggtccagcaccagagactggaaggaccacaagttcaagtggcggaaggaccctcaggacaag

SEQ ID NO: 4674 - DNA, 2223 bp, synthetic construct
  source 1..2223: mol_type = other DNA
atggccttaccagtgaccgccttgctcctgccgctggccttgctgctccacgccgccaggccggacgacatccagttgacccagtcccccagctcactcagcgccagtgtgggggaccgggtgaccattacctgtaaagccagtcagagtgtggactatgagggggatagcttcctgaattggtatcagcagaagcctggcaaagccccaaagctgctgatctacgctgcatctaatctggagtcaggcgtgccttctaggttctccggtagtgggtctgggaccgatttcacattgaccatttcatccctccaacccgaggatttcgctacatattactgtcagcagtccaatgaggaccctctcacctttggccagggcaccaaagttgaaattaagagactcgaggacctgaagaacgtgttcccacctgaggtggccgtgttcgagcctagcgaggccgagatcagccacacccagaaagccaccctcgtgtgcctggctaccggcttctaccccgaccatgtggaactgtcttggtgggtcaacggcaaagaggtgcacagcggcgtgtctaccgacccccagccactgaaagaacagcccgccctgaacgacagccggtactgcctgagcagcagactgagagtgtccgccaccttctggcagaacccccggaaccacttcagatgccaggtgcagttctacggcctgagcgagaacgacgagtggacccaggacagagccaagcccgtgacccagatcgtgtctgccgaagcctggggcagagccgattgcggatcccagagcttcggcctgctggaccccaagctgtgctacctgctggatggcatcctgttcatctacggcgtgatcctgaccgccctgttcctgagagtgaagttcagcagaagcgccgacgcccctgcctaccagcagggacagaaccaactgtacaacgagctgaacctgggcagacgggaagagtacgacgtgctggacaagcggagaggcagggaccctgagatgggcggaaagccccggagaaagaacccccaggaaggactgtataacgaactccagaaagacaagatggccgaagcctacagcgagatcggcatgaagggcgagcggagaagaggcaagggccacgatggcctgtaccagggcctgagcaccgccaccaaggacacctatgacgccctgcacatgcaggccctgcctccaagaagggccaagcgatctggatctggagcaacaaacttctcactactcaaacaagcaggtgacgtggaggagaatcccgggcctactagtatggactggatttggcgcatccttttccttgtcggcgctgctaccggcgcgcattccttcgaagaagtccaacttgtggagtctggagggggcctggtgcagcccggcggctctctcagactgtcttgtgcggcaagcggctacaccttcagctcttactggatagaatgggtgaggcaggcacctggaaagggactggagtggattggagagattctgccaggagggggagatacaaattacaatgaaatcttcaaggggcgggccaccttttcagcggataccagcaagaatacagcttacctgcagatgaatagcctccgggcagaagataccgctgtttattattgcacgagacgggtgccaataagactggactattgggggcaagggactcttgtcaccgtcagttcaacgcgtatccagaaccctgatcctgccgtgtaccagctgcgggatagcaagagcagcgacaagagcgtgtgtctgttcaccgacttcgacagccagaccaacgtgtcccagagcaaggactccgacgtgtacatcaccgataagaccgtgctggacatgcggagcatggacttcaagagcaactccgccgtggcctggtccaacaagtccgatttcgcctgcgccaacgccttcaacaacagcattatccccgaggacacattcttcccaagccccgagagcagctgcggtaccatcactcaaggtttggcagtgtcaaccatctcatcattctttccacctggctaccaagtgtccttctgcctggtcatggtgctgctgttcgccgtggataccggcctgtacttcagcgtcaagaccaacatccggtccagcaccagagactggaaggaccacaagttcaagtggcggaaggaccctcaggacaagtaa

SEQ ID NO: 4675 - DNA, 2220 bp, synthetic construct
  source 1..2220: mol_type = other DNA
atggccttaccagtgaccgccttgctcctgccgctggccttgctgctccacgccgccaggccggacatccagttgacccagtcccccagctcactcagcgccagtgtgggggaccgggtgaccattacctgtaaagccagtcagagtgtggactatgagggggatagcttcctgaattggtatcagcagaagcctggcaaagccccaaagctgctgatctacgctgcatctaatctggagtcaggcgtgccttctaggttctccggtagtgggtctgggaccgatttcacattgaccatttcatccctccaacccgaggatttcgctacatattactgtcagcagtccaatgaggaccctctcacctttggccagggcaccaaagttgaaattaagagactcgaggacctgaagaacgtgttcccacctgaggtggccgtgttcgagcctagcgaggccgagatcagccacacccagaaagccaccctcgtgtgcctggctaccggcttctaccccgaccatgtggaactgtcttggtgggtcaacggcaaagaggtgcacagcggcgtgtctaccgacccccagccactgaaagaacagcccgccctgaacgacagccggtactgcctgagcagcagactgagagtgtccgccaccttctggcagaacccccggaaccacttcagatgccaggtgcagttctacggcctgagcgagaacgacgagtggacccaggacagagccaagcccgtgacccagatcgtgtctgccgaagcctggggcagagccgattgcggatcccagagcttcggcctgctggaccccaagctgtgctacctgctggatggcatcctgttcatctacggcgtgatcctgaccgccctgttcctgagagtgaagttcagcagaagcgccgacgcccctgcctaccagcagggacagaaccaactgtacaacgagctgaacctgggcagacgggaagagtacgacgtgctggacaagcggagaggcagggaccctgagatgggcggaaagccccggagaaagaacccccaggaaggactgtataacgaactccagaaagacaagatggccgaagcctacagcgagatcggcatgaagggcgagcggagaagaggcaagggccacgatggcctgtaccagggcctgagcaccgccaccaaggacacctatgacgccctgcacatgcaggccctgcctccaagaagggccaagcgatctggatctggagcaacaaacttctcactactcaaacaagcaggtgacgtggaggagaatcccgggcctactagtatggactggatttggcgcatccttttccttgtcggcgctgctaccggcgcgcattccttcgaagaagtccaacttgtggagtctggagggggcctggtgcagcccggcggctctctcagactgtcttgtgcggcaagcggctacaccttcagctcttactggatagaatgggtgaggcaggcacctggaaagggactggagtggattggagagattctgccaggagggggagatacaaattacaatgaaatcttcaaggggcgggccaccttttcagcggataccagcaagaatacagcttacctgcagatgaatagcctccgggcagaagataccgctgtttattattgcacgagacgggtgccaataagactggactattgggggcaagggactcttgtcaccgtcagttcaacgcgtatccagaaccctgatcctgccgtgtaccagctgcgggatagcaagagcagcgacaagagcgtgtgtctgttcaccgacttcgacagccagaccaacgtgtcccagagcaaggactccgacgtgtacatcaccgataagaccgtgctggacatgcggagcatggacttcaagagcaactccgccgtggcctggtccaacaagtccgatttcgcctgcgccaacgccttcaacaacagcattatccccgaggacacattcttcccaagccccgagagcagctgcggtaccatcactcaaggtttggcagtgtcaaccatctcatcattctttccacctggctaccaagtgtccttctgcctggtcatggtgctgctgttcgccgtggataccggcctgtacttcagcgtcaagaccaacatccggtccagcaccagagactggaaggaccacaagttcaagtggcggaaggaccctcaggacaagtaa

SEQ ID NO: 4676 - DNA, 2220 bp, synthetic construct
  source 1..2220: mol_type = other DNA
atggccttaccagtgaccgccttgctcctgccgctggccttgctgctccacgccgccaggccggacgacatccagttgacccagtcccccagctcactcagcgccagtgtgggggaccgggtgaccattacctgtaaagccagtcagagtgtggactatgacggggatagcttcctgaattggtatcagcagaagcctggcaaagccccaaagctgctgatctacgctgcatctaatctggagtcaggcgtgccttccaggttctccggtagtgggtctgggaccgatttcacattgaccatttcatccctccaacccgaggatttcgctacatattactgtcagcagtccaatgaggaccctctcacctttggccagggcaccaaagttgaaattaagagactcgaggacctgaagaacgtgttcccacctgaggtggccgtgttcgagcctagcgaggccgagatcagccacacccagaaagccaccctcgtgtgcctggctaccggcttctaccccgaccatgtggaactgtcttggtgggtcaacggcaaagaggtgcacagcggcgtgtctaccgacccccagccactgaaagaacagcccgccctgaacgacagccggtactgcctgagcagcagactgagagtgtccgccaccttctggcagaacccccggaaccacttcagatgccaggtgcagttctacggcctgagcgagaacgacgagtggacccaggacagagccaagcccgtgacccagatcgtgtctgccgaagcctggggcagagccgattgcggatcccagagcttcggcctgctggaccccaagctgtgctacctgctggatggcatcctgttcatctacggcgtgatcctgaccgccctgttcctgagagtgaagttcagcagaagcgccgacgcccctgcctaccagcagggacagaaccaactgtacaacgagctgaacctgggcagacgggaagagtacgacgtgctggacaagcggagaggcagggaccctgagatgggcggaaagccccggagaaagaacccccaggaaggactgtataacgaactccagaaagacaagatggccgaagcctacagcgagatcggcatgaagggcgagcggagaagaggcaagggccacgatggcctgtaccagggcctgagcaccgccaccaaggacacctatgacgccctgcacatgcaggccctgcctccaagaagggccaagcgatctggatctggagcaacaaacttctcactactcaaacaagcaggtgacgtggaggagaatcccgggcctactagtatggactggatttggcgcatccttttccttgtcggcgctgctaccggcgcgcattccttcgaagaagtccaacttgtggagtctggagggggcctggtgcagcccggcggctctctcagactgtcttgtgcggcaagcggctacaccttcagctcttactggatagaatgggtgaggcaggcacctggaaagggactggagtggattggagagattctgccaggagggggagatacaaattacaatgaaatcttcaaggggcgggccaccttttcagcggataccagcaagaatacagcttacctgcagatgaatagcctccgggcagaagataccgctgtttattattgcacgagacgggtgccaataagactggactattgggggcaagggactcttgtcaccgtcagttcaacgcgtatccagaaccctgatcctgccgtgtaccagctgcgggatagcaagagcagcgacaagagcgtgtgtctgttcaccgacttcgacagccagaccaacgtgtcccagagcaaggactccgacgtgtacatcaccgataagaccgtgctggacatgcggagcatggacttcaagagcaactccgccgtggcctggtccaacaagtccgatttcgcctgcgccaacgccttcaacaacagcattatccccgaggacacattcttcccaagccccgagagcagctgcggtaccatcactcaaggtttggcagtgtcaaccatctcatcattctttccacctggctaccaagtgtccttctgcctggtcatggtgctgctgttcgccgtggataccggcctgtacttcagcgtcaagaccaacatccggtccagcaccagagactggaaggaccacaagttcaagtggcggaaggaccctcaggacaag

SEQ ID NO: 4677 - DNA, 2217 bp, synthetic construct
  source 1..2217: mol_type = other DNA
atggccttaccagtgaccgccttgctcctgccgctggccttgctgctccacgccgccaggccggacatccagttgacccagtcccccagctcactcagcgccagtgtgggggaccgggtgaccattacctgtaaagccagtcagagtgtggactatgacggggatagcttcctgaattggtatcagcagaagcctggcaaagccccaaagctgctgatctacgctgcatctaatctggagtcaggcgtgccttccaggttctccggtagtgggtctgggaccgatttcacattgaccatttcatccctccaacccgaggatttcgctacatattactgtcagcagtccaatgaggaccctctcacctttggccagggcaccaaagttgaaattaagagactcgaggacctgaagaacgtgttcccacctgaggtggccgtgttcgagcctagcgaggccgagatcagccacacccagaaagccaccctcgtgtgcctggctaccggcttctaccccgaccatgtggaactgtcttggtgggtcaacggcaaagaggtgcacagcggcgtgtctaccgacccccagccactgaaagaacagcccgccctgaacgacagccggtactgcctgagcagcagactgagagtgtccgccaccttctggcagaacccccggaaccacttcagatgccaggtgcagttctacggcctgagcgagaacgacgagtggacccaggacagagccaagcccgtgacccagatcgtgtctgccgaagcctggggcagagccgattgcggatcccagagcttcggcctgctggaccccaagctgtgctacctgctggatggcatcctgttcatctacggcgtgatcctgaccgccctgttcctgagagtgaagttcagcagaagcgccgacgcccctgcctaccagcagggacagaaccaactgtacaacgagctgaacctgggcagacgggaagagtacgacgtgctggacaagcggagaggcagggaccctgagatgggcggaaagccccggagaaagaacccccaggaaggactgtataacgaactccagaaagacaagatggccgaagcctacagcgagatcggcatgaagggcgagcggagaagaggcaagggccacgatggcctgtaccagggcctgagcaccgccaccaaggacacctatgacgccctgcacatgcaggccctgcctccaagaagggccaagcgatctggatctggagcaacaaacttctcactactcaaacaagcaggtgacgtggaggagaatcccgggcctactagtatggactggatttggcgcatccttttccttgtcggcgctgctaccggcgcgcattccttcgaagaagtccaacttgtggagtctggagggggcctggtgcagcccggcggctctctcagactgtcttgtgcggcaagcggctacaccttcagctcttactggatagaatgggtgaggcaggcacctggaaagggactggagtggattggagagattctgccaggagggggagatacaaattacaatgaaatcttcaaggggcgggccaccttttcagcggataccagcaagaatacagcttacctgcagatgaatagcctccgggcagaagataccgctgtttattattgcacgagacgggtgccaataagactggactattgggggcaagggactcttgtcaccgtcagttcaacgcgtatccagaaccctgatcctgccgtgtaccagctgcgggatagcaagagcagcgacaagagcgtgtgtctgttcaccgacttcgacagccagaccaacgtgtcccagagcaaggactccgacgtgtacatcaccgataagaccgtgctggacatgcggagcatggacttcaagagcaactccgccgtggcctggtccaacaagtccgatttcgcctgcgccaacgccttcaacaacagcattatccccgaggacacattcttcccaagccccgagagcagctgcggtaccatcactcaaggtttggcagtgtcaaccatctcatcattctttccacctggctaccaagtgtccttctgcctggtcatggtgctgctgttcgccgtggataccggcctgtacttcagcgtcaagaccaacatccggtccagcaccagagactggaaggaccacaagttcaagtggcggaaggaccctcaggacaag

SEQ ID NO: 4678 - DNA, 2214 bp, synthetic construct
  source 1..2214: mol_type = other DNA
atggccttaccagtgaccgccttgctcctgccgctggccttgctgctccacgccgccaggccggacatcgtgatgacacagagccctgatagcctggccgtgtctctgggagagagagccaccattaactgcaaggccagccagagcgtggactacgagggcgacagcttcctgaactggtatcagcagaagcccggccagcctcctaagctgctgatctacgccgccagcaatctggaaagcggcgtgccaagcagattttccggctctggcagcggcaccgatttcaccctgacaatatccagcctccagcctgaggacgtggccgtgtactactgccagcagagcaatgaggaccctctgacctttggccagggcaccaaggtggaaatcaagctcgaggacctgaagaacgtgttcccacctgaggtggccgtgttcgagcctagcgaggccgagatcagccacacccagaaagccaccctcgtgtgcctggctaccggcttctaccccgaccatgtggaactgtcttggtgggtcaacggcaaagaggtgcacagcggcgtgtctaccgacccccagccactgaaagaacagcccgccctgaacgacagccggtactgcctgagcagcagactgagagtgtccgccaccttctggcagaacccccggaaccacttcagatgccaggtgcagttctacggcctgagcgagaacgacgagtggacccaggacagagccaagcccgtgacccagatcgtgtctgccgaagcctggggcagagccgattgcggatcccagagcttcggcctgctggaccccaagctgtgctacctgctggatggcatcctgttcatctacggcgtgatcctgaccgccctgttcctgagagtgaagttcagcagaagcgccgacgcccctgcctaccagcagggacagaaccaactgtacaacgagctgaacctgggcagacgggaagagtacgacgtgctggacaagcggagaggcagggaccctgagatgggcggaaagccccggagaaagaacccccaggaaggactgtataacgaactccagaaagacaagatggccgaagcctacagcgagatcggcatgaagggcgagcggagaagaggcaagggccacgatggcctgtaccagggcctgagcaccgccaccaaggacacctatgacgccctgcacatgcaggccctgcctccaagaagggccaagcgatctggatctggagcaacaaacttctcactactcaaacaagcaggtgacgtggaggagaatcccgggcctactagtatggactggatttggcgcatccttttccttgtcggcgctgctaccggcgcgcattccttcgaagaagtccaacttgtggagtctggagggggcctggtgcagcccggcggctctctcagactgtcttgtgcggcaagcggctacaccttcagctcttactggatagaatgggtgaggcaggcacctggaaagggactggagtggattggagagattctgccaggagggggagatacaaattacaatgaaatcttcaaggggcgggccaccttttcagcggataccagcaagaatacagcttacctgcagatgaatagcctccgggcagaagataccgctgtttattattgcacgagacgggtgccaataagactggactattgggggcaagggactcttgtcaccgtcagttcaacgcgtatccagaaccctgatcctgccgtgtaccagctgcgggatagcaagagcagcgacaagagcgtgtgtctgttcaccgacttcgacagccagaccaacgtgtcccagagcaaggactccgacgtgtacatcaccgataagaccgtgctggacatgcggagcatggacttcaagagcaactccgccgtggcctggtccaacaagtccgatttcgcctgcgccaacgccttcaacaacagcattatccccgaggacacattcttcccaagccccgagagcagctgcggtaccatcactcaaggtttggcagtgtcaaccatctcatcattctttccacctggctaccaagtgtccttctgcctggtcatggtgctgctgttcgccgtggataccggcctgtacttcagcgtcaagaccaacatccggtccagcaccagagactggaaggaccacaagttcaagtggcggaaggaccctcaggacaag

SEQ ID NO: 4679 - DNA, 2214 bp, synthetic construct
  source 1..2214: mol_type = other DNA
atggccttaccagtgaccgccttgctcctgccgctggccttgctgctccacgccgccaggccggacatcgtgatgacacagagccctgatagcctggccgtgtctctgggagagagagccaccattaactgcaaggccagccagagcgtggactacgacggcgacagcttcctgaactggtatcagcagaagcccggccagcctcctaagctgctgatctacgccgccagcaatctggaaagcggcgtgccaagcagattttccggctctggcagcggcaccgatttcaccctgacaatatccagcctccagcctgaggacgtggccgtgtactactgccagcagagcaacgacgaccctctgacctttggacagggcaccaaggtggaaatcaaactcgaggacctgaagaacgtgttcccacctgaggtggccgtgttcgagcctagcgaggccgagatcagccacacccagaaagccaccctcgtgtgcctggctaccggcttctaccccgaccatgtggaactgtcttggtgggtcaacggcaaagaggtgcacagcggcgtgtctaccgacccccagccactgaaagaacagcccgccctgaacgacagccggtactgcctgagcagcagactgagagtgtccgccaccttctggcagaacccccggaaccacttcagatgccaggtgcagttctacggcctgagcgagaacgacgagtggacccaggacagagccaagcccgtgacccagatcgtgtctgccgaagcctggggcagagccgattgcggatcccagagcttcggcctgctggaccccaagctgtgctacctgctggatggcatcctgttcatctacggcgtgatcctgaccgccctgttcctgagagtgaagttcagcagaagcgccgacgcccctgcctaccagcagggacagaaccaactgtacaacgagctgaacctgggcagacgggaagagtacgacgtgctggacaagcggagaggcagggaccctgagatgggcggaaagccccggagaaagaacccccaggaaggactgtataacgaactccagaaagacaagatggccgaagcctacagcgagatcggcatgaagggcgagcggagaagaggcaagggccacgatggcctgtaccagggcctgagcaccgccaccaaggacacctatgacgccctgcacatgcaggccctgcctccaagaagggccaagcgatctggatctggagcaacaaacttctcactactcaaacaagcaggtgacgtggaggagaatcccgggcctactagtatggactggatttggcgcatccttttccttgtcggcgctgctaccggcgcgcattccttcgaagaagtccaacttgtggagtctggagggggcctggtgcagcccggcggctctctcagactgtcttgtgcggcaagcggctacaccttcagctcttactggatagaatgggtgaggcaggcacctggaaagggactggagtggattggagagattctgccaggagggggagatacaaattacaatgaaatcttcaaggggcgggccaccttttcagcggataccagcaagaatacagcttacctgcagatgaatagcctccgggcagaagataccgctgtttattattgcacgagacgggtgccaataagactggactattgggggcaagggactcttgtcaccgtcagttcaacgcgtatccagaaccctgatcctgccgtgtaccagctgcgggatagcaagagcagcgacaagagcgtgtgtctgttcaccgacttcgacagccagaccaacgtgtcccagagcaaggactccgacgtgtacatcaccgataagaccgtgctggacatgcggagcatggacttcaagagcaactccgccgtggcctggtccaacaagtccgatttcgcctgcgccaacgccttcaacaacagcattatccccgaggacacattcttcccaagccccgagagcagctgcggtaccatcactcaaggtttggcagtgtcaaccatctcatcattctttccacctggctaccaagtgtccttctgcctggtcatggtgctgctgttcgccgtggataccggcctgtacttcagcgtcaagaccaacatccggtccagcaccagagactggaaggaccacaagttcaagtggcggaaggaccctcaggacaag

SEQ ID NO: 4680 - DNA, 2220 bp, synthetic construct
  source 1..2220: mol_type = other DNA
atggccttaccagtgaccgccttgctcctgccgctggccttgctgctccacgccgccaggccggacgacatccagttgacccagtcccccagctcactcagcgccagtgtgggggaccgggtgaccattacctgtaaagccagtcagagtgtggactatgagggggatagcttcctgaattggtatcagcagaagcctggcaaagccccaaagctgctgatctacgctgcatctaatctggagtcaggcgtgccttctaggttctccggtagtgggtctgggaccgatttcacattgaccatttcatccctccaacccgaggatttcgctacatattactgtcagcagtccaatgaggaccctctcacctttggccagggcaccaaagttgaaattaagagactcgaggacctgaagaacgtgttcccacctgaggtggccgtgttcgagcctagcgaggccgagatcagccacacccagaaagccaccctcgtgtgcctggctaccggcttctaccccgaccatgtggaactgtcttggtgggtcaacggcaaagaggtgcacagcggcgtgtctaccgacccccagccactgaaagaacagcccgccctgaacgacagccggtactgcctgagcagcagactgagagtgtccgccaccttctggcagaacccccggaaccacttcagatgccaggtgcagttctacggcctgagcgagaacgacgagtggacccaggacagagccaagcccgtgacccagatcgtgtctgccgaagcctggggcagagccgattgcggatcccagagcttcggcctgctggaccccaagctgtgctacctgctggatggcatcctgttcatctacggcgtgatcctgaccgccctgttcctgagagtgaagttcagcagaagcgccgacgcccctgcctaccagcagggacagaaccaactgtacaacgagctgaacctgggcagacgggaagagtacgacgtgctggacaagcggagaggcagggaccctgagatgggcggaaagccccggagaaagaacccccaggaaggactgtataacgaactccagaaagacaagatggccgaagcctacagcgagatcggcatgaagggcgagcggagaagaggcaagggccacgatggcctgtaccagggcctgagcaccgccaccaaggacacctatgacgccctgcacatgcaggccctgcctccaagaagggccaagcgatctggatctggagcaacaaacttctcactactcaaacaagcaggtgacgtggaggagaatcccgggcctactagtatggactggatttggcgcatccttttccttgtcggcgctgctaccggcgcgcattccttcgaagaagtccaacttgtggagtctggagggggcctggtgcagcccggcggctctctcagactgtcttgtgcggcaagcggctacaccttcacctcttactggatagaatgggtgaggcaggcacctggaaagggactggagtggattggagagattctgccaggagggggagatacaaattacaatgaaatcttcaaggggcgggccaccttttcagcggataccagcaagaatacagcttacctgcagatgaatagcctccgggcagaagataccgctgtttattattgcacgagacgggtgccaataagactggactattgggggcaagggactcttgtcaccgtcagttcaacgcgtatccagaaccctgatcctgccgtgtaccagctgcgggatagcaagagcagcgacaagagcgtgtgtctgttcaccgacttcgacagccagaccaacgtgtcccagagcaaggactccgacgtgtacatcaccgataagaccgtgctggacatgcggagcatggacttcaagagcaactccgccgtggcctggtccaacaagtccgatttcgcctgcgccaacgccttcaacaacagcattatccccgaggacacattcttcccaagccccgagagcagctgcggtaccatcactcaaggtttggcagtgtcaaccatctcatcattctttccacctggctaccaagtgtccttctgcctggtcatggtgctgctgttcgccgtggataccggcctgtacttcagcgtcaagaccaacatccggtccagcaccagagactggaaggaccacaagttcaagtggcggaaggaccctcaggacaag

SEQ ID NO: 4681 - DNA, 2217 bp, synthetic construct
  source 1..2217: mol_type = other DNA
atggccttaccagtgaccgccttgctcctgccgctggccttgctgctccacgccgccaggccggacatccagttgacccagtcccccagctcactcagcgccagtgtgggggaccgggtgaccattacctgtaaagccagtcagagtgtggactatgagggggatagcttcctgaattggtatcagcagaagcctggcaaagccccaaagctgctgatctacgctgcatctaatctggagtcaggcgtgccttctaggttctccggtagtgggtctgggaccgatttcacattgaccatttcatccctccaacccgaggatttcgctacatattactgtcagcagtccaatgaggaccctctcacctttggccagggcaccaaagttgaaattaagagactcgaggacctgaagaacgtgttcccacctgaggtggccgtgttcgagcctagcgaggccgagatcagccacacccagaaagccaccctcgtgtgcctggctaccggcttctaccccgaccatgtggaactgtcttggtgggtcaacggcaaagaggtgcacagcggcgtgtctaccgacccccagccactgaaagaacagcccgccctgaacgacagccggtactgcctgagcagcagactgagagtgtccgccaccttctggcagaacccccggaaccacttcagatgccaggtgcagttctacggcctgagcgagaacgacgagtggacccaggacagagccaagcccgtgacccagatcgtgtctgccgaagcctggggcagagccgattgcggatcccagagcttcggcctgctggaccccaagctgtgctacctgctggatggcatcctgttcatctacggcgtgatcctgaccgccctgttcctgagagtgaagttcagcagaagcgccgacgcccctgcctaccagcagggacagaaccaactgtacaacgagctgaacctgggcagacgggaagagtacgacgtgctggacaagcggagaggcagggaccctgagatgggcggaaagccccggagaaagaacccccaggaaggactgtataacgaactccagaaagacaagatggccgaagcctacagcgagatcggcatgaagggcgagcggagaagaggcaagggccacgatggcctgtaccagggcctgagcaccgccaccaaggacacctatgacgccctgcacatgcaggccctgcctccaagaagggccaagcgatctggatctggagcaacaaacttctcactactcaaacaagcaggtgacgtggaggagaatcccgggcctactagtatggactggatttggcgcatccttttccttgtcggcgctgctaccggcgcgcattccttcgaagaagtccaacttgtggagtctggagggggcctggtgcagcccggcggctctctcagactgtcttgtgcggcaagcggctacaccttcacctcttactggatagaatgggtgaggcaggcacctggaaagggactggagtggattggagagattctgccaggagggggagatacaaattacaatgaaatcttcaaggggcgggccaccttttcagcggataccagcaagaatacagcttacctgcagatgaatagcctccgggcagaagataccgctgtttattattgcacgagacgggtgccaataagactggactattgggggcaagggactcttgtcaccgtcagttcaacgcgtatccagaaccctgatcctgccgtgtaccagctgcgggatagcaagagcagcgacaagagcgtgtgtctgttcaccgacttcgacagccagaccaacgtgtcccagagcaaggactccgacgtgtacatcaccgataagaccgtgctggacatgcggagcatggacttcaagagcaactccgccgtggcctggtccaacaagtccgatttcgcctgcgccaacgccttcaacaacagcattatccccgaggacacattcttcccaagccccgagagcagctgcggtaccatcactcaaggtttggcagtgtcaaccatctcatcattctttccacctggctaccaagtgtccttctgcctggtcatggtgctgctgttcgccgtggataccggcctgtacttcagcgtcaagaccaacatccggtccagcaccagagactggaaggaccacaagttcaagtggcggaaggaccctcaggacaag

SEQ ID NO: 4682 - DNA, 2223 bp, synthetic construct
  source 1..2223: mol_type = other DNA
atggccttaccagtgaccgccttgctcctgccgctggccttgctgctccacgccgccaggccggacgacatccagttgacccagtcccccagctcactcagcgccagtgtgggggaccgggtgaccattacctgtaaagccagtcagagtgtggactatgagggggatagcttcctgaattggtatcagcagaagcctggcaaagccccaaagctgctgatctacgctgcatctaatctggagtcaggcgtgccttctaggttctccggtagtgggtctgggaccgatttcacattgaccatttcatccctccaacccgaggatttcgctacatattactgtcagcagtccaatgaggaccctctcacctttggccagggcaccaaagttgaaattaagagactcgaggacctgaagaacgtgttcccacctgaggtggccgtgttcgagcctagcgaggccgagatcagccacacccagaaagccaccctcgtgtgcctggctaccggcttctaccccgaccatgtggaactgtcttggtgggtcaacggcaaagaggtgcacagcggcgtgtctaccgacccccagccactgaaagaacagcccgccctgaacgacagccggtactgcctgagcagcagactgagagtgtccgccaccttctggcagaacccccggaaccacttcagatgccaggtgcagttctacggcctgagcgagaacgacgagtggacccaggacagagccaagcccgtgacccagatcgtgtctgccgaagcctggggcagagccgattgcggatcccagagcttcggcctgctggaccccaagctgtgctacctgctggatggcatcctgttcatctacggcgtgatcctgaccgccctgttcctgagagtgaagttcagcagaagcgccgacgcccctgcctaccagcagggacagaaccaactgtacaacgagctgaacctgggcagacgggaagagtacgacgtgctggacaagcggagaggcagggaccctgagatgggcggaaagccccggagaaagaacccccaggaaggactgtataacgaactccagaaagacaagatggccgaagcctacagcgagatcggcatgaagggcgagcggagaagaggcaagggccacgatggcctgtaccagggcctgagcaccgccaccaaggacacctatgacgccctgcacatgcaggccctgcctccaagaagggccaagcgatctggatctggagcaacaaacttctcactactcaaacaagcaggtgacgtggaggagaatcccgggcctactagtatggactggatttggcgcatccttttccttgtcggcgctgctaccggcgcgcattccttcgaagaagtccaacttgtggagtctggagggggcctggtgcagcccggcggctctctcagactgtcttgtgcggcaagcggctacaccttcacctcttactggatagaatgggtgaggcaggcacctggaaagggactggagtggattggagagattctgccaggagggggagatacaaattacaatgaaatcttcaaggggcgggccaccttttcagcggataccagcaagaatacagcttacctgcagatgaatagcctccgggcagaagataccgctgtttattattgcacgagacgggtgccaataagactggactattgggggcaagggactcttgtcaccgtcagttcaacgcgtatccagaaccctgatcctgccgtgtaccagctgcgggatagcaagagcagcgacaagagcgtgtgtctgttcaccgacttcgacagccagaccaacgtgtcccagagcaaggactccgacgtgtacatcaccgataagaccgtgctggacatgcggagcatggacttcaagagcaactccgccgtggcctggtccaacaagtccgatttcgcctgcgccaacgccttcaacaacagcattatccccgaggacacattcttcccaagccccgagagcagctgcggtaccatcactcaaggtttggcagtgtcaaccatctcatcattctttccacctggctaccaagtgtccttctgcctggtcatggtgctgctgttcgccgtggataccggcctgtacttcagcgtcaagaccaacatccggtccagcaccagagactggaaggaccacaagttcaagtggcggaaggaccctcaggacaagtaa

SEQ ID NO: 4683 - DNA, 2220 bp, synthetic construct
  source 1..2220: mol_type = other DNA
atggccttaccagtgaccgccttgctcctgccgctggccttgctgctccacgccgccaggccggacgacatccagttgacccagtcccccagctcactcagcgccagtgtgggggaccgggtgaccattacctgtaaagccagtcagagtgtggactatgacggggatagcttcctgaattggtatcagcagaagcctggcaaagccccaaagctgctgatctacgctgcatctaatctggagtcaggcgtgccttccaggttctccggtagtgggtctgggaccgatttcacattgaccatttcatccctccaacccgaggatttcgctacatattactgtcagcagtccaatgaggaccctctcacctttggccagggcaccaaagttgaaattaagagactcgaggacctgaagaacgtgttcccacctgaggtggccgtgttcgagcctagcgaggccgagatcagccacacccagaaagccaccctcgtgtgcctggctaccggcttctaccccgaccatgtggaactgtcttggtgggtcaacggcaaagaggtgcacagcggcgtgtctaccgacccccagccactgaaagaacagcccgccctgaacgacagccggtactgcctgagcagcagactgagagtgtccgccaccttctggcagaacccccggaaccacttcagatgccaggtgcagttctacggcctgagcgagaacgacgagtggacccaggacagagccaagcccgtgacccagatcgtgtctgccgaagcctggggcagagccgattgcggatcccagagcttcggcctgctggaccccaagctgtgctacctgctggatggcatcctgttcatctacggcgtgatcctgaccgccctgttcctgagagtgaagttcagcagaagcgccgacgcccctgcctaccagcagggacagaaccaactgtacaacgagctgaacctgggcagacgggaagagtacgacgtgctggacaagcggagaggcagggaccctgagatgggcggaaagccccggagaaagaacccccaggaaggactgtataacgaactccagaaagacaagatggccgaagcctacagcgagatcggcatgaagggcgagcggagaagaggcaagggccacgatggcctgtaccagggcctgagcaccgccaccaaggacacctatgacgccctgcacatgcaggccctgcctccaagaagggccaagcgatctggatctggagcaacaaacttctcactactcaaacaagcaggtgacgtggaggagaatcccgggcctactagtatggactggatttggcgcatccttttccttgtcggcgctgctaccggcgcgcattccttcgaagaagtccaacttgtggagtctggagggggcctggtgcagcccggcggctctctcagactgtcttgtgcggcaagcggctacaccttcacctcttactggatagaatgggtgaggcaggcacctggaaagggactggagtggattggagagattctgccaggagggggagatacaaattacaatgaaatcttcaaggggcgggccaccttttcagcggataccagcaagaatacagcttacctgcagatgaatagcctccgggcagaagataccgctgtttattattgcacgagacgggtgccaataagactggactattgggggcaagggactcttgtcaccgtcagttcaacgcgtatccagaaccctgatcctgccgtgtaccagctgcgggatagcaagagcagcgacaagagcgtgtgtctgttcaccgacttcgacagccagaccaacgtgtcccagagcaaggactccgacgtgtacatcaccgataagaccgtgctggacatgcggagcatggacttcaagagcaactccgccgtggcctggtccaacaagtccgatttcgcctgcgccaacgccttcaacaacagcattatccccgaggacacattcttcccaagccccgagagcagctgcggtaccatcactcaaggtttggcagtgtcaaccatctcatcattctttccacctggctaccaagtgtccttctgcctggtcatggtgctgctgttcgccgtggataccggcctgtacttcagcgtcaagaccaacatccggtccagcaccagagactggaaggaccacaagttcaagtggcggaaggaccctcaggacaag

SEQ ID NO: 4684 - DNA, 2217 bp, synthetic construct
  source 1..2217: mol_type = other DNA
atggccttaccagtgaccgccttgctcctgccgctggccttgctgctccacgccgccaggccggacatccagttgacccagtcccccagctcactcagcgccagtgtgggggaccgggtgaccattacctgtaaagccagtcagagtgtggactatgacggggatagcttcctgaattggtatcagcagaagcctggcaaagccccaaagctgctgatctacgctgcatctaatctggagtcaggcgtgccttccaggttctccggtagtgggtctgggaccgatttcacattgaccatttcatccctccaacccgaggatttcgctacatattactgtcagcagtccaatgaggaccctctcacctttggccagggcaccaaagttgaaattaagagactcgaggacctgaagaacgtgttcccacctgaggtggccgtgttcgagcctagcgaggccgagatcagccacacccagaaagccaccctcgtgtgcctggctaccggcttctaccccgaccatgtggaactgtcttggtgggtcaacggcaaagaggtgcacagcggcgtgtctaccgacccccagccactgaaagaacagcccgccctgaacgacagccggtactgcctgagcagcagactgagagtgtccgccaccttctggcagaacccccggaaccacttcagatgccaggtgcagttctacggcctgagcgagaacgacgagtggacccaggacagagccaagcccgtgacccagatcgtgtctgccgaagcctggggcagagccgattgcggatcccagagcttcggcctgctggaccccaagctgtgctacctgctggatggcatcctgttcatctacggcgtgatcctgaccgccctgttcctgagagtgaagttcagcagaagcgccgacgcccctgcctaccagcagggacagaaccaactgtacaacgagctgaacctgggcagacgggaagagtacgacgtgctggacaagcggagaggcagggaccctgagatgggcggaaagccccggagaaagaacccccaggaaggactgtataacgaactccagaaagacaagatggccgaagcctacagcgagatcggcatgaagggcgagcggagaagaggcaagggccacgatggcctgtaccagggcctgagcaccgccaccaaggacacctatgacgccctgcacatgcaggccctgcctccaagaagggccaagcgatctggatctggagcaacaaacttctcactactcaaacaagcaggtgacgtggaggagaatcccgggcctactagtatggactggatttggcgcatccttttccttgtcggcgctgctaccggcgcgcattccttcgaagaagtccaacttgtggagtctggagggggcctggtgcagcccggcggctctctcagactgtcttgtgcggcaagcggctacaccttcacctcttactggatagaatgggtgaggcaggcacctggaaagggactggagtggattggagagattctgccaggagggggagatacaaattacaatgaaatcttcaaggggcgggccaccttttcagcggataccagcaagaatacagcttacctgcagatgaatagcctccgggcagaagataccgctgtttattattgcacgagacgggtgccaataagactggactattgggggcaagggactcttgtcaccgtcagttcaacgcgtatccagaaccctgatcctgccgtgtaccagctgcgggatagcaagagcagcgacaagagcgtgtgtctgttcaccgacttcgacagccagaccaacgtgtcccagagcaaggactccgacgtgtacatcaccgataagaccgtgctggacatgcggagcatggacttcaagagcaactccgccgtggcctggtccaacaagtccgatttcgcctgcgccaacgccttcaacaacagcattatccccgaggacacattcttcccaagccccgagagcagctgcggtaccatcactcaaggtttggcagtgtcaaccatctcatcattctttccacctggctaccaagtgtccttctgcctggtcatggtgctgctgttcgccgtggataccggcctgtacttcagcgtcaagaccaacatccggtccagcaccagagactggaaggaccacaagttcaagtggcggaaggaccctcaggacaag

SEQ ID NO: 4685 - DNA, 2214 bp, synthetic construct
  source 1..2214: mol_type = other DNA
atggccttaccagtgaccgccttgctcctgccgctggccttgctgctccacgccgccaggccggacatcgtgatgacacagagccctgatagcctggccgtgtctctgggagagagagccaccattaactgcaaggccagccagagcgtggactacgagggcgacagcttcctgaactggtatcagcagaagcccggccagcctcctaagctgctgatctacgccgccagcaatctggaaagcggcgtgccaagcagattttccggctctggcagcggcaccgatttcaccctgacaatatccagcctccagcctgaggacgtggccgtgtactactgccagcagagcaatgaggaccctctgacctttggccagggcaccaaggtggaaatcaagctcgaggacctgaagaacgtgttcccacctgaggtggccgtgttcgagcctagcgaggccgagatcagccacacccagaaagccaccctcgtgtgcctggctaccggcttctaccccgaccatgtggaactgtcttggtgggtcaacggcaaagaggtgcacagcggcgtgtctaccgacccccagccactgaaagaacagcccgccctgaacgacagccggtactgcctgagcagcagactgagagtgtccgccaccttctggcagaacccccggaaccacttcagatgccaggtgcagttctacggcctgagcgagaacgacgagtggacccaggacagagccaagcccgtgacccagatcgtgtctgccgaagcctggggcagagccgattgcggatcccagagcttcggcctgctggaccccaagctgtgctacctgctggatggcatcctgttcatctacggcgtgatcctgaccgccctgttcctgagagtgaagttcagcagaagcgccgacgcccctgcctaccagcagggacagaaccaactgtacaacgagctgaacctgggcagacgggaagagtacgacgtgctggacaagcggagaggcagggaccctgagatgggcggaaagccccggagaaagaacccccaggaaggactgtataacgaactccagaaagacaagatggccgaagcctacagcgagatcggcatgaagggcgagcggagaagaggcaagggccacgatggcctgtaccagggcctgagcaccgccaccaaggacacctatgacgccctgcacatgcaggccctgcctccaagaagggccaagcgatctggatctggagcaacaaacttctcactactcaaacaagcaggtgacgtggaggagaatcccgggcctactagtatggactggatttggcgcatccttttccttgtcggcgctgctaccggcgcgcattccttcgaagaagtccaacttgtggagtctggagggggcctggtgcagcccggcggctctctcagactgtcttgtgcggcaagcggctacaccttcacctcttactggatagaatgggtgaggcaggcacctggaaagggactggagtggattggagagattctgccaggagggggagatacaaattacaatgaaatcttcaaggggcgggccaccttttcagcggataccagcaagaatacagcttacctgcagatgaatagcctccgggcagaagataccgctgtttattattgcacgagacgggtgccaataagactggactattgggggcaagggactcttgtcaccgtcagttcaacgcgtatccagaaccctgatcctgccgtgtaccagctgcgggatagcaagagcagcgacaagagcgtgtgtctgttcaccgacttcgacagccagaccaacgtgtcccagagcaaggactccgacgtgtacatcaccgataagaccgtgctggacatgcggagcatggacttcaagagcaactccgccgtggcctggtccaacaagtccgatttcgcctgcgccaacgccttcaacaacagcattatccccgaggacacattcttcccaagccccgagagcagctgcggtaccatcactcaaggtttggcagtgtcaaccatctcatcattctttccacctggctaccaagtgtccttctgcctggtcatggtgctgctgttcgccgtggataccggcctgtacttcagcgtcaagaccaacatccggtccagcaccagagactggaaggaccacaagttcaagtggcggaaggaccctcaggacaag

SEQ ID NO: 4686 - DNA, 2214 bp, synthetic construct
  source 1..2214: mol_type = other DNA
atggccttaccagtgaccgccttgctcctgccgctggccttgctgctccacgccgccaggccggacatcgtgatgacacagagccctgatagcctggccgtgtctctgggagagagagccaccattaactgcaaggccagccagagcgtggactacgacggcgacagcttcctgaactggtatcagcagaagcccggccagcctcctaagctgctgatctacgccgccagcaatctggaaagcggcgtgccaagcagattttccggctctggcagcggcaccgatttcaccctgacaatatccagcctccagcctgaggacgtggccgtgtactactgccagcagagcaacgacgaccctctgacctttggacagggcaccaaggtggaaatcaaactcgaggacctgaagaacgtgttcccacctgaggtggccgtgttcgagcctagcgaggccgagatcagccacacccagaaagccaccctcgtgtgcctggctaccggcttctaccccgaccatgtggaactgtcttggtgggtcaacggcaaagaggtgcacagcggcgtgtctaccgacccccagccactgaaagaacagcccgccctgaacgacagccggtactgcctgagcagcagactgagagtgtccgccaccttctggcagaacccccggaaccacttcagatgccaggtgcagttctacggcctgagcgagaacgacgagtggacccaggacagagccaagcccgtgacccagatcgtgtctgccgaagcctggggcagagccgattgcggatcccagagcttcggcctgctggaccccaagctgtgctacctgctggatggcatcctgttcatctacggcgtgatcctgaccgccctgttcctgagagtgaagttcagcagaagcgccgacgcccctgcctaccagcagggacagaaccaactgtacaacgagctgaacctgggcagacgggaagagtacgacgtgctggacaagcggagaggcagggaccctgagatgggcggaaagccccggagaaagaacccccaggaaggactgtataacgaactccagaaagacaagatggccgaagcctacagcgagatcggcatgaagggcgagcggagaagaggcaagggccacgatggcctgtaccagggcctgagcaccgccaccaaggacacctatgacgccctgcacatgcaggccctgcctccaagaagggccaagcgatctggatctggagcaacaaacttctcactactcaaacaagcaggtgacgtggaggagaatcccgggcctactagtatggactggatttggcgcatccttttccttgtcggcgctgctaccggcgcgcattccttcgaagaagtccaacttgtggagtctggagggggcctggtgcagcccggcggctctctcagactgtcttgtgcggcaagcggctacaccttcacctcttactggatagaatgggtgaggcaggcacctggaaagggactggagtggattggagagattctgccaggagggggagatacaaattacaatgaaatcttcaaggggcgggccaccttttcagcggataccagcaagaatacagcttacctgcagatgaatagcctccgggcagaagataccgctgtttattattgcacgagacgggtgccaataagactggactattgggggcaagggactcttgtcaccgtcagttcaacgcgtatccagaaccctgatcctgccgtgtaccagctgcgggatagcaagagcagcgacaagagcgtgtgtctgttcaccgacttcgacagccagaccaacgtgtcccagagcaaggactccgacgtgtacatcaccgataagaccgtgctggacatgcggagcatggacttcaagagcaactccgccgtggcctggtccaacaagtccgatttcgcctgcgccaacgccttcaacaacagcattatccccgaggacacattcttcccaagccccgagagcagctgcggtaccatcactcaaggtttggcagtgtcaaccatctcatcattctttccacctggctaccaagtgtccttctgcctggtcatggtgctgctgttcgccgtggataccggcctgtacttcagcgtcaagaccaacatccggtccagcaccagagactggaaggaccacaagttcaagtggcggaaggaccctcaggacaag

SEQ ID NO: 4687 - DNA, 2214 bp, synthetic construct; identical to SEQ ID NO: 4679
  source 1..2214: mol_type = other DNA

SEQ ID NO: 4688 - DNA, 2217 bp, synthetic construct
  source 1..2217: mol_type = other DNA
atggccttaccagtgaccgccttgctcctgccgctggccttgctgctccacgccgccaggccggacgacatccagttgacccagtcccccagctcactcagcgccagtgtgggggaccgggtgaccattacctgtaaagccagtcagagtgtggactatgagggggatagcttcctgaattggtatcagcagaagcctggcaaagccccaaagctgctgatctacgctgcatctaatctggagtcaggcgtgccttctaggttctccggtagtgggtctgggaccgatttcacattgaccatttcatccctccaacccgaggatttcgctacatattactgtcagcagtccaatgaggaccctctcacctttggccagggcaccaaagttgaaattaagagactcgaggacctgaagaacgtgttcccacctgaggtggccgtgttcgagcctagcgaggccgagatcagccacacccagaaagccaccctcgtgtgcctggctaccggcttctaccccgaccatgtggaactgtcttggtgggtcaacggcaaagaggtgcacagcggcgtgtctaccgacccccagccactgaaagaacagcccgccctgaacgacagccggtactgcctgagcagcagactgagagtgtccgccaccttctggcagaacccccggaaccacttcagatgccaggtgcagttctacggcctgagcgagaacgacgagtggacccaggacagagccaagcccgtgacccagatcgtgtctgccgaagcctggggcagagccgattgcggatcccagagcttcggcctgctggaccccaagctgtgctacctgctggatggcatcctgttcatctacggcgtgatcctgaccgccctgttcctgagagtgaagttcagcagaagcgccgacgcccctgcctaccagcagggacagaaccaactgtacaacgagctgaacctgggcagacgggaagagtacgacgtgctggacaagcggagaggcagggaccctgagatgggcggaaagccccggagaaagaacccccaggaaggactgtataacgaactccagaaagacaagatggccgaagcctacagcgagatcggcatgaagggcgagcggagaagaggcaagggccacgatggcctgtaccagggcctgagcaccgccaccaaggacacctatgacgccctgcacatgcaggccctgcctccaagaagggccaagcgatctggatctggagcaacaaacttctcactactcaaacaagcaggtgacgtggaggagaatcccgggcctactagtatggactggatttggcgcatccttttccttgtcggcgctgctaccggcgcgcattccttcgaagtccaacttgtggagtctggagggggcctggtgcagcccggcggctctctcagactgtcttgtgcggcaagcggctacaccttcacctcttactggatagaatgggtgaggcaggcacctggaaagggactggagtggattggagagattctgccaggagggggagatacaaattacaatgaaatcttcaaggggcgggccaccttttcagcggataccagcaagaatacagcttacctgcagatgaatagcctccgggcagaagataccgctgtttattattgcacgagacgggtgccaataagactggactattgggggcaagggactcttgtcaccgtcagttcaacgcgtatccagaaccctgatcctgccgtgtaccagctgcgggatagcaagagcagcgacaagagcgtgtgtctgttcaccgacttcgacagccagaccaacgtgtcccagagcaaggactccgacgtgtacatcaccgataagaccgtgctggacatgcggagcatggacttcaagagcaactccgccgtggcctggtccaacaagtccgatttcgcctgcgccaacgccttcaacaacagcattatccccgaggacacattcttcccaagccccgagagcagctgcggtaccatcactcaaggtttggcagtgtcaaccatctcatcattctttccacctggctaccaagtgtccttctgcctggtcatggtgctgctgttcgccgtggataccggcctgtacttcagcgtcaagaccaacatccggtccagcaccagagactggaaggaccacaagttcaagtggcggaaggaccctcaggacaag

SEQ ID NO: 4689 - DNA, 2214 bp, synthetic construct
  source 1..2214: mol_type = other DNA
atggccttaccagtgaccgccttgctcctgccgctggccttgctgctccacgccgccaggccggacatccagttgacccagtcccccagctcactcagcgccagtgtgggggaccgggtgaccattacctgtaaagccagtcagagtgtggactatgagggggatagcttcctgaattggtatcagcagaagcctggcaaagccccaaagctgctgatctacgctgcatctaatctggagtcaggcgtgccttctaggttctccggtagtgggtctgggaccgatttcacattgaccatttcatccctccaacccgaggatttcgctacatattactgtcagcagtccaatgaggaccctctcacctttggccagggcaccaaagttgaaattaagagactcgaggacctgaagaacgtgttcccacctgaggtggccgtgttcgagcctagcgaggccgagatcagccacacccagaaagccaccctcgtgtgcctggctaccggcttctaccccgaccatgtggaactgtcttggtgggtcaacggcaaagaggtgcacagcggcgtgtctaccgacccccagccactgaaagaacagcccgccctgaacgacagccggtactgcctgagcagcagactgagagtgtccgccaccttctggcagaacccccggaaccacttcagatgccaggtgcagttctacggcctgagcgagaacgacgagtggacccaggacagagccaagcccgtgacccagatcgtgtctgccgaagcctggggcagagccgattgcggatcccagagcttcggcctgctggaccccaagctgtgctacctgctggatggcatcctgttcatctacggcgtgatcctgaccgccctgttcctgagagtgaagttcagcagaagcgccgacgcccctgcctaccagcagggacagaaccaactgtacaacgagctgaacctgggcagacgggaagagtacgacgtgctggacaagcggagaggcagggaccctgagatgggcggaaagccccggagaaagaacccccaggaaggactgtataacgaactccagaaagacaagatggccgaagcctacagcgagatcggcatgaagggcgagcggagaagaggcaagggccacgatggcctgtaccagggcctgagcaccgccaccaaggacacctatgacgccctgcacatgcaggccctgcctccaagaagggccaagcgatctggatctggagcaacaaacttctcactactcaaacaagcaggtgacgtggaggagaatcccgggcctactagtatggactggatttggcgcatccttttccttgtcggcgctgctaccggcgcgcattccttcgaagtccaacttgtggagtctggagggggcctggtgcagcccggcggctctctcagactgtcttgtgcggcaagcggctacaccttcacctcttactggatagaatgggtgaggcaggcacctggaaagggactggagtggattggagagattctgccaggagggggagatacaaattacaatgaaatcttcaaggggcgggccaccttttcagcggataccagcaagaatacagcttacctgcagatgaatagcctccgggcagaagataccgctgtttattattgcacgagacgggtgccaataagactggactattgggggcaagggactcttgtcaccgtcagttcaacgcgtatccagaaccctgatcctgccgtgtaccagctgcgggatagcaagagcagcgacaagagcgtgtgtctgttcaccgacttcgacagccagaccaacgtgtcccagagcaaggactccgacgtgtacatcaccgataagaccgtgctggacatgcggagcatggacttcaagagcaactccgccgtggcctggtccaacaagtccgatttcgcctgcgccaacgccttcaacaacagcattatccccgaggacacattcttcccaagccccgagagcagctgcggtaccatcactcaaggtttggcagtgtcaaccatctcatcattctttccacctggctaccaagtgtccttctgcctggtcatggtgctgctgttcgccgtggataccggcctgtacttcagcgtcaagaccaacatccggtccagcaccagagactggaaggaccacaagttcaagtggcggaaggaccctcaggacaag

SEQ ID NO: 4690 - DNA, 2220 bp, synthetic construct
  source 1..2220: mol_type = other DNA
atggccttaccagtgaccgccttgctcctgccgctggccttgctgctccacgccgccaggccggacgacatccagttgacccagtcccccagctcactcagcgccagtgtgggggaccgggtgaccattacctgtaaagccagtcagagtgtggactatgagggggatagcttcctgaattggtatcagcagaagcctggcaaagccccaaagctgctgatctacgctgcatctaatctggagtcaggcgtgccttctaggttctccggtagtgggtctgggaccgatttcacattgaccatttcatccctccaacccgaggatttcgctacatattactgtcagcagtccaatgaggaccctctcacctttggccagggcaccaaagttgaaattaagagactcgaggacctgaagaacgtgttcccacctgaggtggccgtgttcgagcctagcgaggccgagatcagccacacccagaaagccaccctcgtgtgcctggctaccggcttctaccccgaccatgtggaactgtcttggtgggtcaacggcaaagaggtgcacagcggcgtgtctaccgacccccagccactgaaagaacagcccgccctgaacgacagccggtactgcctgagcagcagactgagagtgtccgccaccttctggcagaacccccggaaccacttcagatgccaggtgcagttctacggcctgagcgagaacgacgagtggacccaggacagagccaagcccgtgacccagatcgtgtctgccgaagcctggggcagagccgattgcggatcccagagcttcggcctgctggaccccaagctgtgctacctgctggatggcatcctgttcatctacggcgtgatcctgaccgccctgttcctgagagtgaagttcagcagaagcgccgacgcccctgcctaccagcagggacagaaccaactgtacaacgagctgaacctgggcagacgggaagagtacgacgtgctggacaagcggagaggcagggaccctgagatgggcggaaagccccggagaaagaacccccaggaaggactgtataacgaactccagaaagacaagatggccgaagcctacagcgagatcggcatgaagggcgagcggagaagaggcaagggccacgatggcctgtaccagggcctgagcaccgccaccaaggacacctatgacgccctgcacatgcaggccctgcctccaagaagggccaagcgatctggatctggagcaacaaacttctcactactcaaacaagcaggtgacgtggaggagaatcccgggcctactagtatggactggatttggcgcatccttttccttgtcggcgctgctaccggcgcgcattccttcgaagtccaacttgtggagtctggagggggcctggtgcagcccggcggctctctcagactgtcttgtgcggcaagcggctacaccttcacctcttactggatagaatgggtgaggcaggcacctggaaagggactggagtggattggagagattctgccaggagggggagatacaaattacaatgaaatcttcaaggggcgggccaccttttcagcggataccagcaagaatacagcttacctgcagatgaatagcctccgggcagaagataccgctgtttattattgcacgagacgggtgccaataagactggactattgggggcaagggactcttgtcaccgtcagttcaacgcgtatccagaaccctgatcctgccgtgtaccagctgcgggatagcaagagcagcgacaagagcgtgtgtctgttcaccgacttcgacagccagaccaacgtgtcccagagcaaggactccgacgtgtacatcaccgataagaccgtgctggacatgcggagcatggacttcaagagcaactccgccgtggcctggtccaacaagtccgatttcgcctgcgccaacgccttcaacaacagcattatccccgaggacacattcttcccaagccccgagagcagctgcggtaccatcactcaaggtttggcagtgtcaaccatctcatcattctttccacctggctaccaagtgtccttctgcctggtcatggtgctgctgttcgccgtggataccggcctgtacttcagcgtcaagaccaacatccggtccagcaccagagactggaaggaccacaagttcaagtggcggaaggaccctcaggacaagtaa

SEQ ID NO: 4691 - DNA, 2217 bp, synthetic construct
  source 1..2217: mol_type = other DNA
atggccttaccagtgaccgccttgctcctgccgctggccttgctgctccacgccgccaggccggacgacatccagttgacccagtcccccagctcactcagcgccagtgtgggggaccgggtgaccattacctgtaaagccagtcagagtgtggactatgacggggatagcttcctgaattggtatcagcagaagcctggcaaagccccaaagctgctgatctacgctgcatctaatctggagtcaggcgtgccttccaggttctccggtagtgggtctgggaccgatttcacattgaccatttcatccctccaacccgaggatttcgctacatattactgtcagcagtccaatgaggaccctctcacctttggccagggcaccaaagttgaaattaagagactcgaggacctgaagaacgtgttcccacctgaggtggccgtgttcgagcctagcgaggccgagatcagccacacccagaaagccaccctcgtgtgcctggctaccggcttctaccccgaccatgtggaactgtcttggtgggtcaacggcaaagaggtgcacagcggcgtgtctaccgacccccagccactgaaagaacagcccgccctgaacgacagccggtactgcctgagcagcagactgagagtgtccgccaccttctggcagaacccccggaaccacttcagatgccaggtgcagttctacggcctgagcgagaacgacgagtggacccaggacagagccaagcccgtgacccagatcgtgtctgccgaagcctggggcagagccgattgcggatcccagagcttcggcctgctggaccccaagctgtgctacctgctggatggcatcctgttcatctacggcgtgatcctgaccgccctgttcctgagagtgaagttcagcagaagcgccgacgcccctgcctaccagcagggacagaaccaactgtacaacgagctgaacctgggcagacgggaagagtacgacgtgctggacaagcggagaggcagggaccctgagatgggcggaaagccccggagaaagaacccccaggaaggactgtataacgaactccagaaagacaagatggccgaagcctacagcgagatcggcatgaagggcgagcggagaagaggcaagggccacgatggcctgtaccagggcctgagcaccgccaccaaggacacctatgacgccctgcacatgcaggccctgcctccaagaagggccaagcgatctggatctggagcaacaaacttctcactactcaaacaagcaggtgacgtggaggagaatcccgggcctactagtatggactggatttggcgcatccttttccttgtcggcgctgctaccggcgcgcattccttcgaagtccaacttgtggagtctggagggggcctggtgcagcccggcggctctctcagactgtcttgtgcggcaagcggctacaccttcacctcttactggatagaatgggtgaggcaggcacctggaaagggactggagtggattggagagattctgccaggagggggagatacaaattacaatgaaatcttcaaggggcgggccaccttttcagcggataccagcaagaatacagcttacctgcagatgaatagcctccgggcagaagataccgctgtttattattgcacgagacgggtgccaataagactggactattgggggcaagggactcttgtcaccgtcagttcaacgcgtatccagaaccctgatcctgccgtgtaccagctgcgggatagcaagagcagcgacaagagcgtgtgtctgttcaccgacttcgacagccagaccaacgtgtcccagagcaaggactccgacgtgtacatcaccgataagaccgtgctggacatgcggagcatggacttcaagagcaactccgccgtggcctggtccaacaagtccgatttcgcctgcgccaacgccttcaacaacagcattatccccgaggacacattcttcccaagccccgagagcagctgcggtaccatcactcaaggtttggcagtgtcaaccatctcatcattctttccacctggctaccaagtgtccttctgcctggtcatggtgctgctgttcgccgtggataccggcctgtacttcagcgtcaagaccaacatccggtccagcaccagagactggaaggaccacaagttcaagtggcggaaggaccctcaggacaag

SEQ ID NO: 4692 - DNA, 2214 bp, synthetic construct
  source 1..2214: mol_type = other DNA
atggccttaccagtgaccgccttgctcctgccgctggccttgctgctccacgccgccaggccggacatccagttgacccagtcccccagctcactcagcgccagtgtgggggaccgggtgaccattacctgtaaagccagtcagagtgtggactatgacggggatagcttcctgaattggtatcagcagaagcctggcaaagccccaaagctgctgatctacgctgcatctaatctggagtcaggcgtgccttccaggttctccggtagtgggtctgggaccgatttcacattgaccatttcatccctccaacccgaggatttcgctacatattactgtcagcagtccaatgaggaccctctcacctttggccagggcaccaaagttgaaattaagagactcgaggacctgaagaacgtgttcccacctgaggtggccgtgttcgagcctagcgaggccgagatcagccacacccagaaagccaccctcgtgtgcctggctaccggcttctaccccgaccatgtggaactgtcttggtgggtcaacggcaaagaggtgcacagcggcgtgtctaccgacccccagccactgaaagaacagcccgccctgaacgacagccggtactgcctgagcagcagactgagagtgtccgccaccttctggcagaacccccggaaccacttcagatgccaggtgcagttctacggcctgagcgagaacgacgagtggacccaggacagagccaagcccgtgacccagatcgtgtctgccgaagcctggggcagagccgattgcggatcccagagcttcggcctgctggaccccaagctgtgctacctgctggatggcatcctgttcatctacggcgtgatcctgaccgccctgttcctgagagtgaagttcagcagaagcgccgacgcccctgcctaccagcagggacagaaccaactgtacaacgagctgaacctgggcagacgggaagagtacgacgtgctggacaagcggagaggcagggaccctgagatgggcggaaagccccggagaaagaacccccaggaaggactgtataacgaactccagaaagacaagatggccgaagcctacagcgagatcggcatgaagggcgagcggagaagaggcaagggccacgatggcctgtaccagggcctgagcaccgccaccaaggacacctatgacgccctgcacatgcaggccctgcctccaagaagggccaagcgatctggatctggagcaacaaacttctcactactcaaacaagcaggtgacgtggaggagaatcccgggcctactagtatggactggatttggcgcatccttttccttgtcggcgctgctaccggcgcgcattccttcgaagtccaacttgtggagtctggagggggcctggtgcagcccggcggctctctcagactgtcttgtgcggcaagcggctacaccttcacctcttactggatagaatgggtgaggcaggcacctggaaagggactggagtggattggagagattctgccaggagggggagatacaaattacaatgaaatcttcaaggggcgggccaccttttcagcggataccagcaagaatacagcttacctgcagatgaatagcctccgggcagaagataccgctgtttattattgcacgagacgggtgccaataagactggactattgggggcaagggactcttgtcaccgtcagttcaacgcgtatccagaaccctgatcctgccgtgtaccagctgcgggatagcaagagcagcgacaagagcgtgtgtctgttcaccgacttcgacagccagaccaacgtgtcccagagcaaggactccgacgtgtacatcaccgataagaccgtgctggacatgcggagcatggacttcaagagcaactccgccgtggcctggtccaacaagtccgatttcgcctgcgccaacgccttcaacaacagcattatccccgaggacacattcttcccaagccccgagagcagctgcggtaccatcactcaaggtttggcagtgtcaaccatctcatcattctttccacctggctaccaagtgtccttctgcctggtcatggtgctgctgttcgccgtggataccggcctgtacttcagcgtcaagaccaacatccggtccagcaccagagactggaaggaccacaagttcaagtggcggaaggaccctcaggacaag

SEQ ID NO: 4693 - DNA, 2211 bp, synthetic construct
  source 1..2211: mol_type = other DNA
atggccttaccagtgaccgccttgctcctgccgctggccttgctgctccacgccgccaggccggacatcgtgatgacacagagccctgatagcctggccgtgtctctgggagagagagccaccattaactgcaaggccagccagagcgtggactacgagggcgacagcttcctgaactggtatcagcagaagcccggccagcctcctaagctgctgatctacgccgccagcaatctggaaagcggcgtgccaagcagattttccggctctggcagcggcaccgatttcaccctgacaatatccagcctccagcctgaggacgtggccgtgtactactgccagcagagcaatgaggaccctctgacctttggccagggcaccaaggtggaaatcaagctcgaggacctgaagaacgtgttcccacctgaggtggccgtgttcgagcctagcgaggccgagatcagccacacccagaaagccaccctcgtgtgcctggctaccggcttctaccccgaccatgtggaactgtcttggtgggtcaacggcaaagaggtgcacagcggcgtgtctaccgacccccagccactgaaagaacagcccgccctgaacgacagccggtactgcctgagcagcagactgagagtgtccgccaccttctggcagaacccccggaaccacttcagatgccaggtgcagttctacggcctgagcgagaacgacgagtggacccaggacagagccaagcccgtgacccagatcgtgtctgccgaagcctggggcagagccgattgcggatcccagagcttcggcctgctggaccccaagctgtgctacctgctggatggcatcctgttcatctacggcgtgatcctgaccgccctgttcctgagagtgaagttcagcagaagcgccgacgcccctgcctaccagcagggacagaaccaactgtacaacgagctgaacctgggcagacgggaagagtacgacgtgctggacaagcggagaggcagggaccctgagatgggcggaaagccccggagaaagaacccccaggaaggactgtataacgaactccagaaagacaagatggccgaagcctacagcgagatcggcatgaagggcgagcggagaagaggcaagggccacgatggcctgtaccagggcctgagcaccgccaccaaggacacctatgacgccctgcacatgcaggccctgcctccaagaagggccaagcgatctggatctggagcaacaaacttctcactactcaaacaagcaggtgacgtggaggagaatcccgggcctactagtatggactggatttggcgcatccttttccttgtcggcgctgctaccggcgcgcattccttcgaagtccaacttgtggagtctggagggggcctggtgcagcccggcggctctctcagactgtcttgtgcggcaagcggctacaccttcacctcttactggatagaatgggtgaggcaggcacctggaaagggactggagtggattggagagattctgccaggagggggagatacaaattacaatgaaatcttcaaggggcgggccaccttttcagcggataccagcaagaatacagcttacctgcagatgaatagcctccgggcagaagataccgctgtttattattgcacgagacgggtgccaataagactggactattgggggcaagggactcttgtcaccgtcagttcaacgcgtatccagaaccctgatcctgccgtgtaccagctgcgggatagcaagagcagcgacaagagcgtgtgtctgttcaccgacttcgacagccagaccaacgtgtcccagagcaaggactccgacgtgtacatcaccgataagaccgtgctggacatgcggagcatggacttcaagagcaactccgccgtggcctggtccaacaagtccgatttcgcctgcgccaacgccttcaacaacagcattatccccgaggacacattcttcccaagccccgagagcagctgcggtaccatcactcaaggtttggcagtgtcaaccatctcatcattctttccacctggctaccaagtgtccttctgcctggtcatggtgctgctgttcgccgtggataccggcctgtacttcagcgtcaagaccaacatccggtccagcaccagagactggaaggaccacaagttcaagtggcggaaggaccctcaggacaag

SEQ ID NO: 4694 - DNA, 2211 bp, synthetic construct
  source 1..2211: mol_type = other DNA
atggccttaccagtgaccgccttgctcctgccgctggccttgctgctccacgccgccaggccggacatcgtgatgacacagagccctgatagcctggccgtgtctctgggagagagagccaccattaactgcaaggccagccagagcgtggactacgacggcgacagcttcctgaactggtatcagcagaagcccggccagcctcctaagctgctgatctacgccgccagcaatctggaaagcggcgtgccaagcagattttccggctctggcagcggcaccgatttcaccctgacaatatccagcctccagcctgaggacgtggccgtgtactactgccagcagagcaacgacgaccctctgacctttggacagggcaccaaggtggaaatcaaactcgaggacctgaagaacgtgttcccacctgaggtggccgtgttcgagcctagcgaggccgagatcagccacacccagaaagccaccctcgtgtgcctggctaccggcttctaccccgaccatgtggaactgtcttggtgggtcaacggcaaagaggtgcacagcggcgtgtctaccgacccccagccactgaaagaacagcccgccctgaacgacagccggtactgcctgagcagcagactgagagtgtccgccaccttctggcagaacccccggaaccacttcagatgccaggtgcagttctacggcctgagcgagaacgacgagtggacccaggacagagccaagcccgtgacccagatcgtgtctgccgaagcctggggcagagccgattgcggatcccagagcttcggcctgctggaccccaagctgtgctacctgctggatggcatcctgttcatctacggcgtgatcctgaccgccctgttcctgagagtgaagttcagcagaagcgccgacgcccctgcctaccagcagggacagaaccaactgtacaacgagctgaacctgggcagacgggaagagtacgacgtgctggacaagcggagaggcagggaccctgagatgggcggaaagccccggagaaagaacccccaggaaggactgtataacgaactccagaaagacaagatggccgaagcctacagcgagatcggcatgaagggcgagcggagaagaggcaagggccacgatggcctgtaccagggcctgagcaccgccaccaaggacacctatgacgccctgcacatgcaggccctgcctccaagaagggccaagcgatctggatctggagcaacaaacttctcactactcaaacaagcaggtgacgtggaggagaatcccgggcctactagtatggactggatttggcgcatccttttccttgtcggcgctgctaccggcgcgcattccttcgaagtccaacttgtggagtctggagggggcctggtgcagcccggcggctctctcagactgtcttgtgcggcaagcggctacaccttcacctcttactggatagaatgggtgaggcaggcacctggaaagggactggagtggattggagagattctgccaggagggggagatacaaattacaatgaaatcttcaaggggcgggccaccttttcagcggataccagcaagaatacagcttacctgcagatgaatagcctccgggcagaagataccgctgtttattattgcacgagacgggtgccaataagactggactattgggggcaagggactcttgtcaccgtcagttcaacgcgtatccagaaccctgatcctgccgtgtaccagctgcgggatagcaagagcagcgacaagagcgtgtgtctgttcaccgacttcgacagccagaccaacgtgtcccagagcaaggactccgacgtgtacatcaccgataagaccgtgctggacatgcggagcatggacttcaagagcaactccgccgtggcctggtccaacaagtccgatttcgcctgcgccaacgccttcaacaacagcattatccccgaggacacattcttcccaagccccgagagcagctgcggtaccatcactcaaggtttggcagtgtcaaccatctcatcattctttccacctggctaccaagtgtccttctgcctggtcatggtgctgctgttcgccgtggataccggcctgtacttcagcgtcaagaccaacatccggtccagcaccagagactggaaggaccacaagttcaagtggcggaaggaccctcaggacaag

SEQ ID NO: 4695 - DNA, 2211 bp, synthetic construct
  source 1..2211: mol_type = other DNA
atggccttaccagtgaccgccttgctcctgccgctggccttgctgctccacgccgccaggccggacatcgtgatgacacagagccctgatagcctggccgtgtctctgggagagagagccaccattaactgcaaggccagccagagcgtggactacgacggcgacagcttcctgaactggtatcagcagaagcccggccagcctcctaagctgctgatctacgccgccagcaatctggaaagcggcgtgccaagcagattttccggctctggcagcggcaccgatttcaccctgacaatatccagcctccagcctgaggacgtggccgtgtactactgccagcagagcaacgacgaccctctgacctttggacagggcaccaaggtggaaatcaaactcgaggacctgaagaacgtgttcccacctgaggtggccgtgttcgagcctagcgaggccgagatcagccacacccagaaagccaccctcgtgtgcctggctaccggcttctaccccgaccatgtggaactgtcttggtgggtcaacggcaaagaggtgcacagcggcgtgtctaccgacccccagccactgaaagaacagcccgccctgaacgacagccggtactgcctgagcagcagactgagagtgtccgccaccttctggcagaacccccggaaccacttcagatgccaggtgcagttctacggcctgagcgagaacgacgagtggacccaggacagagccaagcccgtgacccagatcgtgtctgccgaagcctggggcagagccgattgcggatcccagagcttcggcctgctggaccccaagctgtgctacctgctggatggcatcctgttcatctacggcgtgatcctgaccgccctgttcctgagagtgaagttcagcagaagcgccgacgcccctgcctaccagcagggacagaaccaactgtacaacgagctgaacctgggcagacgggaagagtacgacgtgctggacaagcggagaggcagggaccctgagatgggcggaaagccccggagaaagaacccccaggaaggactgtataacgaactccagaaagacaagatggccgaagcctacagcgagatcggcatgaagggcgagcggagaagaggcaagggccacgatggcctgtaccagggcctgagcaccgccaccaaggacacctatgacgccctgcacatgcaggccctgcctccaagaagggccaagcgatctggatctggagcaacaaacttctcactactcaaacaagcaggtgacgtggaggagaatcccgggcctactagtatggactggatttggcgcatccttttccttgtcggcgctgctaccggcgcgcattccttcgaagtccaacttgtggagtctggagggggcctggtgcagcccggcggctctctcagactgtcttgtgcggcaagcggctacaccttcagctcttactggatagaatgggtgaggcaggcacctggaaagggactggagtggattggagagattctgccaggagggggagatacaaattacaatgaaatcttcaaggggcgggccaccttttcagcggataccagcaagaatacagcttacctgcagatgaatagcctccgggcagaagataccgctgtttattattgcacgagacgggtgccaataagactggactattgggggcaagggactcttgtcaccgtcagttcaacgcgtatccagaaccctgatcctgccgtgtaccagctgcgggatagcaagagcagcgacaagagcgtgtgtctgttcaccgacttcgacagccagaccaacgtgtcccagagcaaggactccgacgtgtacatcaccgataagaccgtgctggacatgcggagcatggacttcaagagcaactccgccgtggcctggtccaacaagtccgatttcgcctgcgccaacgccttcaacaacagcattatccccgaggacacattcttcccaagccccgagagcagctgcggtaccatcactcaaggtttggcagtgtcaaccatctcatcattctttccacctggctaccaagtgtccttctgcctggtcatggtgctgctgttcgccgtggataccggcctgtacttcagcgtcaagaccaacatccggtccagcaccagagactggaaggaccacaagttcaagtggcggaaggaccctcaggacaag

SEQ ID NO: 4696 - DNA, 2448 bp, synthetic construct
  source 1..2448: mol_type = other DNA
atggccttaccagtgaccgccttgctcctgccgctggccttgctgctccacgccgccaggccggacgacatccagttgacccagtcccccagctcactcagcgccagtgtgggggaccgggtgaccattacctgtaaagccagtcagagtgtggactatgagggggatagcttcctgaattggtatcagcagaagcctggcaaagccccaaagctgctgatctacgctgcatctaatctggagtcaggcgtgccttctaggttctccggtagtgggtctgggaccgatttcacattgaccatttcatccctccaacccgaggatttcgctacatattactgtcagcagtccaatgaggaccctctcacctttggccagggcaccaaagttgaaattaagagactcgaggacctgaagaacgtgttcccacctgaggtggccgtgttcgagcctagcgaggccgagatcagccacacccagaaagccaccctcgtgtgcctggctaccggcttctaccccgaccatgtggaactgtcttggtgggtcaacggcaaagaggtgcacagcggcgtgtctaccgacccccagccactgaaagaacagcccgccctgaacgacagccggtactgcctgagcagcagactgagagtgtccgccaccttctggcagaacccccggaaccacttcagatgccaggtgcagttctacggcctgagcgagaacgacgagtggacccaggacagagccaagcccgtgacccagatcgtgtctgccgaagcctggggcagagccgattgcggatcccagagcttcggcctgctggaccccaagctgtgctacctgctggatggcatcctgttcatctacggcgtgatcctgaccgccctgttcctgagagtgaagttcagcagaagcgccgacgcccctgcctaccagcagggacagaaccaactgtacaacgagctgaacctgggcagacgggaagagtacgacgtgctggacaagcggagaggcagggaccctgagatgggcggaaagccccggagaaagaacccccaggaaggactgtataacgaactccagaaagacaagatggccgaagcctacagcgagatcggcatgaagggcgagcggagaagaggcaagggccacgatggcctgtaccagggcctgagcaccgccaccaaggacacctatgacgccctgcacatgcaggccctgcctccaagaagggccaagcgatctggatctggagcaacaaacttctcactactcaaacaagcaggtgacgtggaggagaatcccgggcctactagtatggactggatttggcgcatccttttccttgtcggcgctgctaccggcgcgcattccttcgaagtccaacttgtggagtctggagggggcctggtgcagcccggcggctctctcagactgtcttgtgcggcaagcggctacaccttcagctcttactggatagaatgggtgaggcaggcacctggaaagggactggagtggattggagagattctgccaggagggggagatacaaattacaatgaaatcttcaaggggcgggccaccttttcagcggataccagcaagaatacagcttacctgcagatgaatagcctccgggcagaagataccgctgtttattattgcacgagacgggtgccaataagactggactattgggggcaagggactcttgtcaccgtcagttcaacgcgtatccagaaccctgatcctgccgtgtaccagctgcgggatagcaagagcagcgacaagagcgtgtgtctgttcaccgacttcgacagccagaccaacgtgtcccagagcaaggactccgacgtgtacatcaccgataagaccgtgctggacatgcggagcatggacttcaagagcaactccgccgtggcctggtccaacaagtccgatttcgcctgcgccaacgccttcaacaacagcattatccccgaggacacattcttcccaagccccgagagcagctgcggtacccagagttttgggttgttggaccctaaattgtgctatctgttggacggaatcctgttcatttacggagtgatcctgaccgcattgttcctgcgggttaagttttccagatccgcagacgcacccgcttaccaacaagggcagaaccaactctacaatgaacttaatttggggcggagggaagagtacgacgttctggacaaaaggaggggacgagatcccgagatgggcggaaagcctcgaaggaagaatccgcaagaggggctttataacgaactccagaaagataaaatggcagaagcctatagtgagattgggatgaagggagaaaggaggaggggtaaaggtcacgatgggttgtaccaaggattgagcacagccactaaagatacctatgatgcgctccacatgcaggccctgccgccaaga

SEQ ID NO: 4697 - DNA, 2445 bp, synthetic construct
  source 1..2445: mol_type = other DNA
atggccttaccagtgaccgccttgctcctgccgctggccttgctgctccacgccgccaggccggacatccagttgacccagtcccccagctcactcagcgccagtgtgggggaccgggtgaccattacctgtaaagccagtcagagtgtggactatgagggggatagcttcctgaattggtatcagcagaagcctggcaaagccccaaagctgctgatctacgctgcatctaatctggagtcaggcgtgccttctaggttctccggtagtgggtctgggaccgatttcacattgaccatttcatccctccaacccgaggatttcgctacatattactgtcagcagtccaatgaggaccctctcacctttggccagggcaccaaagttgaaattaagagactcgaggacctgaagaacgtgttcccacctgaggtggccgtgttcgagcctagcgaggccgagatcagccacacccagaaagccaccctcgtgtgcctggctaccggcttctaccccgaccatgtggaactgtcttggtgggtcaacggcaaagaggtgcacagcggcgtgtctaccgacccccagccactgaaagaacagcccgccctgaacgacagccggtactgcctgagcagcagactgagagtgtccgccaccttctggcagaacccccggaaccacttcagatgccaggtgcagttctacggcctgagcgagaacgacgagtggacccaggacagagccaagcccgtgacccagatcgtgtctgccgaagcctggggcagagccgattgcggatcccagagcttcggcctgctggaccccaagctgtgctacctgctggatggcatcctgttcatctacggcgtgatcctgaccgccctgttcctgagagtgaagttcagcagaagcgccgacgcccctgcctaccagcagggacagaaccaactgtacaacgagctgaacctgggcagacgggaagagtacgacgtgctggacaagcggagaggcagggaccctgagatgggcggaaagccccggagaaagaacccccaggaaggactgtataacgaactccagaaagacaagatggccgaagcctacagcgagatcggcatgaagggcgagcggagaagaggcaagggccacgatggcctgtaccagggcctgagcaccgccaccaaggacacctatgacgccctgcacatgcaggccctgcctccaagaagggccaagcgatctggatctggagcaacaaacttctcactactcaaacaagcaggtgacgtggaggagaatcccgggcctactagtatggactggatttggcgcatccttttccttgtcggcgctgctaccggcgcgcattccttcgaagtccaacttgtggagtctggagggggcctggtgcagcccggcggctctctcagactgtcttgtgcggcaagcggctacaccttcagctcttactggatagaatgggtgaggcaggcacctggaaagggactggagtggattggagagattctgccaggagggggagatacaaattacaatgaaatcttcaaggggcgggccaccttttcagcggataccagcaagaatacagcttacctgcagatgaatagcctccgggcagaagataccgctgtttattattgcacgagacgggtgccaataagactggactattgggggcaagggactcttgtcaccgtcagttcaacgcgtatccagaaccctgatcctgccgtgtaccagctgcgggatagcaagagcagcgacaagagcgtgtgtctgttcaccgacttcgacagccagaccaacgtgtcccagagcaaggactccgacgtgtacatcaccgataagaccgtgctggacatgcggagcatggacttcaagagcaactccgccgtggcctggtccaacaagtccgatttcgcctgcgccaacgccttcaacaacagcattatccccgaggacacattcttcccaagccccgagagcagctgcggtacccagagttttgggttgttggaccctaaattgtgctatctgttggacggaatcctgttcatttacggagtgatcctgaccgcattgttcctgcgggttaagttttccagatccgcagacgcacccgcttaccaacaagggcagaaccaactctacaatgaacttaatttggggcggagggaagagtacgacgttctggacaaaaggaggggacgagatcccgagatgggcggaaagcctcgaaggaagaatccgcaagaggggctttataacgaactccagaaagataaaatggcagaagcctatagtgagattgggatgaagggagaaaggaggaggggtaaaggtcacgatgggttgtaccaaggattgagcacagccactaaagatacctatgatgcgctccacatgcaggccctgccgccaaga

SEQ ID NO: 4698 - DNA, 2454 bp, synthetic construct
  source 1..2454: mol_type = other DNA
atggccttaccagtgaccgccttgctcctgccgctggccttgctgctccacgccgccaggccggacgacatccagttgacccagtcccccagctcactcagcgccagtgtgggggaccgggtgaccattacctgtaaagccagtcagagtgtggactatgagggggatagcttcctgaattggtatcagcagaagcctggcaaagccccaaagctgctgatctacgctgcatctaatctggagtcaggcgtgccttctaggttctccggtagtgggtctgggaccgatttcacattgaccatttcatccctccaacccgaggatttcgctacatattactgtcagcagtccaatgaggaccctctcacctttggccagggcaccaaagttgaaattaagagactcgaggacctgaagaacgtgttcccacctgaggtggccgtgttcgagcctagcgaggccgagatcagccacacccagaaagccaccctcgtgtgcctggctaccggcttctaccccgaccatgtggaactgtcttggtgggtcaacggcaaagaggtgcacagcggcgtgtctaccgacccccagccactgaaagaacagcccgccctgaacgacagccggtactgcctgagcagcagactgagagtgtccgccaccttctggcagaacccccggaaccacttcagatgccaggtgcagttctacggcctgagcgagaacgacgagtggacccaggacagagccaagcccgtgacccagatcgtgtctgccgaagcctggggcagagccgattgcggatcccagagcttcggcctgctggaccccaagctgtgctacctgctggatggcatcctgttcatctacggcgtgatcctgaccgccctgttcctgagagtgaagttcagcagaagcgccgacgcccctgcctaccagcagggacagaaccaactgtacaacgagctgaacctgggcagacgggaagagtacgacgtgctggacaagcggagaggcagggaccctgagatgggcggaaagccccggagaaagaacccccaggaaggactgtataacgaactccagaaagacaagatggccgaagcctacagcgagatcggcatgaagggcgagcggagaagaggcaagggccacgatggcctgtaccagggcctgagcaccgccaccaaggacacctatgacgccctgcacatgcaggccctgcctccaagaagggccaagcgatctggatctggagcaacaaacttctcactactcaaacaagcaggtgacgtggaggagaatcccgggcctactagtatggactggatttggcgcatccttttccttgtcggcgctgctaccggcgcgcattccttcgaagaagtccaacttgtggagtctggagggggcctggtgcagcccggcggctctctcagactgtcttgtgcggcaagcggctacaccttcagctcttactggatagaatgggtgaggcaggcacctggaaagggactggagtggattggagagattctgccaggagggggagatacaaattacaatgaaatcttcaaggggcgggccaccttttcagcggataccagcaagaatacagcttacctgcagatgaatagcctccgggcagaagataccgctgtttattattgcacgagacgggtgccaataagactggactattgggggcaagggactcttgtcaccgtcagttcaacgcgtatccagaaccctgatcctgccgtgtaccagctgcgggatagcaagagcagcgacaagagcgtgtgtctgttcaccgacttcgacagccagaccaacgtgtcccagagcaaggactccgacgtgtacatcaccgataagaccgtgctggacatgcggagcatggacttcaagagcaactccgccgtggcctggtccaacaagtccgatttcgcctgcgccaacgccttcaacaacagcattatccccgaggacacattcttcccaagccccgagagcagctgcggtacccagagttttgggttgttggaccctaaattgtgctatctgttggacggaatcctgttcatttacggagtgatcctgaccgcattgttcctgcgggttaagttttccagatccgcagacgcacccgcttaccaacaagggcagaaccaactctacaatgaacttaatttggggcggagggaagagtacgacgttctggacaaaaggaggggacgagatcccgagatgggcggaaagcctcgaaggaagaatccgcaagaggggctttataacgaactccagaaagataaaatggcagaagcctatagtgagattgggatgaagggagaaaggaggaggggtaaaggtcacgatgggttgtaccaaggattgagcacagccactaaagatacctatgatgcgctccacatgcaggccctgccgccaagataa

SEQ ID NO: 4699 - DNA, 2451 bp, synthetic construct
  source 1..2451: mol_type = other DNA
atggccttaccagtgaccgccttgctcctgccgctggccttgctgctccacgccgccaggccggacatccagttgacccagtcccccagctcactcagcgccagtgtgggggaccgggtgaccattacctgtaaagccagtcagagtgtggactatgagggggatagcttcctgaattggtatcagcagaagcctggcaaagccccaaagctgctgatctacgctgcatctaatctggagtcaggcgtgccttctaggttctccggtagtgggtctgggaccgatttcacattgaccatttcatccctccaacccgaggatttcgctacatattactgtcagcagtccaatgaggaccctctcacctttggccagggcaccaaagttgaaattaagagactcgaggacctgaagaacgtgttcccacctgaggtggccgtgttcgagcctagcgaggccgagatcagccacacccagaaagccaccctcgtgtgcctggctaccggcttctaccccgaccatgtggaactgtcttggtgggtcaacggcaaagaggtgcacagcggcgtgtctaccgacccccagccactgaaagaacagcccgccctgaacgacagccggtactgcctgagcagcagactgagagtgtccgccaccttctggcagaacccccggaaccacttcagatgccaggtgcagttctacggcctgagcgagaacgacgagtggacccaggacagagccaagcccgtgacccagatcgtgtctgccgaagcctggggcagagccgattgcggatcccagagcttcggcctgctggaccccaagctgtgctacctgctggatggcatcctgttcatctacggcgtgatcctgaccgccctgttcctgagagtgaagttcagcagaagcgccgacgcccctgcctaccagcagggacagaaccaactgtacaacgagctgaacctgggcagacgggaagagtacgacgtgctggacaagcggagaggcagggaccctgagatgggcggaaagccccggagaaagaacccccaggaaggactgtataacgaactccagaaagacaagatggccgaagcctacagcgagatcggcatgaagggcgagcggagaagaggcaagggccacgatggcctgtaccagggcctgagcaccgccaccaaggacacctatgacgccctgcacatgcaggccctgcctccaagaagggccaagcgatctggatctggagcaacaaacttctcactactcaaacaagcaggtgacgtggaggagaatcccgggcctactagtatggactggatttggcgcatccttttccttgtcggcgctgctaccggcgcgcattccttcgaagaagtccaacttgtggagtctggagggggcctggtgcagcccggcggctctctcagactgtcttgtgcggcaagcggctacaccttcagctcttactggatagaatgggtgaggcaggcacctggaaagggactggagtggattggagagattctgccaggagggggagatacaaattacaatgaaatcttcaaggggcgggccaccttttcagcggataccagcaagaatacagcttacctgcagatgaatagcctccgggcagaagataccgctgtttattattgcacgagacgggtgccaataagactggactattgggggcaagggactcttgtcaccgtcagttcaacgcgtatccagaaccctgatcctgccgtgtaccagctgcgggatagcaagagcagcgacaagagcgtgtgtctgttcaccgacttcgacagccagaccaacgtgtcccagagcaaggactccgacgtgtacatcaccgataagaccgtgctggacatgcggagcatggacttcaagagcaactccgccgtggcctggtccaacaagtccgatttcgcctgcgccaacgccttcaacaacagcattatccccgaggacacattcttcccaagccccgagagcagctgcggtacccagagttttgggttgttggaccctaaattgtgctatctgttggacggaatcctgttcatttacggagtgatcctgaccgcattgttcctgcgggttaagttttccagatccgcagacgcacccgcttaccaacaagggcagaaccaactctacaatgaacttaatttggggcggagggaagagtacgacgttctggacaaaaggaggggacgagatcccgagatgggcggaaagcctcgaaggaagaatccgcaagaggggctttataacgaactccagaaagataaaatggcagaagcctatagtgagattgggatgaagggagaaaggaggaggggtaaaggtcacgatgggttgtaccaaggattgagcacagccactaaagatacctatgatgcgctccacatgcaggccctgccgccaagataa

SEQ ID NO: 4700 - DNA, 2451 bp, synthetic construct
  source 1..2451: mol_type = other DNA
atggccttaccagtgaccgccttgctcctgccgctggccttgctgctccacgccgccaggccggacgacatccagttgacccagtcccccagctcactcagcgccagtgtgggggaccgggtgaccattacctgtaaagccagtcagagtgtggactatgacggggatagcttcctgaattggtatcagcagaagcctggcaaagccccaaagctgctgatctacgctgcatctaatctggagtcaggcgtgccttccaggttctccggtagtgggtctgggaccgatttcacattgaccatttcatccctccaacccgaggatttcgctacatattactgtcagcagtccaatgaggaccctctcacctttggccagggcaccaaagttgaaattaagagactcgaggacctgaagaacgtgttcccacctgaggtggccgtgttcgagcctagcgaggccgagatcagccacacccagaaagccaccctcgtgtgcctggctaccggcttctaccccgaccatgtggaactgtcttggtgggtcaacggcaaagaggtgcacagcggcgtgtctaccgacccccagccactgaaagaacagcccgccctgaacgacagccggtactgcctgagcagcagactgagagtgtccgccaccttctggcagaacccccggaaccacttcagatgccaggtgcagttctacggcctgagcgagaacgacgagtggacccaggacagagccaagcccgtgacccagatcgtgtctgccgaagcctggggcagagccgattgcggatcccagagcttcggcctgctggaccccaagctgtgctacctgctggatggcatcctgttcatctacggcgtgatcctgaccgccctgttcctgagagtgaagttcagcagaagcgccgacgcccctgcctaccagcagggacagaaccaactgtacaacgagctgaacctgggcagacgggaagagtacgacgtgctggacaagcggagaggcagggaccctgagatgggcggaaagccccggagaaagaacccccaggaaggactgtataacgaactccagaaagacaagatggccgaagcctacagcgagatcggcatgaagggcgagcggagaagaggcaagggccacgatggcctgtaccagggcctgagcaccgccaccaaggacacctatgacgccctgcacatgcaggccctgcctccaagaagggccaagcgatctggatctggagcaacaaacttctcactactcaaacaagcaggtgacgtggaggagaatcccgggcctactagtatggactggatttggcgcatccttttccttgtcggcgctgctaccggcgcgcattccttcgaagaagtccaacttgtggagtctggagggggcctggtgcagcccggcggctctctcagactgtcttgtgcggcaagcggctacaccttcagctcttactggatagaatgggtgaggcaggcacctggaaagggactggagtggattggagagattctgccaggagggggagatacaaattacaatgaaatcttcaaggggcgggccaccttttcagcggataccagcaagaatacagcttacctgcagatgaatagcctccgggcagaagataccgctgtttattattgcacgagacgggtgccaataagactggactattgggggcaagggactcttgtcaccgtcagttcaacgcgtatccagaaccctgatcctgccgtgtaccagctgcgggatagcaagagcagcgacaagagcgtgtgtctgttcaccgacttcgacagccagaccaacgtgtcccagagcaaggactccgacgtgtacatcaccgataagaccgtgctggacatgcggagcatggacttcaagagcaactccgccgtggcctggtccaacaagtccgatttcgcctgcgccaacgccttcaacaacagcattatccccgaggacacattcttcccaagccccgagagcagctgcggtacccagagttttgggttgttggaccctaaattgtgctatctgttggacggaatcctgttcatttacggagtgatcctgaccgcattgttcctgcgggttaagttttccagatccgcagacgcacccgcttaccaacaagggcagaaccaactctacaatgaacttaatttggggcggagggaagagtacgacgttctggacaaaaggaggggacgagatcccgagatgggcggaaagcctcgaaggaagaatccgcaagaggggctttataacgaactccagaaagataaaatggcagaagcctatagtgagattgggatgaagggagaaaggaggaggggtaaaggtcacgatgggttgtaccaaggattgagcacagccactaaagatacctatgatgcgctccacatgcaggccctgccgccaaga

SEQ ID NO: 4701 - DNA, 2448 bp, synthetic construct
  source 1..2448: mol_type = other DNA
atggccttaccagtgaccgccttgctcctgccgctggccttgctgctccacgccgccaggccggacatccagttgacccagtcccccagctcactcagcgccagtgtgggggaccgggtgaccattacctgtaaagccagtcagagtgtggactatgacggggatagcttcctgaattggtatcagcagaagcctggcaaagccccaaagctgctgatctacgctgcatctaatctggagtcaggcgtgccttccaggttctccggtagtgggtctgggaccgatttcacattgaccatttcatccctccaacccgaggatttcgctacatattactgtcagcagtccaatgaggaccctctcacctttggccagggcaccaaagttgaaattaagagactcgaggacctgaagaacgtgttcccacctgaggtggccgtgttcgagcctagcgaggccgagatcagccacacccagaaagccaccctcgtgtgcctggctaccggcttctaccccgaccatgtggaactgtcttggtgggtcaacggcaaagaggtgcacagcggcgtgtctaccgacccccagccactgaaagaacagcccgccctgaacgacagccggtactgcctgagcagcagactgagagtgtccgccaccttctggcagaacccccggaaccacttcagatgccaggtgcagttctacggcctgagcgagaacgacgagtggacccaggacagagccaagcccgtgacccagatcgtgtctgccgaagcctggggcagagccgattgcggatcccagagcttcggcctgctggaccccaagctgtgctacctgctggatggcatcctgttcatctacggcgtgatcctgaccgccctgttcctgagagtgaagttcagcagaagcgccgacgcccctgcctaccagcagggacagaaccaactgtacaacgagctgaacctgggcagacgggaagagtacgacgtgctggacaagcggagaggcagggaccctgagatgggcggaaagccccggagaaagaacccccaggaaggactgtataacgaactccagaaagacaagatggccgaagcctacagcgagatcggcatgaagggcgagcggagaagaggcaagggccacgatggcctgtaccagggcctgagcaccgccaccaaggacacctatgacgccctgcacatgcaggccctgcctccaagaagggccaagcgatctggatctggagcaacaaacttctcactactcaaacaagcaggtgacgtggaggagaatcccgggcctactagtatggactggatttggcgcatccttttccttgtcggcgctgctaccggcgcgcattccttcgaagaagtccaacttgtggagtctggagggggcctggtgcagcccggcggctctctcagactgtcttgtgcggcaagcggctacaccttcagctcttactggatagaatgggtgaggcaggcacctggaaagggactggagtggattggagagattctgccaggagggggagatacaaattacaatgaaatcttcaaggggcgggccaccttttcagcggataccagcaagaatacagcttacctgcagatgaatagcctccgggcagaagataccgctgtttattattgcacgagacgggtgccaataagactggactattgggggcaagggactcttgtcaccgtcagttcaacgcgtatccagaaccctgatcctgccgtgtaccagctgcgggatagcaagagcagcgacaagagcgtgtgtctgttcaccgacttcgacagccagaccaacgtgtcccagagcaaggactccgacgtgtacatcaccgataagaccgtgctggacatgcggagcatggacttcaagagcaactccgccgtggcctggtccaacaagtccgatttcgcctgcgccaacgccttcaacaacagcattatccccgaggacacattcttcccaagccccgagagcagctgcggtacccagagttttgggttgttggaccctaaattgtgctatctgttggacggaatcctgttcatttacggagtgatcctgaccgcattgttcctgcgggttaagttttccagatccgcagacgcacccgcttaccaacaagggcagaaccaactctacaatgaacttaatttggggcggagggaagagtacgacgttctggacaaaaggaggggacgagatcccgagatgggcggaaagcctcgaaggaagaatccgcaagaggggctttataacgaactccagaaagataaaatggcagaagcctatagtgagattgggatgaagggagaaaggaggaggggtaaaggtcacgatgggttgtaccaaggattgagcacagccactaaagatacctatgatgcgctccacatgcaggccctgccgccaaga

SEQ ID NO: 4702 - DNA, 2445 bp, synthetic construct
  source 1..2445: mol_type = other DNA
atggccttaccagtgaccgccttgctcctgccgctggccttgctgctccacgccgccaggccggacatcgtgatgacacagagccctgatagcctggccgtgtctctgggagagagagccaccattaactgcaaggccagccagagcgtggactacgagggcgacagcttcctgaactggtatcagcagaagcccggccagcctcctaagctgctgatctacgccgccagcaatctggaaagcggcgtgccaagcagattttccggctctggcagcggcaccgatttcaccctgacaatatccagcctccagcctgaggacgtggccgtgtactactgccagcagagcaatgaggaccctctgacctttggccagggcaccaaggtggaaatcaagctcgaggacctgaagaacgtgttcccacctgaggtggccgtgttcgagcctagcgaggccgagatcagccacacccagaaagccaccctcgtgtgcctggctaccggcttctaccccgaccatgtggaactgtcttggtgggtcaacggcaaagaggtgcacagcggcgtgtctaccgacccccagccactgaaagaacagcccgccctgaacgacagccggtactgcctgagcagcagactgagagtgtccgccaccttctggcagaacccccggaaccacttcagatgccaggtgcagttctacggcctgagcgagaacgacgagtggacccaggacagagccaagcccgtgacccagatcgtgtctgccgaagcctggggcagagccgattgcggatcccagagcttcggcctgctggaccccaagctgtgctacctgctggatggcatcctgttcatctacggcgtgatcctgaccgccctgttcctgagagtgaagttcagcagaagcgccgacgcccctgcctaccagcagggacagaaccaactgtacaacgagctgaacctgggcagacgggaagagtacgacgtgctggacaagcggagaggcagggaccctgagatgggcggaaagccccggagaaagaacccccaggaaggactgtataacgaactccagaaagacaagatggccgaagcctacagcgagatcggcatgaagggcgagcggagaagaggcaagggccacgatggcctgtaccagggcctgagcaccgccaccaaggacacctatgacgccctgcacatgcaggccctgcctccaagaagggccaagcgatctggatctggagcaacaaacttctcactactcaaacaagcaggtgacgtggaggagaatcccgggcctactagtatggactggatttggcgcatccttttccttgtcggcgctgctaccggcgcgcattccttcgaagaagtccaacttgtggagtctggagggggcctggtgcagcccggcggctctctcagactgtcttgtgcggcaagcggctacaccttcagctcttactggatagaatgggtgaggcaggcacctggaaagggactggagtggattggagagattctgccaggagggggagatacaaattacaatgaaatcttcaaggggcgggccaccttttcagcggataccagcaagaatacagcttacctgcagatgaatagcctccgggcagaagataccgctgtttattattgcacgagacgggtgccaataagactggactattgggggcaagggactcttgtcaccgtcagttcaacgcgtatccagaaccctgatcctgccgtgtaccagctgcgggatagcaagagcagcgacaagagcgtgtgtctgttcaccgacttcgacagccagaccaacgtgtcccagagcaaggactccgacgtgtacatcaccgataagaccgtgctggacatgcggagcatggacttcaagagcaactccgccgtggcctggtccaacaagtccgatttcgcctgcgccaacgccttcaacaacagcattatccccgaggacacattcttcccaagccccgagagcagctgcggtacccagagttttgggttgttggaccctaaattgtgctatctgttggacggaatcctgttcatttacggagtgatcctgaccgcattgttcctgcgggttaagttttccagatccgcagacgcacccgcttaccaacaagggcagaaccaactctacaatgaacttaatttggggcggagggaagagtacgacgttctggacaaaaggaggggacgagatcccgagatgggcggaaagcctcgaaggaagaatccgcaagaggggctttataacgaactccagaaagataaaatggcagaagcctatagtgagattgggatgaagggagaaaggaggaggggtaaaggtcacgatgggttgtaccaaggattgagcacagccactaaagatacctatgatgcgctccacatgcaggccctgccgccaaga

SEQ ID NO: 4703 - DNA, 2445 bp, synthetic construct
  source 1..2445: mol_type = other DNA
atggccttaccagtgaccgccttgctcctgccgctggccttgctgctccacgccgccaggccggacatcgtgatgacacagagccctgatagcctggccgtgtctctgggagagagagccaccattaactgcaaggccagccagagcgtggactacgacggcgacagcttcctgaactggtatcagcagaagcccggccagcctcctaagctgctgatctacgccgccagcaatctggaaagcggcgtgccaagcagattttccggctctggcagcggcaccgatttcaccctgacaatatccagcctccagcctgaggacgtggccgtgtactactgccagcagagcaacgacgaccctctgacctttggacagggcaccaaggtggaaatcaaactcgaggacctgaagaacgtgttcccacctgaggtggccgtgttcgagcctagcgaggccgagatcagccacacccagaaagccaccctcgtgtgcctggctaccggcttctaccccgaccatgtggaactgtcttggtgggtcaacggcaaagaggtgcacagcggcgtgtctaccgacccccagccactgaaagaacagcccgccctgaacgacagccggtactgcctgagcagcagactgagagtgtccgccaccttctggcagaacccccggaaccacttcagatgccaggtgcagttctacggcctgagcgagaacgacgagtggacccaggacagagccaagcccgtgacccagatcgtgtctgccgaagcctggggcagagccgattgcggatcccagagcttcggcctgctggaccccaagctgtgctacctgctggatggcatcctgttcatctacggcgtgatcctgaccgccctgttcctgagagtgaagttcagcagaagcgccgacgcccctgcctaccagcagggacagaaccaactgtacaacgagctgaacctgggcagacgggaagagtacgacgtgctggacaagcggagaggcagggaccctgagatgggcggaaagccccggagaaagaacccccaggaaggactgtataacgaactccagaaagacaagatggccgaagcctacagcgagatcggcatgaagggcgagcggagaagaggcaagggccacgatggcctgtaccagggcctgagcaccgccaccaaggacacctatgacgccctgcacatgcaggccctgcctccaagaagggccaagcgatctggatctggagcaacaaacttctcactactcaaacaagcaggtgacgtggaggagaatcccgggcctactagtatggactggatttggcgcatccttttccttgtcggcgctgctaccggcgcgcattccttcgaagaagtccaacttgtggagtctggagggggcctggtgcagcccggcggctctctcagactgtcttgtgcggcaagcggctacaccttcagctcttactggatagaatgggtgaggcaggcacctggaaagggactggagtggattggagagattctgccaggagggggagatacaaattacaatgaaatcttcaaggggcgggccaccttttcagcggataccagcaagaatacagcttacctgcagatgaatagcctccgggcagaagataccgctgtttattattgcacgagacgggtgccaataagactggactattgggggcaagggactcttgtcaccgtcagttcaacgcgtatccagaaccctgatcctgccgtgtaccagctgcgggatagcaagagcagcgacaagagcgtgtgtctgttcaccgacttcgacagccagaccaacgtgtcccagagcaaggactccgacgtgtacatcaccgataagaccgtgctggacatgcggagcatggacttcaagagcaactccgccgtggcctggtccaacaagtccgatttcgcctgcgccaacgccttcaacaacagcattatccccgaggacacattcttcccaagccccgagagcagctgcggtacccagagttttgggttgttggaccctaaattgtgctatctgttggacggaatcctgttcatttacggagtgatcctgaccgcattgttcctgcgggttaagttttccagatccgcagacgcacccgcttaccaacaagggcagaaccaactctacaatgaacttaatttggggcggagggaagagtacgacgttctggacaaaaggaggggacgagatcccgagatgggcggaaagcctcgaaggaagaatccgcaagaggggctttataacgaactccagaaagataaaatggcagaagcctatagtgagattgggatgaagggagaaaggaggaggggtaaaggtcacgatgggttgtaccaaggattgagcacagccactaaagatacctatgatgcgctccacatgcaggccctgccgccaaga

SEQ ID NO: 4704 - DNA, 2451 bp, synthetic construct
  source 1..2451: mol_type = other DNA
atggccttaccagtgaccgccttgctcctgccgctggccttgctgctccacgccgccaggccggacgacatccagttgacccagtcccccagctcactcagcgccagtgtgggggaccgggtgaccattacctgtaaagccagtcagagtgtggactatgagggggatagcttcctgaattggtatcagcagaagcctggcaaagccccaaagctgctgatctacgctgcatctaatctggagtcaggcgtgccttctaggttctccggtagtgggtctgggaccgatttcacattgaccatttcatccctccaacccgaggatttcgctacatattactgtcagcagtccaatgaggaccctctcacctttggccagggcaccaaagttgaaattaagagactcgaggacctgaagaacgtgttcccacctgaggtggccgtgttcgagcctagcgaggccgagatcagccacacccagaaagccaccctcgtgtgcctggctaccggcttctaccccgaccatgtggaactgtcttggtgggtcaacggcaaagaggtgcacagcggcgtgtctaccgacccccagccactgaaagaacagcccgccctgaacgacagccggtactgcctgagcagcagactgagagtgtccgccaccttctggcagaacccccggaaccacttcagatgccaggtgcagttctacggcctgagcgagaacgacgagtggacccaggacagagccaagcccgtgacccagatcgtgtctgccgaagcctggggcagagccgattgcggatcccagagcttcggcctgctggaccccaagctgtgctacctgctggatggcatcctgttcatctacggcgtgatcctgaccgccctgttcctgagagtgaagttcagcagaagcgccgacgcccctgcctaccagcagggacagaaccaactgtacaacgagctgaacctgggcagacgggaagagtacgacgtgctggacaagcggagaggcagggaccctgagatgggcggaaagccccggagaaagaacccccaggaaggactgtataacgaactccagaaagacaagatggccgaagcctacagcgagatcggcatgaagggcgagcggagaagaggcaagggccacgatggcctgtaccagggcctgagcaccgccaccaaggacacctatgacgccctgcacatgcaggccctgcctccaagaagggccaagcgatctggatctggagcaacaaacttctcactactcaaacaagcaggtgacgtggaggagaatcccgggcctactagtatggactggatttggcgcatccttttccttgtcggcgctgctaccggcgcgcattccttcgaagaagtccaacttgtggagtctggagggggcctggtgcagcccggcggctctctcagactgtcttgtgcggcaagcggctacaccttcacctcttactggatagaatgggtgaggcaggcacctggaaagggactggagtggattggagagattctgccaggagggggagatacaaattacaatgaaatcttcaaggggcgggccaccttttcagcggataccagcaagaatacagcttacctgcagatgaatagcctccgggcagaagataccgctgtttattattgcacgagacgggtgccaataagactggactattgggggcaagggactcttgtcaccgtcagttcaacgcgtatccagaaccctgatcctgccgtgtaccagctgcgggatagcaagagcagcgacaagagcgtgtgtctgttcaccgacttcgacagccagaccaacgtgtcccagagcaaggactccgacgtgtacatcaccgataagaccgtgctggacatgcggagcatggacttcaagagcaactccgccgtggcctggtccaacaagtccgatttcgcctgcgccaacgccttcaacaacagcattatccccgaggacacattcttcccaagccccgagagcagctgcggtacccagagttttgggttgttggaccctaaattgtgctatctgttggacggaatcctgttcatttacggagtgatcctgaccgcattgttcctgcgggttaagttttccagatccgcagacgcacccgcttaccaacaagggcagaaccaactctacaatgaacttaatttggggcggagggaagagtacgacgttctggacaaaaggaggggacgagatcccgagatgggcggaaagcctcgaaggaagaatccgcaagaggggctttataacgaactccagaaagataaaatggcagaagcctatagtgagattgggatgaagggagaaaggaggaggggtaaaggtcacgatgggttgtaccaaggattgagcacagccactaaagatacctatgatgcgctccacatgcaggccctgccgccaaga

SEQ ID NO: 4705 - DNA, 2448 bp, synthetic construct
  source 1..2448: mol_type = other DNA
atggccttaccagtgaccgccttgctcctgccgctggccttgctgctccacgccgccaggccggacatccagttgacccagtcccccagctcactcagcgccagtgtgggggaccgggtgaccattacctgtaaagccagtcagagtgtggactatgagggggatagcttcctgaattggtatcagcagaagcctggcaaagccccaaagctgctgatctacgctgcatctaatctggagtcaggcgtgccttctaggttctccggtagtgggtctgggaccgatttcacattgaccatttcatccctccaacccgaggatttcgctacatattactgtcagcagtccaatgaggaccctctcacctttggccagggcaccaaagttgaaattaagagactcgaggacctgaagaacgtgttcccacctgaggtggccgtgttcgagcctagcgaggccgagatcagccacacccagaaagccaccctcgtgtgcctggctaccggcttctaccccgaccatgtggaactgtcttggtgggtcaacggcaaagaggtgcacagcggcgtgtctaccgacccccagccactgaaagaacagcccgccctgaacgacagccggtactgcctgagcagcagactgagagtgtccgccaccttctggcagaacccccggaaccacttcagatgccaggtgcagttctacggcctgagcgagaacgacgagtggacccaggacagagccaagcccgtgacccagatcgtgtctgccgaagcctggggcagagccgattgcggatcccagagcttcggcctgctggaccccaagctgtgctacctgctggatggcatcctgttcatctacggcgtgatcctgaccgccctgttcctgagagtgaagttcagcagaagcgccgacgcccctgcctaccagcagggacagaaccaactgtacaacgagctgaacctgggcagacgggaagagtacgacgtgctggacaagcggagaggcagggaccctgagatgggcggaaagccccggagaaagaacccccaggaaggactgtataacgaactccagaaagacaagatggccgaagcctacagcgagatcggcatgaagggcgagcggagaagaggcaagggccacgatggcctgtaccagggcctgagcaccgccaccaaggacacctatgacgccctgcacatgcaggccctgcctccaagaagggccaagcgatctggatctggagcaacaaacttctcactactcaaacaagcaggtgacgtggaggagaatcccgggcctactagtatggactggatttggcgcatccttttccttgtcggcgctgctaccggcgcgcattccttcgaagaagtccaacttgtggagtctggagggggcctggtgcagcccggcggctctctcagactgtcttgtgcggcaagcggctacaccttcacctcttactggatagaatgggtgaggcaggcacctggaaagggactggagtggattggagagattctgccaggagggggagatacaaattacaatgaaatcttcaaggggcgggccaccttttcagcggataccagcaagaatacagcttacctgcagatgaatagcctccgggcagaagataccgctgtttattattgcacgagacgggtgccaataagactggactattgggggcaagggactcttgtcaccgtcagttcaacgcgtatccagaaccctgatcctgccgtgtaccagctgcgggatagcaagagcagcgacaagagcgtgtgtctgttcaccgacttcgacagccagaccaacgtgtcccagagcaaggactccgacgtgtacatcaccgataagaccgtgctggacatgcggagcatggacttcaagagcaactccgccgtggcctggtccaacaagtccgatttcgcctgcgccaacgccttcaacaacagcattatccccgaggacacattcttcccaagccccgagagcagctgcggtacccagagttttgggttgttggaccctaaattgtgctatctgttggacggaatcctgttcatttacggagtgatcctgaccgcattgttcctgcgggttaagttttccagatccgcagacgcacccgcttaccaacaagggcagaaccaactctacaatgaacttaatttggggcggagggaagagtacgacgttctggacaaaaggaggggacgagatcccgagatgggcggaaagcctcgaaggaagaatccgcaagaggggctttataacgaactccagaaagataaaatggcagaagcctatagtgagattgggatgaagggagaaaggaggaggggtaaaggtcacgatgggttgtaccaaggattgagcacagccactaaagatacctatgatgcgctccacatgcaggccctgccgccaaga

SEQ ID NO: 4706 - DNA, 2454 bp, synthetic construct
  source 1..2454: mol_type = other DNA
atggccttaccagtgaccgccttgctcctgccgctggccttgctgctccacgccgccaggccggacgacatccagttgacccagtcccccagctcactcagcgccagtgtgggggaccgggtgaccattacctgtaaagccagtcagagtgtggactatgagggggatagcttcctgaattggtatcagcagaagcctggcaaagccccaaagctgctgatctacgctgcatctaatctggagtcaggcgtgccttctaggttctccggtagtgggtctgggaccgatttcacattgaccatttcatccctccaacccgaggatttcgctacatattactgtcagcagtccaatgaggaccctctcacctttggccagggcaccaaagttgaaattaagagactcgaggacctgaagaacgtgttcccacctgaggtggccgtgttcgagcctagcgaggccgagatcagccacacccagaaagccaccctcgtgtgcctggctaccggcttctaccccgaccatgtggaactgtcttggtgggtcaacggcaaagaggtgcacagcggcgtgtctaccgacccccagccactgaaagaacagcccgccctgaacgacagccggtactgcctgagcagcagactgagagtgtccgccaccttctggcagaacccccggaaccacttcagatgccaggtgcagttctacggcctgagcgagaacgacgagtggacccaggacagagccaagcccgtgacccagatcgtgtctgccgaagcctggggcagagccgattgcggatcccagagcttcggcctgctggaccccaagctgtgctacctgctggatggcatcctgttcatctacggcgtgatcctgaccgccctgttcctgagagtgaagttcagcagaagcgccgacgcccctgcctaccagcagggacagaaccaactgtacaacgagctgaacctgggcagacgggaagagtacgacgtgctggacaagcggagaggcagggaccctgagatgggcggaaagccccggagaaagaacccccaggaaggactgtataacgaactccagaaagacaagatggccgaagcctacagcgagatcggcatgaagggcgagcggagaagaggcaagggccacgatggcctgtaccagggcctgagcaccgccaccaaggacacctatgacgccctgcacatgcaggccctgcctccaagaagggccaagcgatctggatctggagcaacaaacttctcactactcaaacaagcaggtgacgtggaggagaatcccgggcctactagtatggactggatttggcgcatccttttccttgtcggcgctgctaccggcgcgcattccttcgaagaagtccaacttgtggagtctggagggggcctggtgcagcccggcggctctctcagactgtcttgtgcggcaagcggctacaccttcacctcttactggatagaatgggtgaggcaggcacctggaaagggactggagtggattggagagattctgccaggagggggagatacaaattacaatgaaatcttcaaggggcgggccaccttttcagcggataccagcaagaatacagcttacctgcagatgaatagcctccgggcagaagataccgctgtttattattgcacgagacgggtgccaataagactggactattgggggcaagggactcttgtcaccgtcagttcaacgcgtatccagaaccctgatcctgccgtgtaccagctgcgggatagcaagagcagcgacaagagcgtgtgtctgttcaccgacttcgacagccagaccaacgtgtcccagagcaaggactccgacgtgtacatcaccgataagaccgtgctggacatgcggagcatggacttcaagagcaactccgccgtggcctggtccaacaagtccgatttcgcctgcgccaacgccttcaacaacagcattatccccgaggacacattcttcccaagccccgagagcagctgcggtacccagagttttgggttgttggaccctaaattgtgctatctgttggacggaatcctgttcatttacggagtgatcctgaccgcattgttcctgcgggttaagttttccagatccgcagacgcacccgcttaccaacaagggcagaaccaactctacaatgaacttaatttggggcggagggaagagtacgacgttctggacaaaaggaggggacgagatcccgagatgggcggaaagcctcgaaggaagaatccgcaagaggggctttataacgaactccagaaagataaaatggcagaagcctatagtgagattgggatgaagggagaaaggaggaggggtaaaggtcacgatgggttgtaccaaggattgagcacagccactaaagatacctatgatgcgctccacatgcaggccctgccgccaagataa

SEQ ID NO: 4707 - DNA, 2451 bp, synthetic construct
  source 1..2451: mol_type = other DNA
atggccttaccagtgaccgccttgctcctgccgctggccttgctgctccacgccgccaggccggacgacatccagttgacccagtcccccagctcactcagcgccagtgtgggggaccgggtgaccattacctgtaaagccagtcagagtgtggactatgacggggatagcttcctgaattggtatcagcagaagcctggcaaagccccaaagctgctgatctacgctgcatctaatctggagtcaggcgtgccttccaggttctccggtagtgggtctgggaccgatttcacattgaccatttcatccctccaacccgaggatttcgctacatattactgtcagcagtccaatgaggaccctctcacctttggccagggcaccaaagttgaaattaagagactcgaggacctgaagaacgtgttcccacctgaggtggccgtgttcgagcctagcgaggccgagatcagccacacccagaaagccaccctcgtgtgcctggctaccggcttctaccccgaccatgtggaactgtcttggtgggtcaacggcaaagaggtgcacagcggcgtgtctaccgacccccagccactgaaagaacagcccgccctgaacgacagccggtactgcctgagcagcagactgagagtgtccgccaccttctggcagaacccccggaaccacttcagatgccaggtgcagttctacggcctgagcgagaacgacgagtggacccaggacagagccaagcccgtgacccagatcgtgtctgccgaagcctggggcagagccgattgcggatcccagagcttcggcctgctggaccccaagctgtgctacctgctggatggcatcctgttcatctacggcgtgatcctgaccgccctgttcctgagagtgaagttcagcagaagcgccgacgcccctgcctaccagcagggacagaaccaactgtacaacgagctgaacctgggcagacgggaagagtacgacgtgctggacaagcggagaggcagggaccctgagatgggcggaaagccccggagaaagaacccccaggaaggactgtataacgaactccagaaagacaagatggccgaagcctacagcgagatcggcatgaagggcgagcggagaagaggcaagggccacgatggcctgtaccagggcctgagcaccgccaccaaggacacctatgacgccctgcacatgcaggccctgcctccaagaagggccaagcgatctggatctggagcaacaaacttctcactactcaaacaagcaggtgacgtggaggagaatcccgggcctactagtatggactggatttggcgcatccttttccttgtcggcgctgctaccggcgcgcattccttcgaagaagtccaacttgtggagtctggagggggcctggtgcagcccggcggctctctcagactgtcttgtgcggcaagcggctacaccttcacctcttactggatagaatgggtgaggcaggcacctggaaagggactggagtggattggagagattctgccaggagggggagatacaaattacaatgaaatcttcaaggggcgggccaccttttcagcggataccagcaagaatacagcttacctgcagatgaatagcctccgggcagaagataccgctgtttattattgcacgagacgggtgccaataagactggactattgggggcaagggactcttgtcaccgtcagttcaacgcgtatccagaaccctgatcctgccgtgtaccagctgcgggatagcaagagcagcgacaagagcgtgtgtctgttcaccgacttcgacagccagaccaacgtgtcccagagcaaggactccgacgtgtacatcaccgataagaccgtgctggacatgcggagcatggacttcaagagcaactccgccgtggcctggtccaacaagtccgatttcgcctgcgccaacgccttcaacaacagcattatccccgaggacacattcttcccaagccccgagagcagctgcggtacccagagttttgggttgttggaccctaaattgtgctatctgttggacggaatcctgttcatttacggagtgatcctgaccgcattgttcctgcgggttaagttttccagatccgcagacgcacccgcttaccaacaagggcagaaccaactctacaatgaacttaatttggggcggagggaagagtacgacgttctggacaaaaggaggggacgagatcccgagatgggcggaaagcctcgaaggaagaatccgcaagaggggctttataacgaactccagaaagataaaatggcagaagcctatagtgagattgggatgaagggagaaaggaggaggggtaaaggtcacgatgggttgtaccaaggattgagcacagccactaaagatacctatgatgcgctccacatgcaggccctgccgccaaga

SEQ ID NO: 4708 - DNA, 2448 bp, synthetic construct
  source 1..2448: mol_type = other DNA
atggccttaccagtgaccgccttgctcctgccgctggccttgctgctccacgccgccaggccggacatccagttgacccagtcccccagctcactcagcgccagtgtgggggaccgggtgaccattacctgtaaagccagtcagagtgtggactatgacggggatagcttcctgaattggtatcagcagaagcctggcaaagccccaaagctgctgatctacgctgcatctaatctggagtcaggcgtgccttccaggttctccggtagtgggtctgggaccgatttcacattgaccatttcatccctccaacccgaggatttcgctacatattactgtcagcagtccaatgaggaccctctcacctttggccagggcaccaaagttgaaattaagagactcgaggacctgaagaacgtgttcccacctgaggtggccgtgttcgagcctagcgaggccgagatcagccacacccagaaagccaccctcgtgtgcctggctaccggcttctaccccgaccatgtggaactgtcttggtgggtcaacggcaaagaggtgcacagcggcgtgtctaccgacccccagccactgaaagaacagcccgccctgaacgacagccggtactgcctgagcagcagactgagagtgtccgccaccttctggcagaacccccggaaccacttcagatgccaggtgcagttctacggcctgagcgagaacgacgagtggacccaggacagagccaagcccgtgacccagatcgtgtctgccgaagcctggggcagagccgattgcggatcccagagcttcggcctgctggaccccaagctgtgctacctgctggatggcatcctgttcatctacggcgtgatcctgaccgccctgttcctgagagtgaagttcagcagaagcgccgacgcccctgcctaccagcagggacagaaccaactgtacaacgagctgaacctgggcagacgggaagagtacgacgtgctggacaagcggagaggcagggaccctgagatgggcggaaagccccggagaaagaacccccaggaaggactgtataacgaactccagaaagacaagatggccgaagcctacagcgagatcggcatgaagggcgagcggagaagaggcaagggccacgatggcctgtaccagggcctgagcaccgccaccaaggacacctatgacgccctgcacatgcaggccctgcctccaagaagggccaagcgatctggatctggagcaacaaacttctcactactcaaacaagcaggtgacgtggaggagaatcccgggcctactagtatggactggatttggcgcatccttttccttgtcggcgctgctaccggcgcgcattccttcgaagaagtccaacttgtggagtctggagggggcctggtgcagcccggcggctctctcagactgtcttgtgcggcaagcggctacaccttcacctcttactggatagaatgggtgaggcaggcacctggaaagggactggagtggattggagagattctgccaggagggggagatacaaattacaatgaaatcttcaaggggcgggccaccttttcagcggataccagcaagaatacagcttacctgcagatgaatagcctccgggcagaagataccgctgtttattattgcacgagacgggtgccaataagactggactattgggggcaagggactcttgtcaccgtcagttcaacgcgtatccagaaccctgatcctgccgtgtaccagctgcgggatagcaagagcagcgacaagagcgtgtgtctgttcaccgacttcgacagccagaccaacgtgtcccagagcaaggactccgacgtgtacatcaccgataagaccgtgctggacatgcggagcatggacttcaagagcaactccgccgtggcctggtccaacaagtccgatttcgcctgcgccaacgccttcaacaacagcattatccccgaggacacattcttcccaagccccgagagcagctgcggtacccagagttttgggttgttggaccctaaattgtgctatctgttggacggaatcctgttcatttacggagtgatcctgaccgcattgttcctgcgggttaagttttccagatccgcagacgcacccgcttaccaacaagggcagaaccaactctacaatgaacttaatttggggcggagggaagagtacgacgttctggacaaaaggaggggacgagatcccgagatgggcggaaagcctcgaaggaagaatccgcaagaggggctttataacgaactccagaaagataaaatggcagaagcctatagtgagattgggatgaagggagaaaggaggaggggtaaaggtcacgatgggttgtaccaaggattgagcacagccactaaagatacctatgatgcgctccacatgcaggccctgccgccaaga

SEQ ID NO: 4709 - DNA, 2445 bp, synthetic construct
  source 1..2445: mol_type = other DNA
atggccttaccagtgaccgccttgctcctgccgctggccttgctgctccacgccgccaggccggacatcgtgatgacacagagccctgatagcctggccgtgtctctgggagagagagccaccattaactgcaaggccagccagagcgtggactacgagggcgacagcttcctgaactggtatcagcagaagcccggccagcctcctaagctgctgatctacgccgccagcaatctggaaagcggcgtgccaagcagattttccggctctggcagcggcaccgatttcaccctgacaatatccagcctccagcctgaggacgtggccgtgtactactgccagcagagcaatgaggaccctctgacctttggccagggcaccaaggtggaaatcaagctcgaggacctgaagaacgtgttcccacctgaggtggccgtgttcgagcctagcgaggccgagatcagccacacccagaaagccaccctcgtgtgcctggctaccggcttctaccccgaccatgtggaactgtcttggtgggtcaacggcaaagaggtgcacagcggcgtgtctaccgacccccagccactgaaagaacagcccgccctgaacgacagccggtactgcctgagcagcagactgagagtgtccgccaccttctggcagaacccccggaaccacttcagatgccaggtgcagttctacggcctgagcgagaacgacgagtggacccaggacagagccaagcccgtgacccagatcgtgtctgccgaagcctggggcagagccgattgcggatcccagagcttcggcctgctggaccccaagctgtgctacctgctggatggcatcctgttcatctacggcgtgatcctgaccgccctgttcctgagagtgaagttcagcagaagcgccgacgcccctgcctaccagcagggacagaaccaactgtacaacgagctgaacctgggcagacgggaagagtacgacgtgctggacaagcggagaggcagggaccctgagatgggcggaaagccccggagaaagaacccccaggaaggactgtataacgaactccagaaagacaagatggccgaagcctacagcgagatcggcatgaagggcgagcggagaagaggcaagggccacgatggcctgtaccagggcctgagcaccgccaccaaggacacctatgacgccctgcacatgcaggccctgcctccaagaagggccaagcgatctggatctggagcaacaaacttctcactactcaaacaagcaggtgacgtggaggagaatcccgggcctactagtatggactggatttggcgcatccttttccttgtcggcgctgctaccggcgcgcattccttcgaagaagtccaacttgtggagtctggagggggcctggtgcagcccggcggctctctcagactgtcttgtgcggcaagcggctacaccttcacctcttactggatagaatgggtgaggcaggcacctggaaagggactggagtggattggagagattctgccaggagggggagatacaaattacaatgaaatcttcaaggggcgggccaccttttcagcggataccagcaagaatacagcttacctgcagatgaatagcctccgggcagaagataccgctgtttattattgcacgagacgggtgccaataagactggactattgggggcaagggactcttgtcaccgtcagttcaacgcgtatccagaaccctgatcctgccgtgtaccagctgcgggatagcaagagcagcgacaagagcgtgtgtctgttcaccgacttcgacagccagaccaacgtgtcccagagcaaggactccgacgtgtacatcaccgataagaccgtgctggacatgcggagcatggacttcaagagcaactccgccgtggcctggtccaacaagtccgatttcgcctgcgccaacgccttcaacaacagcattatccccgaggacacattcttcccaagccccgagagcagctgcggtacccagagttttgggttgttggaccctaaattgtgctatctgttggacggaatcctgttcatttacggagtgatcctgaccgcattgttcctgcgggttaagttttccagatccgcagacgcacccgcttaccaacaagggcagaaccaactctacaatgaacttaatttggggcggagggaagagtacgacgttctggacaaaaggaggggacgagatcccgagatgggcggaaagcctcgaaggaagaatccgcaagaggggctttataacgaactccagaaagataaaatggcagaagcctatagtgagattgggatgaagggagaaaggaggaggggtaaaggtcacgatgggttgtaccaaggattgagcacagccactaaagatacctatgatgcgctccacatgcaggccctgccgccaaga

SEQ ID NO: 4710 - DNA, 2445 bp, synthetic construct
  source 1..2445: mol_type = other DNA
atggccttaccagtgaccgccttgctcctgccgctggccttgctgctccacgccgccaggccggacatcgtgatgacacagagccctgatagcctggccgtgtctctgggagagagagccaccattaactgcaaggccagccagagcgtggactacgacggcgacagcttcctgaactggtatcagcagaagcccggccagcctcctaagctgctgatctacgccgccagcaatctggaaagcggcgtgccaagcagattttccggctctggcagcggcaccgatttcaccctgacaatatccagcctccagcctgaggacgtggccgtgtactactgccagcagagcaacgacgaccctctgacctttggacagggcaccaaggtggaaatcaaactcgaggacctgaagaacgtgttcccacctgaggtggccgtgttcgagcctagcgaggccgagatcagccacacccagaaagccaccctcgtgtgcctggctaccggcttctaccccgaccatgtggaactgtcttggtgggtcaacggcaaagaggtgcacagcggcgtgtctaccgacccccagccactgaaagaacagcccgccctgaacgacagccggtactgcctgagcagcagactgagagtgtccgccaccttctggcagaacccccggaaccacttcagatgccaggtgcagttctacggcctgagcgagaacgacgagtggacccaggacagagccaagcccgtgacccagatcgtgtctgccgaagcctggggcagagccgattgcggatcccagagcttcggcctgctggaccccaagctgtgctacctgctggatggcatcctgttcatctacggcgtgatcctgaccgccctgttcctgagagtgaagttcagcagaagcgccgacgcccctgcctaccagcagggacagaaccaactgtacaacgagctgaacctgggcagacgggaagagtacgacgtgctggacaagcggagaggcagggaccctgagatgggcggaaagccccggagaaagaacccccaggaaggactgtataacgaactccagaaagacaagatggccgaagcctacagcgagatcggcatgaagggcgagcggagaagaggcaagggccacgatggcctgtaccagggcctgagcaccgccaccaaggacacctatgacgccctgcacatgcaggccctgcctccaagaagggccaagcgatctggatctggagcaacaaacttctcactactcaaacaagcaggtgacgtggaggagaatcccgggcctactagtatggactggatttggcgcatccttttccttgtcggcgctgctaccggcgcgcattccttcgaagaagtccaacttgtggagtctggagggggcctggtgcagcccggcggctctctcagactgtcttgtgcggcaagcggctacaccttcacctcttactggatagaatgggtgaggcaggcacctggaaagggactggagtggattggagagattctgccaggagggggagatacaaattacaatgaaatcttcaaggggcgggccaccttttcagcggataccagcaagaatacagcttacctgcagatgaatagcctccgggcagaagataccgctgtttattattgcacgagacgggtgccaataagactggactattgggggcaagggactcttgtcaccgtcagttcaacgcgtatccagaaccctgatcctgccgtgtaccagctgcgggatagcaagagcagcgacaagagcgtgtgtctgttcaccgacttcgacagccagaccaacgtgtcccagagcaaggactccgacgtgtacatcaccgataagaccgtgctggacatgcggagcatggacttcaagagcaactccgccgtggcctggtccaacaagtccgatttcgcctgcgccaacgccttcaacaacagcattatccccgaggacacattcttcccaagccccgagagcagctgcggtacccagagttttgggttgttggaccctaaattgtgctatctgttggacggaatcctgttcatttacggagtgatcctgaccgcattgttcctgcgggttaagttttccagatccgcagacgcacccgcttaccaacaagggcagaaccaactctacaatgaacttaatttggggcggagggaagagtacgacgttctggacaaaaggaggggacgagatcccgagatgggcggaaagcctcgaaggaagaatccgcaagaggggctttataacgaactccagaaagataaaatggcagaagcctatagtgagattgggatgaagggagaaaggaggaggggtaaaggtcacgatgggttgtaccaaggattgagcacagccactaaagatacctatgatgcgctccacatgcaggccctgccgccaaga

SEQ ID NO: 4711 - DNA, 2445 bp, synthetic construct; identical to SEQ ID NO: 4703
  source 1..2445: mol_type = other DNA

SEQ ID NO: 4712 - DNA, 2448 bp, synthetic construct
  source 1..2448: mol_type = other DNA
atggccttaccagtgaccgccttgctcctgccgctggccttgctgctccacgccgccaggccggacgacatccagttgacccagtcccccagctcactcagcgccagtgtgggggaccgggtgaccattacctgtaaagccagtcagagtgtggactatgagggggatagcttcctgaattggtatcagcagaagcctggcaaagccccaaagctgctgatctacgctgcatctaatctggagtcaggcgtgccttctaggttctccggtagtgggtctgggaccgatttcacattgaccatttcatccctccaacccgaggatttcgctacatattactgtcagcagtccaatgaggaccctctcacctttggccagggcaccaaagttgaaattaagagactcgaggacctgaagaacgtgttcccacctgaggtggccgtgttcgagcctagcgaggccgagatcagccacacccagaaagccaccctcgtgtgcctggctaccggcttctaccccgaccatgtggaactgtcttggtgggtcaacggcaaagaggtgcacagcggcgtgtctaccgacccccagccactgaaagaacagcccgccctgaacgacagccggtactgcctgagcagcagactgagagtgtccgccaccttctggcagaacccccggaaccacttcagatgccaggtgcagttctacggcctgagcgagaacgacgagtggacccaggacagagccaagcccgtgacccagatcgtgtctgccgaagcctggggcagagccgattgcggatcccagagcttcggcctgctggaccccaagctgtgctacctgctggatggcatcctgttcatctacggcgtgatcctgaccgccctgttcctgagagtgaagttcagcagaagcgccgacgcccctgcctaccagcagggacagaaccaactgtacaacgagctgaacctgggcagacgggaagagtacgacgtgctggacaagcggagaggcagggaccctgagatgggcggaaagccccggagaaagaacccccaggaaggactgtataacgaactccagaaagacaagatggccgaagcctacagcgagatcggcatgaagggcgagcggagaagaggcaagggccacgatggcctgtaccagggcctgagcaccgccaccaaggacacctatgacgccctgcacatgcaggccctgcctccaagaagggccaagcgatctggatctggagcaacaaacttctcactactcaaacaagcaggtgacgtggaggagaatcccgggcctactagtatggactggatttggcgcatccttttccttgtcggcgctgctaccggcgcgcattccttcgaagtccaacttgtggagtctggagggggcctggtgcagcccggcggctctctcagactgtcttgtgcggcaagcggctacaccttcacctcttactggatagaatgggtgaggcaggcacctggaaagggactggagtggattggagagattctgccaggagggggagatacaaattacaatgaaatcttcaaggggcgggccaccttttcagcggataccagcaagaatacagcttacctgcagatgaatagcctccgggcagaagataccgctgtttattattgcacgagacgggtgccaataagactggactattgggggcaagggactcttgtcaccgtcagttcaacgcgtatccagaaccctgatcctgccgtgtaccagctgcgggatagcaagagcagcgacaagagcgtgtgtctgttcaccgacttcgacagccagaccaacgtgtcccagagcaaggactccgacgtgtacatcaccgataagaccgtgctggacatgcggagcatggacttcaagagcaactccgccgtggcctggtccaacaagtccgatttcgcctgcgccaacgccttcaacaacagcattatccccgaggacacattcttcccaagccccgagagcagctgcggtacccagagttttgggttgttggaccctaaattgtgctatctgttggacggaatcctgttcatttacggagtgatcctgaccgcattgttcctgcgggttaagttttccagatccgcagacgcacccgcttaccaacaagggcagaaccaactctacaatgaacttaatttggggcggagggaagagtacgacgttctggacaaaaggaggggacgagatcccgagatgggcggaaagcctcgaaggaagaatccgcaagaggggctttataacgaactccagaaagataaaatggcagaagcctatagtgagattgggatgaagggagaaaggaggaggggtaaaggtcacgatgggttgtaccaaggattgagcacagccactaaagatacctatgatgcgctccacatgcaggccctgccgccaaga

SEQ ID NO: 4713 - DNA, 2445 bp, synthetic construct
  source 1..2445: mol_type = other DNA
atggccttaccagtgaccgccttgctcctgccgctggccttgctgctccacgccgccaggccggacatccagttgacccagtcccccagctcactcagcgccagtgtgggggaccgggtgaccattacctgtaaagccagtcagagtgtggactatgagggggatagcttcctgaattggtatcagcagaagcctggcaaagccccaaagctgctgatctacgctgcatctaatctggagtcaggcgtgccttctaggttctccggtagtgggtctgggaccgatttcacattgaccatttcatccctccaacccgaggatttcgctacatattactgtcagcagtccaatgaggaccctctcacctttggccagggcaccaaagttgaaattaagagactcgaggacctgaagaacgtgttcccacctgaggtggccgtgttcgagcctagcgaggccgagatcagccacacccagaaagccaccctcgtgtgcctggctaccggcttctaccccgaccatgtggaactgtcttggtgggtcaacggcaaagaggtgcacagcggcgtgtctaccgacccccagccactgaaagaacagcccgccctgaacgacagccggtactgcctgagcagcagactgagagtgtccgccaccttctggcagaacccccggaaccacttcagatgccaggtgcagttctacggcctgagcgagaacgacgagtggacccaggacagagccaagcccgtgacccagatcgtgtctgccgaagcctggggcagagccgattgcggatcccagagcttcggcctgctggaccccaagctgtgctacctgctggatggcatcctgttcatctacggcgtgatcctgaccgccctgttcctgagagtgaagttcagcagaagcgccgacgcccctgcctaccagcagggacagaaccaactgtacaacgagctgaacctgggcagacgggaagagtacgacgtgctggacaagcggagaggcagggaccctgagatgggcggaaagccccggagaaagaacccccaggaaggactgtataacgaactccagaaagacaagatggccgaagcctacagcgagatcggcatgaagggcgagcggagaagaggcaagggccacgatggcctgtaccagggcctgagcaccgccaccaaggacacctatgacgccctgcacatgcaggccctgcctccaagaagggccaagcgatctggatctggagcaacaaacttctcactactcaaacaagcaggtgacgtggaggagaatcccgggcctactagtatggactggatttggcgcatccttttccttgtcggcgctgctaccggcgcgcattccttcgaagtccaacttgtggagtctggagggggcctggtgcagcccggcggctctctcagactgtcttgtgcggcaagcggctacaccttcacctcttactggatagaatgggtgaggcaggcacctggaaagggactggagtggattggagagattctgccaggagggggagatacaaattacaatgaaatcttcaaggggcgggccaccttttcagcggataccagcaagaatacagcttacctgcagatgaatagcctccgggcagaagataccgctgtttattattgcacgagacgggtgccaataagactggactattgggggcaagggactcttgtcaccgtcagttcaacgcgtatccagaaccctgatcctgccgtgtaccagctgcgggatagcaagagcagcgacaagagcgtgtgtctgttcaccgacttcgacagccagaccaacgtgtcccagagcaaggactccgacgtgtacatcaccgataagaccgtgctggacatgcggagcatggacttcaagagcaactccgccgtggcctggtccaacaagtccgatttcgcctgcgccaacgccttcaacaacagcattatccccgaggacacattcttcccaagccccgagagcagctgcggtacccagagttttgggttgttggaccctaaattgtgctatctgttggacggaatcctgttcatttacggagtgatcctgaccgcattgttcctgcgggttaagttttccagatccgcagacgcacccgcttaccaacaagggcagaaccaactctacaatgaacttaatttggggcggagggaagagtacgacgttctggacaaaaggaggggacgagatcccgagatgggcggaaagcctcgaaggaagaatccgcaagaggggctttataacgaactccagaaagataaaatggcagaagcctatagtgagattgggatgaagggagaaaggaggaggggtaaaggtcacgatgggttgtaccaaggattgagcacagccactaaagatacctatgatgcgctccacatgcaggccctgccgccaaga

SEQ ID NO: 4714 - DNA, 2451 bp, synthetic construct
  source 1..2451: mol_type = other DNA
atggccttaccagtgaccgccttgctcctgccgctggccttgctgctccacgccgccaggccggacgacatccagttgacccagtcccccagctcactcagcgccagtgtgggggaccgggtgaccattacctgtaaagccagtcagagtgtggactatgagggggatagcttcctgaattggtatcagcagaagcctggcaaagccccaaagctgctgatctacgctgcatctaatctggagtcaggcgtgccttctaggttctccggtagtgggtctgggaccgatttcacattgaccatttcatccctccaacccgaggatttcgctacatattactgtcagcagtccaatgaggaccctctcacctttggccagggcaccaaagttgaaattaagagactcgaggacctgaagaacgtgttcccacctgaggtggccgtgttcgagcctagcgaggccgagatcagccacacccagaaagccaccctcgtgtgcctggctaccggcttctaccccgaccatgtggaactgtcttggtgggtcaacggcaaagaggtgcacagcggcgtgtctaccgacccccagccactgaaagaacagcccgccctgaacgacagccggtactgcctgagcagcagactgagagtgtccgccaccttctggcagaacccccggaaccacttcagatgccaggtgcagttctacggcctgagcgagaacgacgagtggacccaggacagagccaagcccgtgacccagatcgtgtctgccgaagcctggggcagagccgattgcggatcccagagcttcggcctgctggaccccaagctgtgctacctgctggatggcatcctgttcatctacggcgtgatcctgaccgccctgttcctgagagtgaagttcagcagaagcgccgacgcccctgcctaccagcagggacagaaccaactgtacaacgagctgaacctgggcagacgggaagagtacgacgtgctggacaagcggagaggcagggaccctgagatgggcggaaagccccggagaaagaacccccaggaaggactgtataacgaactccagaaagacaagatggccgaagcctacagcgagatcggcatgaagggcgagcggagaagaggcaagggccacgatggcctgtaccagggcctgagcaccgccaccaaggacacctatgacgccctgcacatgcaggccctgcctccaagaagggccaagcgatctggatctggagcaacaaacttctcactactcaaacaagcaggtgacgtggaggagaatcccgggcctactagtatggactggatttggcgcatccttttccttgtcggcgctgctaccggcgcgcattccttcgaagtccaacttgtggagtctggagggggcctggtgcagcccggcggctctctcagactgtcttgtgcggcaagcggctacaccttcacctcttactggatagaatgggtgaggcaggcacctggaaagggactggagtggattggagagattctgccaggagggggagatacaaattacaatgaaatcttcaaggggcgggccaccttttcagcggataccagcaagaatacagcttacctgcagatgaatagcctccgggcagaagataccgctgtttattattgcacgagacgggtgccaataagactggactattgggggcaagggactcttgtcaccgtcagttcaacgcgtatccagaaccctgatcctgccgtgtaccagctgcgggatagcaagagcagcgacaagagcgtgtgtctgttcaccgacttcgacagccagaccaacgtgtcccagagcaaggactccgacgtgtacatcaccgataagaccgtgctggacatgcggagcatggacttcaagagcaactccgccgtggcctggtccaacaagtccgatttcgcctgcgccaacgccttcaacaacagcattatccccgaggacacattcttcccaagccccgagagcagctgcggtacccagagttttgggttgttggaccctaaattgtgctatctgttggacggaatcctgttcatttacggagtgatcctgaccgcattgttcctgcgggttaagttttccagatccgcagacgcacccgcttaccaacaagggcagaaccaactctacaatgaacttaatttggggcggagggaagagtacgacgttctggacaaaaggaggggacgagatcccgagatgggcggaaagcctcgaaggaagaatccgcaagaggggctttataacgaactccagaaagataaaatggcagaagcctatagtgagattgggatgaagggagaaaggaggaggggtaaaggtcacgatgggttgtaccaaggattgagcacagccactaaagatacctatgatgcgctccacatgcaggccctgccgccaagataa

SEQ ID NO: 4715 - DNA, 2448 bp, synthetic construct
  source 1..2448: mol_type = other DNA
atggccttaccagtgaccgccttgctcctgccgctggccttgctgctccacgccgccaggccggacgacatccagttgacccagtcccccagctcactcagcgccagtgtgggggaccgggtgaccattacctgtaaagccagtcagagtgtggactatgacggggatagcttcctgaattggtatcagcagaagcctggcaaagccccaaagctgctgatctacgctgcatctaatctggagtcaggcgtgccttccaggttctccggtagtgggtctgggaccgatttcacattgaccatttcatccctccaacccgaggatttcgctacatattactgtcagcagtccaatgaggaccctctcacctttggccagggcaccaaagttgaaattaagagactcgaggacctgaagaacgtgttcccacctgaggtggccgtgttcgagcctagcgaggccgagatcagccacacccagaaagccaccctcgtgtgcctggctaccggcttctaccccgaccatgtggaactgtcttggtgggtcaacggcaaagaggtgcacagcggcgtgtctaccgacccccagccactgaaagaacagcccgccctgaacgacagccggtactgcctgagcagcagactgagagtgtccgccaccttctggcagaacccccggaaccacttcagatgccaggtgcagttctacggcctgagcgagaacgacgagtggacccaggacagagccaagcccgtgacccagatcgtgtctgccgaagcctggggcagagccgattgcggatcccagagcttcggcctgctggaccccaagctgtgctacctgctggatggcatcctgttcatctacggcgtgatcctgaccgccctgttcctgagagtgaagttcagcagaagcgccgacgcccctgcctaccagcagggacagaaccaactgtacaacgagctgaacctgggcagacgggaagagtacgacgtgctggacaagcggagaggcagggaccctgagatgggcggaaagccccggagaaagaacccccaggaaggactgtataacgaactccagaaagacaagatggccgaagcctacagcgagatcggcatgaagggcgagcggagaagaggcaagggccacgatggcctgtaccagggcctgagcaccgccaccaaggacacctatgacgccctgcacatgcaggccctgcctccaagaagggccaagcgatctggatctggagcaacaaacttctcactactcaaacaagcaggtgacgtggaggagaatcccgggcctactagtatggactggatttggcgcatccttttccttgtcggcgctgctaccggcgcgcattccttcgaagtccaacttgtggagtctggagggggcctggtgcagcccggcggctctctcagactgtcttgtgcggcaagcggctacaccttcacctcttactggatagaatgggtgaggcaggcacctggaaagggactggagtggattggagagattctgccaggagggggagatacaaattacaatgaaatcttcaaggggcgggccaccttttcagcggataccagcaagaatacagcttacctgcagatgaatagcctccgggcagaagataccgctgtttattattgcacgagacgggtgccaataagactggactattgggggcaagggactcttgtcaccgtcagttcaacgcgtatccagaaccctgatcctgccgtgtaccagctgcgggatagcaagagcagcgacaagagcgtgtgtctgttcaccgacttcgacagccagaccaacgtgtcccagagcaaggactccgacgtgtacatcaccgataagaccgtgctggacatgcggagcatggacttcaagagcaactccgccgtggcctggtccaacaagtccgatttcgcctgcgccaacgccttcaacaacagcattatccccgaggacacattcttcccaagccccgagagcagctgcggtacccagagttttgggttgttggaccctaaattgtgctatctgttggacggaatcctgttcatttacggagtgatcctgaccgcattgttcctgcgggttaagttttccagatccgcagacgcacccgcttaccaacaagggcagaaccaactctacaatgaacttaatttggggcggagggaagagtacgacgttctggacaaaaggaggggacgagatcccgagatgggcggaaagcctcgaaggaagaatccgcaagaggggctttataacgaactccagaaagataaaatggcagaagcctatagtgagattgggatgaagggagaaaggaggaggggtaaaggtcacgatgggttgtaccaaggattgagcacagccactaaagatacctatgatgcgctccacatgcaggccctgccgccaaga

SEQ ID NO: 4716 - DNA, 2445 bp, synthetic construct
  source 1..2445: mol_type = other DNA
atggccttaccagtgaccgccttgctcctgccgctggccttgctgctccacgccgccaggccggacatccagttgacccagtcccccagctcactcagcgccagtgtgggggaccgggtgaccattacctgtaaagccagtcagagtgtggactatgacggggatagcttcctgaattggtatcagcagaagcctggcaaagccccaaagctgctgatctacgctgcatctaatctggagtcaggcgtgccttccaggttctccggtagtgggtctgggaccgatttcacattgaccatttcatccctccaacccgaggatttcgctacatattactgtcagcagtccaatgaggaccctctcacctttggccagggcaccaaagttgaaattaagagactcgaggacctgaagaacgtgttcccacctgaggtggccgtgttcgagcctagcgaggccgagatcagccacacccagaaagccaccctcgtgtgcctggctaccggcttctaccccgaccatgtggaactgtcttggtgggtcaacggcaaagaggtgcacagcggcgtgtctaccgacccccagccactgaaagaacagcccgccctgaacgacagccggtactgcctgagcagcagactgagagtgtccgccaccttctggcagaacccccggaaccacttcagatgccaggtgcagttctacggcctgagcgagaacgacgagtggacccaggacagagccaagcccgtgacccagatcgtgtctgccgaagcctggggcagagccgattgcggatcccagagcttcggcctgctggaccccaagctgtgctacctgctggatggcatcctgttcatctacggcgtgatcctgaccgccctgttcctgagagtgaagttcagcagaagcgccgacgcccctgcctaccagcagggacagaaccaactgtacaacgagctgaacctgggcagacgggaagagtacgacgtgctggacaagcggagaggcagggaccctgagatgggcggaaagccccggagaaagaacccccaggaaggactgtataacgaactccagaaagacaagatggccgaagcctacagcgagatcggcatgaagggcgagcggagaagaggcaagggccacgatggcctgtaccagggcctgagcaccgccaccaaggacacctatgacgccctgcacatgcaggccctgcctccaagaagggccaagcgatctggatctggagcaacaaacttctcactactcaaacaagcaggtgacgtggaggagaatcccgggcctactagtatggactggatttggcgcatccttttccttgtcggcgctgctaccggcgcgcattccttcgaagtccaacttgtggagtctggagggggcctggtgcagcccggcggctctctcagactgtcttgtgcggcaagcggctacaccttcacctcttactggatagaatgggtgaggcaggcacctggaaagggactggagtggattggagagattctgccaggagggggagatacaaattacaatgaaatcttcaaggggcgggccaccttttcagcggataccagcaagaatacagcttacctgcagatgaatagcctccgggcagaagataccgctgtttattattgcacgagacgggtgccaataagactggactattgggggcaagggactcttgtcaccgtcagttcaacgcgtatccagaaccctgatcctgccgtgtaccagctgcgggatagcaagagcagcgacaagagcgtgtgtctgttcaccgacttcgacagccagaccaacgtgtcccagagcaaggactccgacgtgtacatcaccgataagaccgtgctggacatgcggagcatggacttcaagagcaactccgccgtggcctggtccaacaagtccgatttcgcctgcgccaacgccttcaacaacagcattatccccgaggacacattcttcccaagccccgagagcagctgcggtacccagagttttgggttgttggaccctaaattgtgctatctgttggacggaatcctgttcatttacggagtgatcctgaccgcattgttcctgcgggttaagttttccagatccgcagacgcacccgcttaccaacaagggcagaaccaactctacaatgaacttaatttggggcggagggaagagtacgacgttctggacaaaaggaggggacgagatcccgagatgggcggaaagcctcgaaggaagaatccgcaagaggggctttataacgaactccagaaagataaaatggcagaagcctatagtgagattgggatgaagggagaaaggaggaggggtaaaggtcacgatgggttgtaccaaggattgagcacagccactaaagatacctatgatgcgctccacatgcaggccctgccgccaaga

SEQ ID NO: 4717 - DNA, 2442 bp, synthetic construct
  source 1..2442: mol_type = other DNA
atggccttaccagtgaccgccttgctcctgccgctggccttgctgctccacgccgccaggccggacatcgtgatgacacagagccctgatagcctggccgtgtctctgggagagagagccaccattaactgcaaggccagccagagcgtggactacgagggcgacagcttcctgaactggtatcagcagaagcccggccagcctcctaagctgctgatctacgccgccagcaatctggaaagcggcgtgccaagcagattttccggctctggcagcggcaccgatttcaccctgacaatatccagcctccagcctgaggacgtggccgtgtactactgccagcagagcaatgaggaccctctgacctttggccagggcaccaaggtggaaatcaagctcgaggacctgaagaacgtgttcccacctgaggtggccgtgttcgagcctagcgaggccgagatcagccacacccagaaagccaccctcgtgtgcctggctaccggcttctaccccgaccatgtggaactgtcttggtgggtcaacggcaaagaggtgcacagcggcgtgtctaccgacccccagccactgaaagaacagcccgccctgaacgacagccggtactgcctgagcagcagactgagagtgtccgccaccttctggcagaacccccggaaccacttcagatgccaggtgcagttctacggcctgagcgagaacgacgagtggacccaggacagagccaagcccgtgacccagatcgtgtctgccgaagcctggggcagagccgattgcggatcccagagcttcggcctgctggaccccaagctgtgctacctgctggatggcatcctgttcatctacggcgtgatcctgaccgccctgttcctgagagtgaagttcagcagaagcgccgacgcccctgcctaccagcagggacagaaccaactgtacaacgagctgaacctgggcagacgggaagagtacgacgtgctggacaagcggagaggcagggaccctgagatgggcggaaagccccggagaaagaacccccaggaaggactgtataacgaactccagaaagacaagatggccgaagcctacagcgagatcggcatgaagggcgagcggagaagaggcaagggccacgatggcctgtaccagggcctgagcaccgccaccaaggacacctatgacgccctgcacatgcaggccctgcctccaagaagggccaagcgatctggatctggagcaacaaacttctcactactcaaacaagcaggtgacgtggaggagaatcccgggcctactagtatggactggatttggcgcatccttttccttgtcggcgctgctaccggcgcgcattccttcgaagtccaacttgtggagtctggagggggcctggtgcagcccggcggctctctcagactgtcttgtgcggcaagcggctacaccttcacctcttactggatagaatgggtgaggcaggcacctggaaagggactggagtggattggagagattctgccaggagggggagatacaaattacaatgaaatcttcaaggggcgggccaccttttcagcggataccagcaagaatacagcttacctgcagatgaatagcctccgggcagaagataccgctgtttattattgcacgagacgggtgccaataagactggactattgggggcaagggactcttgtcaccgtcagttcaacgcgtatccagaaccctgatcctgccgtgtaccagctgcgggatagcaagagcagcgacaagagcgtgtgtctgttcaccgacttcgacagccagaccaacgtgtcccagagcaaggactccgacgtgtacatcaccgataagaccgtgctggacatgcggagcatggacttcaagagcaactccgccgtggcctggtccaacaagtccgatttcgcctgcgccaacgccttcaacaacagcattatccccgaggacacattcttcccaagccccgagagcagctgcggtacccagagttttgggttgttggaccctaaattgtgctatctgttggacggaatcctgttcatttacggagtgatcctgaccgcattgttcctgcgggttaagttttccagatccgcagacgcacccgcttaccaacaagggcagaaccaactctacaatgaacttaatttggggcggagggaagagtacgacgttctggacaaaaggaggggacgagatcccgagatgggcggaaagcctcgaaggaagaatccgcaagaggggctttataacgaactccagaaagataaaatggcagaagcctatagtgagattgggatgaagggagaaaggaggaggggtaaaggtcacgatgggttgtaccaaggattgagcacagccactaaagatacctatgatgcgctccacatgcaggccctgccgccaaga

SEQ ID NO: 4718 - DNA, 2442 bp, synthetic construct
  source 1..2442: mol_type = other DNA
atggccttaccagtgaccgccttgctcctgccgctggccttgctgctccacgccgccaggccggacatcgtgatgacacagagccctgatagcctggccgtgtctctgggagagagagccaccattaactgcaaggccagccagagcgtggactacgacggcgacagcttcctgaactggtatcagcagaagcccggccagcctcctaagctgctgatctacgccgccagcaatctggaaagcggcgtgccaagcagattttccggctctggcagcggcaccgatttcaccctgacaatatccagcctccagcctgaggacgtggccgtgtactactgccagcagagcaacgacgaccctctgacctttggacagggcaccaaggtggaaatcaaactcgaggacctgaagaacgtgttcccacctgaggtggccgtgttcgagcctagcgaggccgagatcagccacacccagaaagccaccctcgtgtgcctggctaccggcttctaccccgaccatgtggaactgtcttggtgggtcaacggcaaagaggtgcacagcggcgtgtctaccgacccccagccactgaaagaacagcccgccctgaacgacagccggtactgcctgagcagcagactgagagtgtccgccaccttctggcagaacccccggaaccacttcagatgccaggtgcagttctacggcctgagcgagaacgacgagtggacccaggacagagccaagcccgtgacccagatcgtgtctgccgaagcctggggcagagccgattgcggatcccagagcttcggcctgctggaccccaagctgtgctacctgctggatggcatcctgttcatctacggcgtgatcctgaccgccctgttcctgagagtgaagttcagcagaagcgccgacgcccctgcctaccagcagggacagaaccaactgtacaacgagctgaacctgggcagacgggaagagtacgacgtgctggacaagcggagaggcagggaccctgagatgggcggaaagccccggagaaagaacccccaggaaggactgtataacgaactccagaaagacaagatggccgaagcctacagcgagatcggcatgaagggcgagcggagaagaggcaagggccacgatggcctgtaccagggcctgagcaccgccaccaaggacacctatgacgccctgcacatgcaggccctgcctccaagaagggccaagcgatctggatctggagcaacaaacttctcactactcaaacaagcaggtgacgtggaggagaatcccgggcctactagtatggactggatttggcgcatccttttccttgtcggcgctgctaccggcgcgcattccttcgaagtccaacttgtggagtctggagggggcctggtgcagcccggcggctctctcagactgtcttgtgcggcaagcggctacaccttcacctcttactggatagaatgggtgaggcaggcacctggaaagggactggagtggattggagagattctgccaggagggggagatacaaattacaatgaaatcttcaaggggcgggccaccttttcagcggataccagcaagaatacagcttacctgcagatgaatagcctccgggcagaagataccgctgtttattattgcacgagacgggtgccaataagactggactattgggggcaagggactcttgtcaccgtcagttcaacgcgtatccagaaccctgatcctgccgtgtaccagctgcgggatagcaagagcagcgacaagagcgtgtgtctgttcaccgacttcgacagccagaccaacgtgtcccagagcaaggactccgacgtgtacatcaccgataagaccgtgctggacatgcggagcatggacttcaagagcaactccgccgtggcctggtccaacaagtccgatttcgcctgcgccaacgccttcaacaacagcattatccccgaggacacattcttcccaagccccgagagcagctgcggtacccagagttttgggttgttggaccctaaattgtgctatctgttggacggaatcctgttcatttacggagtgatcctgaccgcattgttcctgcgggttaagttttccagatccgcagacgcacccgcttaccaacaagggcagaaccaactctacaatgaacttaatttggggcggagggaagagtacgacgttctggacaaaaggaggggacgagatcccgagatgggcggaaagcctcgaaggaagaatccgcaagaggggctttataacgaactccagaaagataaaatggcagaagcctatagtgagattgggatgaagggagaaaggaggaggggtaaaggtcacgatgggttgtaccaaggattgagcacagccactaaagatacctatgatgcgctccacatgcaggccctgccgccaaga

SEQ ID NO: 4719 - DNA, 2442 bp, synthetic construct
  source 1..2442: mol_type = other DNA
atggccttaccagtgaccgccttgctcctgccgctggccttgctgctccacgccgccaggccggacatcgtgatgacacagagccctgatagcctggccgtgtctctgggagagagagccaccattaactgcaaggccagccagagcgtggactacgacggcgacagcttcctgaactggtatcagcagaagcccggccagcctcctaagctgctgatctacgccgccagcaatctggaaagcggcgtgccaagcagattttccggctctggcagcggcaccgatttcaccctgacaatatccagcctccagcctgaggacgtggccgtgtactactgccagcagagcaacgacgaccctctgacctttggacagggcaccaaggtggaaatcaaactcgaggacctgaagaacgtgttcccacctgaggtggccgtgttcgagcctagcgaggccgagatcagccacacccagaaagccaccctcgtgtgcctggctaccggcttctaccccgaccatgtggaactgtcttggtgggtcaacggcaaagaggtgcacagcggcgtgtctaccgacccccagccactgaaagaacagcccgccctgaacgacagccggtactgcctgagcagcagactgagagtgtccgccaccttctggcagaacccccggaaccacttcagatgccaggtgcagttctacggcctgagcgagaacgacgagtggacccaggacagagccaagcccgtgacccagatcgtgtctgccgaagcctggggcagagccgattgcggatcccagagcttcggcctgctggaccccaagctgtgctacctgctggatggcatcctgttcatctacggcgtgatcctgaccgccctgttcctgagagtgaagttcagcagaagcgccgacgcccctgcctaccagcagggacagaaccaactgtacaacgagctgaacctgggcagacgggaagagtacgacgtgctggacaagcggagaggcagggaccctgagatgggcggaaagccccggagaaagaacccccaggaaggactgtataacgaactccagaaagacaagatggccgaagcctacagcgagatcggcatgaagggcgagcggagaagaggcaagggccacgatggcctgtaccagggcctgagcaccgccaccaaggacacctatgacgccctgcacatgcaggccctgcctccaagaagggccaagcgatctggatctggagcaacaaacttctcactactcaaacaagcaggtgacgtggaggagaatcccgggcctactagtatggactggatttggcgcatccttttccttgtcggcgctgctaccggcgcgcattccttcgaagtccaacttgtggagtctggagggggcctggtgcagcccggcggctctctcagactgtcttgtgcggcaagcggctacaccttcagctcttactggatagaatgggtgaggcaggcacctggaaagggactggagtggattggagagattctgccaggagggggagatacaaattacaatgaaatcttcaaggggcgggccaccttttcagcggataccagcaagaatacagcttacctgcagatgaatagcctccgggcagaagataccgctgtttattattgcacgagacgggtgccaataagactggactattgggggcaagggactcttgtcaccgtcagttcaacgcgtatccagaaccctgatcctgccgtgtaccagctgcgggatagcaagagcagcgacaagagcgtgtgtctgttcaccgacttcgacagccagaccaacgtgtcccagagcaaggactccgacgtgtacatcaccgataagaccgtgctggacatgcggagcatggacttcaagagcaactccgccgtggcctggtccaacaagtccgatttcgcctgcgccaacgccttcaacaacagcattatccccgaggacacattcttcccaagccccgagagcagctgcggtacccagagttttgggttgttggaccctaaattgtgctatctgttggacggaatcctgttcatttacggagtgatcctgaccgcattgttcctgcgggttaagttttccagatccgcagacgcacccgcttaccaacaagggcagaaccaactctacaatgaacttaatttggggcggagggaagagtacgacgttctggacaaaaggaggggacgagatcccgagatgggcggaaagcctcgaaggaagaatccgcaagaggggctttataacgaactccagaaagataaaatggcagaagcctatagtgagattgggatgaagggagaaaggaggaggggtaaaggtcacgatgggttgtaccaaggattgagcacagccactaaagatacctatgatgcgctccacatgcaggccctgccgccaaga

SEQ ID NO: 4720 - DNA, 1866 bp, synthetic construct
  source 1..1866: mol_type = other DNA
atggccttaccagtgaccgccttgctcctgccgctggccttgctgctccacgccgccaggccggacgacatccagttgacccagtcccccagctcactcagcgccagtgtgggggaccgggtgaccattacctgtaaagccagtcagagtgtggactatgagggggatagcttcctgaattggtatcagcagaagcctggcaaagccccaaagctgctgatctacgctgcatctaatctggagtcaggcgtgccttctaggttctccggtagtgggtctgggaccgatttcacattgaccatttcatccctccaacccgaggatttcgctacatattactgtcagcagtccaatgaggaccctctcacctttggccagggcaccaaagttgaaattaagagactcgaggacctgaagaacgtgttcccacctgaggtggccgtgttcgagcctagcgaggccgagatcagccacacccagaaagccaccctcgtgtgcctggctaccggcttctaccccgaccatgtggaactgtcttggtgggtcaacggcaaagaggtgcacagcggcgtgtgtaccgacccccagccactgaaagaacagcccgccctgaacgacagccggtactgcctgagcagcagactgagagtgtccgccaccttctggcagaacccccggaaccacttcagatgccaggtgcagttctacggcctgagcgagaacgacgagtggacccaggacagagccaagcccgtgacccagatcgtgtctgccgaagcctggggcagagccgattgcggctttaccagcgagagctaccagcagggcgtgctgagcgccaccatcctgtacgagatcctgctgggcaaggccaccctgtacgccgtgctggtgtctgccctggtgctgatggctatggtcaagcggaaggacagccggggaagggccaagcgatctggatctggagcaacaaacttctcactactcaaacaagcaggtgacgtggaggagaatcccgggcctactagtatggactggatttggcgcatccttttccttgtcggcgctgctaccggcgcgcattccttcgaagtccaacttgtggagtctggagggggcctggtgcagcccggcggctctctcagactgtcttgtgcggcaagcggctacaccttcagctcttactggatagaatgggtgaggcaggcacctggaaagggactggagtggattggagagattctgccaggagggggagatacaaattacaatgaaatcttcaaggggcgggccaccttttcagcggataccagcaagaatacagcttacctgcagatgaatagcctccgggcagaagataccgctgtttattattgcacgagacgggtgccaataagactggactattgggggcaagggactcttgtcaccgtcagttcaacgcgtatccagaaccctgatcctgccgtgtaccagctgcgggatagcaagagcagcgacaagagcgtgtgtctgttcaccgacttcgacagccagaccaacgtgtcccagagcaaggactccgacgtgtacatcaccgataagtgcgtgctggacatgcggagcatggacttcaagagcaactccgccgtggcctggtccaacaagtccgatttcgcctgcgccaacgccttcaacaacagcattatccccgaggacacattcttcccaagccccgagagcagctgcgacgtgaagctggtggaaaagagcttcgagacagacaccaacctgaacttccagaacctgagcgtgatcggcttcagaatcctgctgctgaaagtggccggctttaacctgctgatgaccctgcggctgtggtccagc

SEQ ID NO: 4721 - DNA, 1863 bp, synthetic construct
  source 1..1863: mol_type = other DNA
atggccttaccagtgaccgccttgctcctgccgctggccttgctgctccacgccgccaggccggacatccagttgacccagtcccccagctcactcagcgccagtgtgggggaccgggtgaccattacctgtaaagccagtcagagtgtggactatgagggggatagcttcctgaattggtatcagcagaagcctggcaaagccccaaagctgctgatctacgctgcatctaatctggagtcaggcgtgccttctaggttctccggtagtgggtctgggaccgatttcacattgaccatttcatccctccaacccgaggatttcgctacatattactgtcagcagtccaatgaggaccctctcacctttggccagggcaccaaagttgaaattaagagactcgaggacctgaagaacgtgttcccacctgaggtggccgtgttcgagcctagcgaggccgagatcagccacacccagaaagccaccctcgtgtgcctggctaccggcttctaccccgaccatgtggaactgtcttggtgggtcaacggcaaagaggtgcacagcggcgtgtgtaccgacccccagccactgaaagaacagcccgccctgaacgacagccggtactgcctgagcagcagactgagagtgtccgccaccttctggcagaacccccggaaccacttcagatgccaggtgcagttctacggcctgagcgagaacgacgagtggacccaggacagagccaagcccgtgacccagatcgtgtctgccgaagcctggggcagagccgattgcggctttaccagcgagagctaccagcagggcgtgctgagcgccaccatcctgtacgagatcctgctgggcaaggccaccctgtacgccgtgctggtgtctgccctggtgctgatggctatggtcaagcggaaggacagccggggaagggccaagcgatctggatctggagcaacaaacttctcactactcaaacaagcaggtgacgtggaggagaatcccgggcctactagtatggactggatttggcgcatccttttccttgtcggcgctgctaccggcgcgcattccttcgaagtccaacttgtggagtctggagggggcctggtgcagcccggcggctctctcagactgtcttgtgcggcaagcggctacaccttcagctcttactggatagaatgggtgaggcaggcacctggaaagggactggagtggattggagagattctgccaggagggggagatacaaattacaatgaaatcttcaaggggcgggccaccttttcagcggataccagcaagaatacagcttacctgcagatgaatagcctccgggcagaagataccgctgtttattattgcacgagacgggtgccaataagactggactattgggggcaagggactcttgtcaccgtcagttcaacgcgtatccagaaccctgatcctgccgtgtaccagctgcgggatagcaagagcagcgacaagagcgtgtgtctgttcaccgacttcgacagccagaccaacgtgtcccagagcaaggactccgacgtgtacatcaccgataagtgcgtgctggacatgcggagcatggacttcaagagcaactccgccgtggcctggtccaacaagtccgatttcgcctgcgccaacgccttcaacaacagcattatccccgaggacacattcttcccaagccccgagagcagctgcgacgtgaagctggtggaaaagagcttcgagacagacaccaacctgaacttccagaacctgagcgtgatcggcttcagaatcctgctgctgaaagtggccggctttaacctgctgatgaccctgcggctgtggtccagc

SEQ ID NO: 4722 - DNA, 1872 bp, synthetic construct
  source 1..1872: mol_type = other DNA
atggccttaccagtgaccgccttgctcctgccgctggccttgctgctccacgccgccaggccggacgacatccagttgacccagtcccccagctcactcagcgccagtgtgggggaccgggtgaccattacctgtaaagccagtcagagtgtggactatgagggggatagcttcctgaattggtatcagcagaagcctggcaaagccccaaagctgctgatctacgctgcatctaatctggagtcaggcgtgccttctaggttctccggtagtgggtctgggaccgatttcacattgaccatttcatccctccaacccgaggatttcgctacatattactgtcagcagtccaatgaggaccctctcacctttggccagggcaccaaagttgaaattaagagactcgaggacctgaagaacgtgttcccacctgaggtggccgtgttcgagcctagcgaggccgagatcagccacacccagaaagccaccctcgtgtgcctggctaccggcttctaccccgaccatgtggaactgtcttggtgggtcaacggcaaagaggtgcacagcggcgtgtgtaccgacccccagccactgaaagaacagcccgccctgaacgacagccggtactgcctgagcagcagactgagagtgtccgccaccttctggcagaacccccggaaccacttcagatgccaggtgcagttctacggcctgagcgagaacgacgagtggacccaggacagagccaagcccgtgacccagatcgtgtctgccgaagcctggggcagagccgattgcggctttaccagcgagagctaccagcagggcgtgctgagcgccaccatcctgtacgagatcctgctgggcaaggccaccctgtacgccgtgctggtgtctgccctggtgctgatggctatggtcaagcggaaggacagccggggaagggccaagcgatctggatctggagcaacaaacttctcactactcaaacaagcaggtgacgtggaggagaatcccgggcctactagtatggactggatttggcgcatccttttccttgtcggcgctgctaccggcgcgcattccttcgaagaagtccaacttgtggagtctggagggggcctggtgcagcccggcggctctctcagactgtcttgtgcggcaagcggctacaccttcagctcttactggatagaatgggtgaggcaggcacctggaaagggactggagtggattggagagattctgccaggagggggagatacaaattacaatgaaatcttcaaggggcgggccaccttttcagcggataccagcaagaatacagcttacctgcagatgaatagcctccgggcagaagataccgctgtttattattgcacgagacgggtgccaataagactggactattgggggcaagggactcttgtcaccgtcagttcaacgcgtatccagaaccctgatcctgccgtgtaccagctgcgggatagcaagagcagcgacaagagcgtgtgtctgttcaccgacttcgacagccagaccaacgtgtcccagagcaaggactccgacgtgtacatcaccgataagtgcgtgctggacatgcggagcatggacttcaagagcaactccgccgtggcctggtccaacaagtccgatttcgcctgcgccaacgccttcaacaacagcattatccccgaggacacattcttcccaagccccgagagcagctgcgacgtgaagctggtggaaaagagcttcgagacagacaccaacctgaacttccagaacctgagcgtgatcggcttcagaatcctgctgctgaaagtggccggctttaacctgctgatgaccctgcggctgtggtccagctaa

SEQ ID NO: 4723 - DNA, 1869 bp, synthetic construct
  source 1..1869: mol_type = other DNA
atggccttaccagtgaccgccttgctcctgccgctggccttgctgctccacgccgccaggccggacatccagttgacccagtcccccagctcactcagcgccagtgtgggggaccgggtgaccattacctgtaaagccagtcagagtgtggactatgagggggatagcttcctgaattggtatcagcagaagcctggcaaagccccaaagctgctgatctacgctgcatctaatctggagtcaggcgtgccttctaggttctccggtagtgggtctgggaccgatttcacattgaccatttcatccctccaacccgaggatttcgctacatattactgtcagcagtccaatgaggaccctctcacctttggccagggcaccaaagttgaaattaagagactcgaggacctgaagaacgtgttcccacctgaggtggccgtgttcgagcctagcgaggccgagatcagccacacccagaaagccaccctcgtgtgcctggctaccggcttctaccccgaccatgtggaactgtcttggtgggtcaacggcaaagaggtgcacagcggcgtgtgtaccgacccccagccactgaaagaacagcccgccctgaacgacagccggtactgcctgagcagcagactgagagtgtccgccaccttctggcagaacccccggaaccacttcagatgccaggtgcagttctacggcctgagcgagaacgacgagtggacccaggacagagccaagcccgtgacccagatcgtgtctgccgaagcctggggcagagccgattgcggctttaccagcgagagctaccagcagggcgtgctgagcgccaccatcctgtacgagatcctgctgggcaaggccaccctgtacgccgtgctggtgtctgccctggtgctgatggctatggtcaagcggaaggacagccggggaagggccaagcgatctggatctggagcaacaaacttctcactactcaaacaagcaggtgacgtggaggagaatcccgggcctactagtatggactggatttggcgcatccttttccttgtcggcgctgctaccggcgcgcattccttcgaagaagtccaacttgtggagtctggagggggcctggtgcagcccggcggctctctcagactgtcttgtgcggcaagcggctacaccttcagctcttactggatagaatgggtgaggcaggcacctggaaagggactggagtggattggagagattctgccaggagggggagatacaaattacaatgaaatcttcaaggggcgggccaccttttcagcggataccagcaagaatacagcttacctgcagatgaatagcctccgggcagaagataccgctgtttattattgcacgagacgggtgccaataagactggactattgggggcaagggactcttgtcaccgtcagttcaacgcgtatccagaaccctgatcctgccgtgtaccagctgcgggatagcaagagcagcgacaagagcgtgtgtctgttcaccgacttcgacagccagaccaacgtgtcccagagcaaggactccgacgtgtacatcaccgataagtgcgtgctggacatgcggagcatggacttcaagagcaactccgccgtggcctggtccaacaagtccgatttcgcctgcgccaacgccttcaacaacagcattatccccgaggacacattcttcccaagccccgagagcagctgcgacgtgaagctggtggaaaagagcttcgagacagacaccaacctgaacttccagaacctgagcgtgatcggcttcagaatcctgctgctgaaagtggccggctttaacctgctgatgaccctgcggctgtggtccagctaa

SEQ ID NO: 4724 - DNA, 1869 bp, synthetic construct
  source 1..1869: mol_type = other DNA
atggccttaccagtgaccgccttgctcctgccgctggccttgctgctccacgccgccaggccggacgacatccagttgacccagtcccccagctcactcagcgccagtgtgggggaccgggtgaccattacctgtaaagccagtcagagtgtggactatgacggggatagcttcctgaattggtatcagcagaagcctggcaaagccccaaagctgctgatctacgctgcatctaatctggagtcaggcgtgccttccaggttctccggtagtgggtctgggaccgatttcacattgaccatttcatccctccaacccgaggatttcgctacatattactgtcagcagtccaatgaggaccctctcacctttggccagggcaccaaagttgaaattaagagactcgaggacctgaagaacgtgttcccacctgaggtggccgtgttcgagcctagcgaggccgagatcagccacacccagaaagccaccctcgtgtgcctggctaccggcttctaccccgaccatgtggaactgtcttggtgggtcaacggcaaagaggtgcacagcggcgtgtgtaccgacccccagccactgaaagaacagcccgccctgaacgacagccggtactgcctgagcagcagactgagagtgtccgccaccttctggcagaacccccggaaccacttcagatgccaggtgcagttctacggcctgagcgagaacgacgagtggacccaggacagagccaagcccgtgacccagatcgtgtctgccgaagcctggggcagagccgattgcggctttaccagcgagagctaccagcagggcgtgctgagcgccaccatcctgtacgagatcctgctgggcaaggccaccctgtacgccgtgctggtgtctgccctggtgctgatggctatggtcaagcggaaggacagccggggaagggccaagcgatctggatctggagcaacaaacttctcactactcaaacaagcaggtgacgtggaggagaatcccgggcctactagtatggactggatttggcgcatccttttccttgtcggcgctgctaccggcgcgcattccttcgaagaagtccaacttgtggagtctggagggggcctggtgcagcccggcggctctctcagactgtcttgtgcggcaagcggctacaccttcagctcttactggatagaatgggtgaggcaggcacctggaaagggactggagtggattggagagattctgccaggagggggagatacaaattacaatgaaatcttcaaggggcgggccaccttttcagcggataccagcaagaatacagcttacctgcagatgaatagcctccgggcagaagataccgctgtttattattgcacgagacgggtgccaataagactggactattgggggcaagggactcttgtcaccgtcagttcaacgcgtatccagaaccctgatcctgccgtgtaccagctgcgggatagcaagagcagcgacaagagcgtgtgtctgttcaccgacttcgacagccagaccaacgtgtcccagagcaaggactccgacgtgtacatcaccgataagtgcgtgctggacatgcggagcatggacttcaagagcaactccgccgtggcctggtccaacaagtccgatttcgcctgcgccaacgccttcaacaacagcattatccccgaggacacattcttcccaagccccgagagcagctgcgacgtgaagctggtggaaaagagcttcgagacagacaccaacctgaacttccagaacctgagcgtgatcggcttcagaatcctgctgctgaaagtggccggctttaacctgctgatgaccctgcggctgtggtccagc

SEQ ID NO: 4725 - DNA, 1866 bp, synthetic construct
  source 1..1866: mol_type = other DNA
atggccttaccagtgaccgccttgctcctgccgctggccttgctgctccacgccgccaggccggacatccagttgacccagtcccccagctcactcagcgccagtgtgggggaccgggtgaccattacctgtaaagccagtcagagtgtggactatgacggggatagcttcctgaattggtatcagcagaagcctggcaaagccccaaagctgctgatctacgctgcatctaatctggagtcaggcgtgccttccaggttctccggtagtgggtctgggaccgatttcacattgaccatttcatccctccaacccgaggatttcgctacatattactgtcagcagtccaatgaggaccctctcacctttggccagggcaccaaagttgaaattaagagactcgaggacctgaagaacgtgttcccacctgaggtggccgtgttcgagcctagcgaggccgagatcagccacacccagaaagccaccctcgtgtgcctggctaccggcttctaccccgaccatgtggaactgtcttggtgggtcaacggcaaagaggtgcacagcggcgtgtgtaccgacccccagccactgaaagaacagcccgccctgaacgacagccggtactgcctgagcagcagactgagagtgtccgccaccttctggcagaacccccggaaccacttcagatgccaggtgcagttctacggcctgagcgagaacgacgagtggacccaggacagagccaagcccgtgacccagatcgtgtctgccgaagcctggggcagagccgattgcggctttaccagcgagagctaccagcagggcgtgctgagcgccaccatcctgtacgagatcctgctgggcaaggccaccctgtacgccgtgctggtgtctgccctggtgctgatggctatggtcaagcggaaggacagccggggaagggccaagcgatctggatctggagcaacaaacttctcactactcaaacaagcaggtgacgtggaggagaatcccgggcctactagtatggactggatttggcgcatccttttccttgtcggcgctgctaccggcgcgcattccttcgaagaagtccaacttgtggagtctggagggggcctggtgcagcccggcggctctctcagactgtcttgtgcggcaagcggctacaccttcagctcttactggatagaatgggtgaggcaggcacctggaaagggactggagtggattggagagattctgccaggagggggagatacaaattacaatgaaatcttcaaggggcgggccaccttttcagcggataccagcaagaatacagcttacctgcagatgaatagcctccgggcagaagataccgctgtttattattgcacgagacgggtgccaataagactggactattgggggcaagggactcttgtcaccgtcagttcaacgcgtatccagaaccctgatcctgccgtgtaccagctgcgggatagcaagagcagcgacaagagcgtgtgtctgttcaccgacttcgacagccagaccaacgtgtcccagagcaaggactccgacgtgtacatcaccgataagtgcgtgctggacatgcggagcatggacttcaagagcaactccgccgtggcctggtccaacaagtccgatttcgcctgcgccaacgccttcaacaacagcattatccccgaggacacattcttcccaagccccgagagcagctgcgacgtgaagctggtggaaaagagcttcgagacagacaccaacctgaacttccagaacctgagcgtgatcggcttcagaatcctgctgctgaaagtggccggctttaacctgctgatgaccctgcggctgtggtccagc

SEQ ID NO: 4726 - DNA, 1863 bp, synthetic construct
  source 1..1863: mol_type = other DNA
atggccttaccagtgaccgccttgctcctgccgctggccttgctgctccacgccgccaggccggacatcgtgatgacacagagccctgatagcctggccgtgtctctgggagagagagccaccattaactgcaaggccagccagagcgtggactacgagggcgacagcttcctgaactggtatcagcagaagcccggccagcctcctaagctgctgatctacgccgccagcaatctggaaagcggcgtgccaagcagattttccggctctggcagcggcaccgatttcaccctgacaatatccagcctccagcctgaggacgtggccgtgtactactgccagcagagcaatgaggaccctctgacctttggccagggcaccaaggtggaaatcaagctcgaggacctgaagaacgtgttcccacctgaggtggccgtgttcgagcctagcgaggccgagatcagccacacccagaaagccaccctcgtgtgcctggctaccggcttctaccccgaccatgtggaactgtcttggtgggtcaacggcaaagaggtgcacagcggcgtgtgtaccgacccccagccactgaaagaacagcccgccctgaacgacagccggtactgcctgagcagcagactgagagtgtccgccaccttctggcagaacccccggaaccacttcagatgccaggtgcagttctacggcctgagcgagaacgacgagtggacccaggacagagccaagcccgtgacccagatcgtgtctgccgaagcctggggcagagccgattgcggctttaccagcgagagctaccagcagggcgtgctgagcgccaccatcctgtacgagatcctgctgggcaaggccaccctgtacgccgtgctggtgtctgccctggtgctgatggctatggtcaagcggaaggacagccggggaagggccaagcgatctggatctggagcaacaaacttctcactactcaaacaagcaggtgacgtggaggagaatcccgggcctactagtatggactggatttggcgcatccttttccttgtcggcgctgctaccggcgcgcattccttcgaagaagtccaacttgtggagtctggagggggcctggtgcagcccggcggctctctcagactgtcttgtgcggcaagcggctacaccttcagctcttactggatagaatgggtgaggcaggcacctggaaagggactggagtggattggagagattctgccaggagggggagatacaaattacaatgaaatcttcaaggggcgggccaccttttcagcggataccagcaagaatacagcttacctgcagatgaatagcctccgggcagaagataccgctgtttattattgcacgagacgggtgccaataagactggactattgggggcaagggactcttgtcaccgtcagttcaacgcgtatccagaaccctgatcctgccgtgtaccagctgcgggatagcaagagcagcgacaagagcgtgtgtctgttcaccgacttcgacagccagaccaacgtgtcccagagcaaggactccgacgtgtacatcaccgataagtgcgtgctggacatgcggagcatggacttcaagagcaactccgccgtggcctggtccaacaagtccgatttcgcctgcgccaacgccttcaacaacagcattatccccgaggacacattcttcccaagccccgagagcagctgcgacgtgaagctggtggaaaagagcttcgagacagacaccaacctgaacttccagaacctgagcgtgatcggcttcagaatcctgctgctgaaagtggccggctttaacctgctgatgaccctgcggctgtggtccagc

SEQ ID NO: 4727 - DNA, 1863 bp, synthetic construct
  source 1..1863: mol_type = other DNA
atggccttaccagtgaccgccttgctcctgccgctggccttgctgctccacgccgccaggccggacatcgtgatgacacagagccctgatagcctggccgtgtctctgggagagagagccaccattaactgcaaggccagccagagcgtggactacgacggcgacagcttcctgaactggtatcagcagaagcccggccagcctcctaagctgctgatctacgccgccagcaatctggaaagcggcgtgccaagcagattttccggctctggcagcggcaccgatttcaccctgacaatatccagcctccagcctgaggacgtggccgtgtactactgccagcagagcaacgacgaccctctgacctttggacagggcaccaaggtggaaatcaaactcgaggacctgaagaacgtgttcccacctgaggtggccgtgttcgagcctagcgaggccgagatcagccacacccagaaagccaccctcgtgtgcctggctaccggcttctaccccgaccatgtggaactgtcttggtgggtcaacggcaaagaggtgcacagcggcgtgtgtaccgacccccagccactgaaagaacagcccgccctgaacgacagccggtactgcctgagcagcagactgagagtgtccgccaccttctggcagaacccccggaaccacttcagatgccaggtgcagttctacggcctgagcgagaacgacgagtggacccaggacagagccaagcccgtgacccagatcgtgtctgccgaagcctggggcagagccgattgcggctttaccagcgagagctaccagcagggcgtgctgagcgccaccatcctgtacgagatcctgctgggcaaggccaccctgtacgccgtgctggtgtctgccctggtgctgatggctatggtcaagcggaaggacagccggggaagggccaagcgatctggatctggagcaacaaacttctcactactcaaacaagcaggtgacgtggaggagaatcccgggcctactagtatggactggatttggcgcatccttttccttgtcggcgctgctaccggcgcgcattccttcgaagaagtccaacttgtggagtctggagggggcctggtgcagcccggcggctctctcagactgtcttgtgcggcaagcggctacaccttcagctcttactggatagaatgggtgaggcaggcacctggaaagggactggagtggattggagagattctgccaggagggggagatacaaattacaatgaaatcttcaaggggcgggccaccttttcagcggataccagcaagaatacagcttacctgcagatgaatagcctccgggcagaagataccgctgtttattattgcacgagacgggtgccaataagactggactattgggggcaagggactcttgtcaccgtcagttcaacgcgtatccagaaccctgatcctgccgtgtaccagctgcgggatagcaagagcagcgacaagagcgtgtgtctgttcaccgacttcgacagccagaccaacgtgtcccagagcaaggactccgacgtgtacatcaccgataagtgcgtgctggacatgcggagcatggacttcaagagcaactccgccgtggcctggtccaacaagtccgatttcgcctgcgccaacgccttcaacaacagcattatccccgaggacacattcttcccaagccccgagagcagctgcgacgtgaagctggtggaaaagagcttcgagacagacaccaacctgaacttccagaacctgagcgtgatcggcttcagaatcctgctgctgaaagtggccggctttaacctgctgatgaccctgcggctgtggtccagc

SEQ ID NO: 4728 - DNA, 1869 bp, synthetic construct
  source 1..1869: mol_type = other DNA
atggccttaccagtgaccgccttgctcctgccgctggccttgctgctccacgccgccaggccggacgacatccagttgacccagtcccccagctcactcagcgccagtgtgggggaccgggtgaccattacctgtaaagccagtcagagtgtggactatgagggggatagcttcctgaattggtatcagcagaagcctggcaaagccccaaagctgctgatctacgctgcatctaatctggagtcaggcgtgccttctaggttctccggtagtgggtctgggaccgatttcacattgaccatttcatccctccaacccgaggatttcgctacatattactgtcagcagtccaatgaggaccctctcacctttggccagggcaccaaagttgaaattaagagactcgaggacctgaagaacgtgttcccacctgaggtggccgtgttcgagcctagcgaggccgagatcagccacacccagaaagccaccctcgtgtgcctggctaccggcttctaccccgaccatgtggaactgtcttggtgggtcaacggcaaagaggtgcacagcggcgtgtgtaccgacccccagccactgaaagaacagcccgccctgaacgacagccggtactgcctgagcagcagactgagagtgtccgccaccttctggcagaacccccggaaccacttcagatgccaggtgcagttctacggcctgagcgagaacgacgagtggacccaggacagagccaagcccgtgacccagatcgtgtctgccgaagcctggggcagagccgattgcggctttaccagcgagagctaccagcagggcgtgctgagcgccaccatcctgtacgagatcctgctgggcaaggccaccctgtacgccgtgctggtgtctgccctggtgctgatggctatggtcaagcggaaggacagccggggaagggccaagcgatctggatctggagcaacaaacttctcactactcaaacaagcaggtgacgtggaggagaatcccgggcctactagtatggactggatttggcgcatccttttccttgtcggcgctgctaccggcgcgcattccttcgaagaagtccaacttgtggagtctggagggggcctggtgcagcccggcggctctctcagactgtcttgtgcggcaagcggctacaccttcacctcttactggatagaatgggtgaggcaggcacctggaaagggactggagtggattggagagattctgccaggagggggagatacaaattacaatgaaatcttcaaggggcgggccaccttttcagcggataccagcaagaatacagcttacctgcagatgaatagcctccgggcagaagataccgctgtttattattgcacgagacgggtgccaataagactggactattgggggcaagggactcttgtcaccgtcagttcaacgcgtatccagaaccctgatcctgccgtgtaccagctgcgggatagcaagagcagcgacaagagcgtgtgtctgttcaccgacttcgacagccagaccaacgtgtcccagagcaaggactccgacgtgtacatcaccgataagtgcgtgctggacatgcggagcatggacttcaagagcaactccgccgtggcctggtccaacaagtccgatttcgcctgcgccaacgccttcaacaacagcattatccccgaggacacattcttcccaagccccgagagcagctgcgacgtgaagctggtggaaaagagcttcgagacagacaccaacctgaacttccagaacctgagcgtgatcggcttcagaatcctgctgctgaaagtggccggctttaacctgctgatgaccctgcggctgtggtccagc

SEQ ID NO: 4729 - DNA, 1866 bp, synthetic construct
  source 1..1866: mol_type = other DNA
atggccttaccagtgaccgccttgctcctgccgctggccttgctgctccacgccgccaggccggacatccagttgacccagtcccccagctcactcagcgccagtgtgggggaccgggtgaccattacctgtaaagccagtcagagtgtggactatgagggggatagcttcctgaattggtatcagcagaagcctggcaaagccccaaagctgctgatctacgctgcatctaatctggagtcaggcgtgccttctaggttctccggtagtgggtctgggaccgatttcacattgaccatttcatccctccaacccgaggatttcgctacatattactgtcagcagtccaatgaggaccctctcacctttggccagggcaccaaagttgaaattaagagactcgaggacctgaagaacgtgttcccacctgaggtggccgtgttcgagcctagcgaggccgagatcagccacacccagaaagccaccctcgtgtgcctggctaccggcttctaccccgaccatgtggaactgtcttggtgggtcaacggcaaagaggtgcacagcggcgtgtgtaccgacccccagccactgaaagaacagcccgccctgaacgacagccggtactgcctgagcagcagactgagagtgtccgccaccttctggcagaacccccggaaccacttcagatgccaggtgcagttctacggcctgagcgagaacgacgagtggacccaggacagagccaagcccgtgacccagatcgtgtctgccgaagcctggggcagagccgattgcggctttaccagcgagagctaccagcagggcgtgctgagcgccaccatcctgtacgagatcctgctgggcaaggccaccctgtacgccgtgctggtgtctgccctggtgctgatggctatggtcaagcggaaggacagccggggaagggccaagcgatctggatctggagcaacaaacttctcactactcaaacaagcaggtgacgtggaggagaatcccgggcctactagtatggactggatttggcgcatccttttccttgtcggcgctgctaccggcgcgcattccttcgaagaagtccaacttgtggagtctggagggggcctggtgcagcccggcggctctctcagactgtcttgtgcggcaagcggctacaccttcacctcttactggatagaatgggtgaggcaggcacctggaaagggactggagtggattggagagattctgccaggagggggagatacaaattacaatgaaatcttcaaggggcgggccaccttttcagcggataccagcaagaatacagcttacctgcagatgaatagcctccgggcagaagataccgctgtttattattgcacgagacgggtgccaataagactggactattgggggcaagggactcttgtcaccgtcagttcaacgcgtatccagaaccctgatcctgccgtgtaccagctgcgggatagcaagagcagcgacaagagcgtgtgtctgttcaccgacttcgacagccagaccaacgtgtcccagagcaaggactccgacgtgtacatcaccgataagtgcgtgctggacatgcggagcatggacttcaagagcaactccgccgtggcctggtccaacaagtccgatttcgcctgcgccaacgccttcaacaacagcattatccccgaggacacattcttcccaagccccgagagcagctgcgacgtgaagctggtggaaaagagcttcgagacagacaccaacctgaacttccagaacctgagcgtgatcggcttcagaatcctgctgctgaaagtggccggctttaacctgctgatgaccctgcggctgtggtccagc

SEQ ID NO: 4730 - DNA, 1872 bp, synthetic construct
  source 1..1872: mol_type = other DNA
atggccttaccagtgaccgccttgctcctgccgctggccttgctgctccacgccgccaggccggacgacatccagttgacccagtcccccagctcactcagcgccagtgtgggggaccgggtgaccattacctgtaaagccagtcagagtgtggactatgagggggatagcttcctgaattggtatcagcagaagcctggcaaagccccaaagctgctgatctacgctgcatctaatctggagtcaggcgtgccttctaggttctccggtagtgggtctgggaccgatttcacattgaccatttcatccctccaacccgaggatttcgctacatattactgtcagcagtccaatgaggaccctctcacctttggccagggcaccaaagttgaaattaagagactcgaggacctgaagaacgtgttcccacctgaggtggccgtgttcgagcctagcgaggccgagatcagccacacccagaaagccaccctcgtgtgcctggctaccggcttctaccccgaccatgtggaactgtcttggtgggtcaacggcaaagaggtgcacagcggcgtgtgtaccgacccccagccactgaaagaacagcccgccctgaacgacagccggtactgcctgagcagcagactgagagtgtccgccaccttctggcagaacccccggaaccacttcagatgccaggtgcagttctacggcctgagcgagaacgacgagtggacccaggacagagccaagcccgtgacccagatcgtgtctgccgaagcctggggcagagccgattgcggctttaccagcgagagctaccagcagggcgtgctgagcgccaccatcctgtacgagatcctgctgggcaaggccaccctgtacgccgtgctggtgtctgccctggtgctgatggctatggtcaagcggaaggacagccggggaagggccaagcgatctggatctggagcaacaaacttctcactactcaaacaagcaggtgacgtggaggagaatcccgggcctactagtatggactggatttggcgcatccttttccttgtcggcgctgctaccggcgcgcattccttcgaagaagtccaacttgtggagtctggagggggcctggtgcagcccggcggctctctcagactgtcttgtgcggcaagcggctacaccttcacctcttactggatagaatgggtgaggcaggcacctggaaagggactggagtggattggagagattctgccaggagggggagatacaaattacaatgaaatcttcaaggggcgggccaccttttcagcggataccagcaagaatacagcttacctgcagatgaatagcctccgggcagaagataccgctgtttattattgcacgagacgggtgccaataagactggactattgggggcaagggactcttgtcaccgtcagttcaacgcgtatccagaaccctgatcctgccgtgtaccagctgcgggatagcaagagcagcgacaagagcgtgtgtctgttcaccgacttcgacagccagaccaacgtgtcccagagcaaggactccgacgtgtacatcaccgataagtgcgtgctggacatgcggagcatggacttcaagagcaactccgccgtggcctggtccaacaagtccgatttcgcctgcgccaacgccttcaacaacagcattatccccgaggacacattcttcccaagccccgagagcagctgcgacgtgaagctggtggaaaagagcttcgagacagacaccaacctgaacttccagaacctgagcgtgatcggcttcagaatcctgctgctgaaagtggccggctttaacctgctgatgaccctgcggctgtggtccagctaa

SEQ ID NO: 4731 - DNA, 1869 bp, synthetic construct
  source 1..1869: mol_type = other DNA
atggccttaccagtgaccgccttgctcctgccgctggccttgctgctccacgccgccaggccggacgacatccagttgacccagtcccccagctcactcagcgccagtgtgggggaccgggtgaccattacctgtaaagccagtcagagtgtggactatgacggggatagcttcctgaattggtatcagcagaagcctggcaaagccccaaagctgctgatctacgctgcatctaatctggagtcaggcgtgccttccaggttctccggtagtgggtctgggaccgatttcacattgaccatttcatccctccaacccgaggatttcgctacatattactgtcagcagtccaatgaggaccctctcacctttggccagggcaccaaagttgaaattaagagactcgaggacctgaagaacgtgttcccacctgaggtggccgtgttcgagcctagcgaggccgagatcagccacacccagaaagccaccctcgtgtgcctggctaccggcttctaccccgaccatgtggaactgtcttggtgggtcaacggcaaagaggtgcacagcggcgtgtgtaccgacccccagccactgaaagaacagcccgccctgaacgacagccggtactgcctgagcagcagactgagagtgtccgccaccttctggcagaacccccggaaccacttcagatgccaggtgcagttctacggcctgagcgagaacgacgagtggacccaggacagagccaagcccgtgacccagatcgtgtctgccgaagcctggggcagagccgattgcggctttaccagcgagagctaccagcagggcgtgctgagcgccaccatcctgtacgagatcctgctgggcaaggccaccctgtacgccgtgctggtgtctgccctggtgctgatggctatggtcaagcggaaggacagccggggaagggccaagcgatctggatctggagcaacaaacttctcactactcaaacaagcaggtgacgtggaggagaatcccgggcctactagtatggactggatttggcgcatccttttccttgtcggcgctgctaccggcgcgcattccttcgaagaagtccaacttgtggagtctggagggggcctggtgcagcccggcggctctctcagactgtcttgtgcggcaagcggctacaccttcacctcttactggatagaatgggtgaggcaggcacctggaaagggactggagtggattggagagattctgccaggagggggagatacaaattacaatgaaatcttcaaggggcgggccaccttttcagcggataccagcaagaatacagcttacctgcagatgaatagcctccgggcagaagataccgctgtttattattgcacgagacgggtgccaataagactggactattgggggcaagggactcttgtcaccgtcagttcaacgcgtatccagaaccctgatcctgccgtgtaccagctgcgggatagcaagagcagcgacaagagcgtgtgtctgttcaccgacttcgacagccagaccaacgtgtcccagagcaaggactccgacgtgtacatcaccgataagtgcgtgctggacatgcggagcatggacttcaagagcaactccgccgtggcctggtccaacaagtccgatttcgcctgcgccaacgccttcaacaacagcattatccccgaggacacattcttcccaagccccgagagcagctgcgacgtgaagctggtggaaaagagcttcgagacagacaccaacctgaacttccagaacctgagcgtgatcggcttcagaatcctgctgctgaaagtggccggctttaacctgctgatgaccctgcggctgtggtccagc

SEQ ID NO: 4732 - DNA, 1866 bp, synthetic construct
  source 1..1866: mol_type = other DNA
atggccttaccagtgaccgccttgctcctgccgctggccttgctgctccacgccgccaggccggacatccagttgacccagtcccccagctcactcagcgccagtgtgggggaccgggtgaccattacctgtaaagccagtcagagtgtggactatgacggggatagcttcctgaattggtatcagcagaagcctggcaaagccccaaagctgctgatctacgctgcatctaatctggagtcaggcgtgccttccaggttctccggtagtgggtctgggaccgatttcacattgaccatttcatccctccaacccgaggatttcgctacatattactgtcagcagtccaatgaggaccctctcacctttggccagggcaccaaagttgaaattaagagactcgaggacctgaagaacgtgttcccacctgaggtggccgtgttcgagcctagcgaggccgagatcagccacacccagaaagccaccctcgtgtgcctggctaccggcttctaccccgaccatgtggaactgtcttggtgggtcaacggcaaagaggtgcacagcggcgtgtgtaccgacccccagccactgaaagaacagcccgccctgaacgacagccggtactgcctgagcagcagactgagagtgtccgccaccttctggcagaacccccggaaccacttcagatgccaggtgcagttctacggcctgagcgagaacgacgagtggacccaggacagagccaagcccgtgacccagatcgtgtctgccgaagcctggggcagagccgattgcggctttaccagcgagagctaccagcagggcgtgctgagcgccaccatcctgtacgagatcctgctgggcaaggccaccctgtacgccgtgctggtgtctgccctggtgctgatggctatggtcaagcggaaggacagccggggaagggccaagcgatctggatctggagcaacaaacttctcactactcaaacaagcaggtgacgtggaggagaatcccgggcctactagtatggactggatttggcgcatccttttccttgtcggcgctgctaccggcgcgcattccttcgaagaagtccaacttgtggagtctggagggggcctggtgcagcccggcggctctctcagactgtcttgtgcggcaagcggctacaccttcacctcttactggatagaatgggtgaggcaggcacctggaaagggactggagtggattggagagattctgccaggagggggagatacaaattacaatgaaatcttcaaggggcgggccaccttttcagcggataccagcaagaatacagcttacctgcagatgaatagcctccgggcagaagataccgctgtttattattgcacgagacgggtgccaataagactggactattgggggcaagggactcttgtcaccgtcagttcaacgcgtatccagaaccctgatcctgccgtgtaccagctgcgggatagcaagagcagcgacaagagcgtgtgtctgttcaccgacttcgacagccagaccaacgtgtcccagagcaaggactccgacgtgtacatcaccgataagtgcgtgctggacatgcggagcatggacttcaagagcaactccgccgtggcctggtccaacaagtccgatttcgcctgcgccaacgccttcaacaacagcattatccccgaggacacattcttcccaagccccgagagcagctgcgacgtgaagctggtggaaaagagcttcgagacagacaccaacctgaacttccagaacctgagcgtgatcggcttcagaatcctgctgctgaaagtggccggctttaacctgctgatgaccctgcggctgtggtccagc

SEQ ID NO: 4733 - DNA, 1863 bp, synthetic construct
  source 1..1863: mol_type = other DNA
atggccttaccagtgaccgccttgctcctgccgctggccttgctgctccacgccgccaggccggacatcgtgatgacacagagccctgatagcctggccgtgtctctgggagagagagccaccattaactgcaaggccagccagagcgtggactacgagggcgacagcttcctgaactggtatcagcagaagcccggccagcctcctaagctgctgatctacgccgccagcaatctggaaagcggcgtgccaagcagattttccggctctggcagcggcaccgatttcaccctgacaatatccagcctccagcctgaggacgtggccgtgtactactgccagcagagcaatgaggaccctctgacctttggccagggcaccaaggtggaaatcaagctcgaggacctgaagaacgtgttcccacctgaggtggccgtgttcgagcctagcgaggccgagatcagccacacccagaaagccaccctcgtgtgcctggctaccggcttctaccccgaccatgtggaactgtcttggtgggtcaacggcaaagaggtgcacagcggcgtgtgtaccgacccccagccactgaaagaacagcccgccctgaacgacagccggtactgcctgagcagcagactgagagtgtccgccaccttctggcagaacccccggaaccacttcagatgccaggtgcagttctacggcctgagcgagaacgacgagtggacccaggacagagccaagcccgtgacccagatcgtgtctgccgaagcctggggcagagccgattgcggctttaccagcgagagctaccagcagggcgtgctgagcgccaccatcctgtacgagatcctgctgggcaaggccaccctgtacgccgtgctggtgtctgccctggtgctgatggctatggtcaagcggaaggacagccggggaagggccaagcgatctggatctggagcaacaaacttctcactactcaaacaagcaggtgacgtggaggagaatcccgggcctactagtatggactggatttggcgcatccttttccttgtcggcgctgctaccggcgcgcattccttcgaagaagtccaacttgtggagtctggagggggcctggtgcagcccggcggctctctcagactgtcttgtgcggcaagcggctacaccttcacctcttactggatagaatgggtgaggcaggcacctggaaagggactggagtggattggagagattctgccaggagggggagatacaaattacaatgaaatcttcaaggggcgggccaccttttcagcggataccagcaagaatacagcttacctgcagatgaatagcctccgggcagaagataccgctgtttattattgcacgagacgggtgccaataagactggactattgggggcaagggactcttgtcaccgtcagttcaacgcgtatccagaaccctgatcctgccgtgtaccagctgcgggatagcaagagcagcgacaagagcgtgtgtctgttcaccgacttcgacagccagaccaacgtgtcccagagcaaggactccgacgtgtacatcaccgataagtgcgtgctggacatgcggagcatggacttcaagagcaactccgccgtggcctggtccaacaagtccgatttcgcctgcgccaacgccttcaacaacagcattatccccgaggacacattcttcccaagccccgagagcagctgcgacgtgaagctggtggaaaagagcttcgagacagacaccaacctgaacttccagaacctgagcgtgatcggcttcagaatcctgctgctgaaagtggccggctttaacctgctgatgaccctgcggctgtggtccagc

SEQ ID NO: 4734 - DNA, 1863 bp, synthetic construct
  source 1..1863: mol_type = other DNA
atggccttaccagtgaccgccttgctcctgccgctggccttgctgctccacgccgccaggccggacatcgtgatgacacagagccctgatagcctggccgtgtctctgggagagagagccaccattaactgcaaggccagccagagcgtggactacgacggcgacagcttcctgaactggtatcagcagaagcccggccagcctcctaagctgctgatctacgccgccagcaatctggaaagcggcgtgccaagcagattttccggctctggcagcggcaccgatttcaccctgacaatatccagcctccagcctgaggacgtggccgtgtactactgccagcagagcaacgacgaccctctgacctttggacagggcaccaaggtggaaatcaaactcgaggacctgaagaacgtgttcccacctgaggtggccgtgttcgagcctagcgaggccgagatcagccacacccagaaagccaccctcgtgtgcctggctaccggcttctaccccgaccatgtggaactgtcttggtgggtcaacggcaaagaggtgcacagcggcgtgtgtaccgacccccagccactgaaagaacagcccgccctgaacgacagccggtactgcctgagcagcagactgagagtgtccgccaccttctggcagaacccccggaaccacttcagatgccaggtgcagttctacggcctgagcgagaacgacgagtggacccaggacagagccaagcccgtgacccagatcgtgtctgccgaagcctggggcagagccgattgcggctttaccagcgagagctaccagcagggcgtgctgagcgccaccatcctgtacgagatcctgctgggcaaggccaccctgtacgccgtgctggtgtctgccctggtgctgatggctatggtcaagcggaaggacagccggggaagggccaagcgatctggatctggagcaacaaacttctcactactcaaacaagcaggtgacgtggaggagaatcccgggcctactagtatggactggatttggcgcatccttttccttgtcggcgctgctaccggcgcgcattccttcgaagaagtccaacttgtggagtctggagggggcctggtgcagcccggcggctctctcagactgtcttgtgcggcaagcggctacaccttcacctcttactggatagaatgggtgaggcaggcacctggaaagggactggagtggattggagagattctgccaggagggggagatacaaattacaatgaaatcttcaaggggcgggccaccttttcagcggataccagcaagaatacagcttacctgcagatgaatagcctccgggcagaagataccgctgtttattattgcacgagacgggtgccaataagactggactattgggggcaagggactcttgtcaccgtcagttcaacgcgtatccagaaccctgatcctgccgtgtaccagctgcgggatagcaagagcagcgacaagagcgtgtgtctgttcaccgacttcgacagccagaccaacgtgtcccagagcaaggactccgacgtgtacatcaccgataagtgcgtgctggacatgcggagcatggacttcaagagcaactccgccgtggcctggtccaacaagtccgatttcgcctgcgccaacgccttcaacaacagcattatccccgaggacacattcttcccaagccccgagagcagctgcgacgtgaagctggtggaaaagagcttcgagacagacaccaacctgaacttccagaacctgagcgtgatcggcttcagaatcctgctgctgaaagtggccggctttaacctgctgatgaccctgcggctgtggtccagc

SEQ ID NO: 4735 - DNA, 1863 bp, synthetic construct; identical to SEQ ID NO: 4727
  source 1..1863: mol_type = other DNA

SEQ ID NO: 4736 - DNA, 1866 bp, synthetic construct
  source 1..1866: mol_type = other DNA
atggccttaccagtgaccgccttgctcctgccgctggccttgctgctccacgccgccaggccggacgacatccagttgacccagtcccccagctcactcagcgccagtgtgggggaccgggtgaccattacctgtaaagccagtcagagtgtggactatgagggggatagcttcctgaattggtatcagcagaagcctggcaaagccccaaagctgctgatctacgctgcatctaatctggagtcaggcgtgccttctaggttctccggtagtgggtctgggaccgatttcacattgaccatttcatccctccaacccgaggatttcgctacatattactgtcagcagtccaatgaggaccctctcacctttggccagggcaccaaagttgaaattaagagactcgaggacctgaagaacgtgttcccacctgaggtggccgtgttcgagcctagcgaggccgagatcagccacacccagaaagccaccctcgtgtgcctggctaccggcttctaccccgaccatgtggaactgtcttggtgggtcaacggcaaagaggtgcacagcggcgtgtgtaccgacccccagccactgaaagaacagcccgccctgaacgacagccggtactgcctgagcagcagactgagagtgtccgccaccttctggcagaacccccggaaccacttcagatgccaggtgcagttctacggcctgagcgagaacgacgagtggacccaggacagagccaagcccgtgacccagatcgtgtctgccgaagcctggggcagagccgattgcggctttaccagcgagagctaccagcagggcgtgctgagcgccaccatcctgtacgagatcctgctgggcaaggccaccctgtacgccgtgctggtgtctgccctggtgctgatggctatggtcaagcggaaggacagccggggaagggccaagcgatctggatctggagcaacaaacttctcactactcaaacaagcaggtgacgtggaggagaatcccgggcctactagtatggactggatttggcgcatccttttccttgtcggcgctgctaccggcgcgcattccttcgaagtccaacttgtggagtctggagggggcctggtgcagcccggcggctctctcagactgtcttgtgcggcaagcggctacaccttcacctcttactggatagaatgggtgaggcaggcacctggaaagggactggagtggattggagagattctgccaggagggggagatacaaattacaatgaaatcttcaaggggcgggccaccttttcagcggataccagcaagaatacagcttacctgcagatgaatagcctccgggcagaagataccgctgtttattattgcacgagacgggtgccaataagactggactattgggggcaagggactcttgtcaccgtcagttcaacgcgtatccagaaccctgatcctgccgtgtaccagctgcgggatagcaagagcagcgacaagagcgtgtgtctgttcaccgacttcgacagccagaccaacgtgtcccagagcaaggactccgacgtgtacatcaccgataagtgcgtgctggacatgcggagcatggacttcaagagcaactccgccgtggcctggtccaacaagtccgatttcgcctgcgccaacgccttcaacaacagcattatccccgaggacacattcttcccaagccccgagagcagctgcgacgtgaagctggtggaaaagagcttcgagacagacaccaacctgaacttccagaacctgagcgtgatcggcttcagaatcctgctgctgaaagtggccggctttaacctgctgatgaccctgcggctgtggtccagc

SEQ ID NO: 4737 - DNA, 1863 bp, synthetic construct
  source 1..1863: mol_type = other DNA
atggccttaccagtgaccgccttgctcctgccgctggccttgctgctccacgccgccaggccggacatccagttgacccagtcccccagctcactcagcgccagtgtgggggaccgggtgaccattacctgtaaagccagtcagagtgtggactatgagggggatagcttcctgaattggtatcagcagaagcctggcaaagccccaaagctgctgatctacgctgcatctaatctggagtcaggcgtgccttctaggttctccggtagtgggtctgggaccgatttcacattgaccatttcatccctccaacccgaggatttcgctacatattactgtcagcagtccaatgaggaccctctcacctttggccagggcaccaaagttgaaattaagagactcgaggacctgaagaacgtgttcccacctgaggtggccgtgttcgagcctagcgaggccgagatcagccacacccagaaagccaccctcgtgtgcctggctaccggcttctaccccgaccatgtggaactgtcttggtgggtcaacggcaaagaggtgcacagcggcgtgtgtaccgacccccagccactgaaagaacagcccgccctgaacgacagccggtactgcctgagcagcagactgagagtgtccgccaccttctggcagaacccccggaaccacttcagatgccaggtgcagttctacggcctgagcgagaacgacgagtggacccaggacagagccaagcccgtgacccagatcgtgtctgccgaagcctggggcagagccgattgcggctttaccagcgagagctaccagcagggcgtgctgagcgccaccatcctgtacgagatcctgctgggcaaggccaccctgtacgccgtgctggtgtctgccctggtgctgatggctatggtcaagcggaaggacagccggggaagggccaagcgatctggatctggagcaacaaacttctcactactcaaacaagcaggtgacgtggaggagaatcccgggcctactagtatggactggatttggcgcatccttttccttgtcggcgctgctaccggcgcgcattccttcgaagtccaacttgtggagtctggagggggcctggtgcagcccggcggctctctcagactgtcttgtgcggcaagcggctacaccttcacctcttactggatagaatgggtgaggcaggcacctggaaagggactggagtggattggagagattctgccaggagggggagatacaaattacaatgaaatcttcaaggggcgggccaccttttcagcggataccagcaagaatacagcttacctgcagatgaatagcctccgggcagaagataccgctgtttattattgcacgagacgggtgccaataagactggactattgggggcaagggactcttgtcaccgtcagttcaacgcgtatccagaaccctgatcctgccgtgtaccagctgcgggatagcaagagcagcgacaagagcgtgtgtctgttcaccgacttcgacagccagaccaacgtgtcccagagcaaggactccgacgtgtacatcaccgataagtgcgtgctggacatgcggagcatggacttcaagagcaactccgccgtggcctggtccaacaagtccgatttcgcctgcgccaacgccttcaacaacagcattatccccgaggacacattcttcccaagccccgagagcagctgcgacgtgaagctggtggaaaagagcttcgagacagacaccaacctgaacttccagaacctgagcgtgatcggcttcagaatcctgctgctgaaagtggccggctttaacctgctgatgaccctgcggctgtggtccagc

SEQ ID NO: 4738 - DNA, 1869 bp, synthetic construct
  source 1..1869: mol_type = other DNA
atggccttaccagtgaccgccttgctcctgccgctggccttgctgctccacgccgccaggccggacgacatccagttgacccagtcccccagctcactcagcgccagtgtgggggaccgggtgaccattacctgtaaagccagtcagagtgtggactatgagggggatagcttcctgaattggtatcagcagaagcctggcaaagccccaaagctgctgatctacgctgcatctaatctggagtcaggcgtgccttctaggttctccggtagtgggtctgggaccgatttcacattgaccatttcatccctccaacccgaggatttcgctacatattactgtcagcagtccaatgaggaccctctcacctttggccagggcaccaaagttgaaattaagagactcgaggacctgaagaacgtgttcccacctgaggtggccgtgttcgagcctagcgaggccgagatcagccacacccagaaagccaccctcgtgtgcctggctaccggcttctaccccgaccatgtggaactgtcttggtgggtcaacggcaaagaggtgcacagcggcgtgtgtaccgacccccagccactgaaagaacagcccgccctgaacgacagccggtactgcctgagcagcagactgagagtgtccgccaccttctggcagaacccccggaaccacttcagatgccaggtgcagttctacggcctgagcgagaacgacgagtggacccaggacagagccaagcccgtgacccagatcgtgtctgccgaagcctggggcagagccgattgcggctttaccagcgagagctaccagcagggcgtgctgagcgccaccatcctgtacgagatcctgctgggcaaggccaccctgtacgccgtgctggtgtctgccctggtgctgatggctatggtcaagcggaaggacagccggggaagggccaagcgatctggatctggagcaacaaacttctcactactcaaacaagcaggtgacgtggaggagaatcccgggcctactagtatggactggatttggcgcatccttttccttgtcggcgctgctaccggcgcgcattccttcgaagtccaacttgtggagtctggagggggcctggtgcagcccggcggctctctcagactgtcttgtgcggcaagcggctacaccttcacctcttactggatagaatgggtgaggcaggcacctggaaagggactggagtggattggagagattctgccaggagggggagatacaaattacaatgaaatcttcaaggggcgggccaccttttcagcggataccagcaagaatacagcttacctgcagatgaatagcctccgggcagaagataccgctgtttattattgcacgagacgggtgccaataagactggactattgggggcaagggactcttgtcaccgtcagttcaacgcgtatccagaaccctgatcctgccgtgtaccagctgcgggatagcaagagcagcgacaagagcgtgtgtctgttcaccgacttcgacagccagaccaacgtgtcccagagcaaggactccgacgtgtacatcaccgataagtgcgtgctggacatgcggagcatggacttcaagagcaactccgccgtggcctggtccaacaagtccgatttcgcctgcgccaacgccttcaacaacagcattatccccgaggacacattcttcccaagccccgagagcagctgcgacgtgaagctggtggaaaagagcttcgagacagacaccaacctgaacttccagaacctgagcgtgatcggcttcagaatcctgctgctgaaagtggccggctttaacctgctgatgaccctgcggctgtggtccagctaa

SEQ ID NO: 4739 - DNA, 1866 bp, synthetic construct
  source 1..1866: mol_type = other DNA
atggccttaccagtgaccgccttgctcctgccgctggccttgctgctccacgccgccaggccggacgacatccagttgacccagtcccccagctcactcagcgccagtgtgggggaccgggtgaccattacctgtaaagccagtcagagtgtggactatgacggggatagcttcctgaattggtatcagcagaagcctggcaaagccccaaagctgctgatctacgctgcatctaatctggagtcaggcgtgccttccaggttctccggtagtgggtctgggaccgatttcacattgaccatttcatccctccaacccgaggatttcgctacatattactgtcagcagtccaatgaggaccctctcacctttggccagggcaccaaagttgaaattaagagactcgaggacctgaagaacgtgttcccacctgaggtggccgtgttcgagcctagcgaggccgagatcagccacacccagaaagccaccctcgtgtgcctggctaccggcttctaccccgaccatgtggaactgtcttggtgggtcaacggcaaagaggtgcacagcggcgtgtgtaccgacccccagccactgaaagaacagcccgccctgaacgacagccggtactgcctgagcagcagactgagagtgtccgccaccttctggcagaacccccggaaccacttcagatgccaggtgcagttctacggcctgagcgagaacgacgagtggacccaggacagagccaagcccgtgacccagatcgtgtctgccgaagcctggggcagagccgattgcggctttaccagcgagagctaccagcagggcgtgctgagcgccaccatcctgtacgagatcctgctgggcaaggccaccctgtacgccgtgctggtgtctgccctggtgctgatggctatggtcaagcggaaggacagccggggaagggccaagcgatctggatctggagcaacaaacttctcactactcaaacaagcaggtgacgtggaggagaatcccgggcctactagtatggactggatttggcgcatccttttccttgtcggcgctgctaccggcgcgcattccttcgaagtccaacttgtggagtctggagggggcctggtgcagcccggcggctctctcagactgtcttgtgcggcaagcggctacaccttcacctcttactggatagaatgggtgaggcaggcacctggaaagggactggagtggattggagagattctgccaggagggggagatacaaattacaatgaaatcttcaaggggcgggccaccttttcagcggataccagcaagaatacagcttacctgcagatgaatagcctccgggcagaagataccgctgtttattattgcacgagacgggtgccaataagactggactattgggggcaagggactcttgtcaccgtcagttcaacgcgtatccagaaccctgatcctgccgtgtaccagctgcgggatagcaagagcagcgacaagagcgtgtgtctgttcaccgacttcgacagccagaccaacgtgtcccagagcaaggactccgacgtgtacatcaccgataagtgcgtgctggacatgcggagcatggacttcaagagcaactccgccgtggcctggtccaacaagtccgatttcgcctgcgccaacgccttcaacaacagcattatccccgaggacacattcttcccaagccccgagagcagctgcgacgtgaagctggtggaaaagagcttcgagacagacaccaacctgaacttccagaacctgagcgtgatcggcttcagaatcctgctgctgaaagtggccggctttaacctgctgatgaccctgcggctgtggtccagc

SEQ ID NO: 4740 - DNA, 1863 bp, synthetic construct
  source 1..1863: mol_type = other DNA
atggccttaccagtgaccgccttgctcctgccgctggccttgctgctccacgccgccaggccggacatccagttgacccagtcccccagctcactcagcgccagtgtgggggaccgggtgaccattacctgtaaagccagtcagagtgtggactatgacggggatagcttcctgaattggtatcagcagaagcctggcaaagccccaaagctgctgatctacgctgcatctaatctggagtcaggcgtgccttccaggttctccggtagtgggtctgggaccgatttcacattgaccatttcatccctccaacccgaggatttcgctacatattactgtcagcagtccaatgaggaccctctcacctttggccagggcaccaaagttgaaattaagagactcgaggacctgaagaacgtgttcccacctgaggtggccgtgttcgagcctagcgaggccgagatcagccacacccagaaagccaccctcgtgtgcctggctaccggcttctaccccgaccatgtggaactgtcttggtgggtcaacggcaaagaggtgcacagcggcgtgtgtaccgacccccagccactgaaagaacagcccgccctgaacgacagccggtactgcctgagcagcagactgagagtgtccgccaccttctggcagaacccccggaaccacttcagatgccaggtgcagttctacggcctgagcgagaacgacgagtggacccaggacagagccaagcccgtgacccagatcgtgtctgccgaagcctggggcagagccgattgcggctttaccagcgagagctaccagcagggcgtgctgagcgccaccatcctgtacgagatcctgctgggcaaggccaccctgtacgccgtgctggtgtctgccctggtgctgatggctatggtcaagcggaaggacagccggggaagggccaagcgatctggatctggagcaacaaacttctcactactcaaacaagcaggtgacgtggaggagaatcccgggcctactagtatggactggatttggcgcatccttttccttgtcggcgctgctaccggcgcgcattccttcgaagtccaacttgtggagtctggagggggcctggtgcagcccggcggctctctcagactgtcttgtgcggcaagcggctacaccttcacctcttactggatagaatgggtgaggcaggcacctggaaagggactggagtggattggagagattctgccaggagggggagatacaaattacaatgaaatcttcaaggggcgggccaccttttcagcggataccagcaagaatacagcttacctgcagatgaatagcctccgggcagaagataccgctgtttattattgcacgagacgggtgccaataagactggactattgggggcaagggactcttgtcaccgtcagttcaacgcgtatccagaaccctgatcctgccgtgtaccagctgcgggatagcaagagcagcgacaagagcgtgtgtctgttcaccgacttcgacagccagaccaacgtgtcccagagcaaggactccgacgtgtacatcaccgataagtgcgtgctggacatgcggagcatggacttcaagagcaactccgccgtggcctggtccaacaagtccgatttcgcctgcgccaacgccttcaacaacagcattatccccgaggacacattcttcccaagccccgagagcagctgcgacgtgaagctggtggaaaagagcttcgagacagacaccaacctgaacttccagaacctgagcgtgatcggcttcagaatcctgctgctgaaagtggccggctttaacctgctgatgaccctgcggctgtggtccagc

SEQ ID NO: 4741 - DNA, 1860 bp, synthetic construct
  source 1..1860: mol_type = other DNA
atggccttaccagtgaccgccttgctcctgccgctggccttgctgctccacgccgccaggccggacatcgtgatgacacagagccctgatagcctggccgtgtctctgggagagagagccaccattaactgcaaggccagccagagcgtggactacgagggcgacagcttcctgaactggtatcagcagaagcccggccagcctcctaagctgctgatctacgccgccagcaatctggaaagcggcgtgccaagcagattttccggctctggcagcggcaccgatttcaccctgacaatatccagcctccagcctgaggacgtggccgtgtactactgccagcagagcaatgaggaccctctgacctttggccagggcaccaaggtggaaatcaagctcgaggacctgaagaacgtgttcccacctgaggtggccgtgttcgagcctagcgaggccgagatcagccacacccagaaagccaccctcgtgtgcctggctaccggcttctaccccgaccatgtggaactgtcttggtgggtcaacggcaaagaggtgcacagcggcgtgtgtaccgacccccagccactgaaagaacagcccgccctgaacgacagccggtactgcctgagcagcagactgagagtgtccgccaccttctggcagaacccccggaaccacttcagatgccaggtgcagttctacggcctgagcgagaacgacgagtggacccaggacagagccaagcccgtgacccagatcgtgtctgccgaagcctggggcagagccgattgcggctttaccagcgagagctaccagcagggcgtgctgagcgccaccatcctgtacgagatcctgctgggcaaggccaccctgtacgccgtgctggtgtctgccctggtgctgatggctatggtcaagcggaaggacagccggggaagggccaagcgatctggatctggagcaacaaacttctcactactcaaacaagcaggtgacgtggaggagaatcccgggcctactagtatggactggatttggcgcatccttttccttgtcggcgctgctaccggcgcgcattccttcgaagtccaacttgtggagtctggagggggcctggtgcagcccggcggctctctcagactgtcttgtgcggcaagcggctacaccttcacctcttactggatagaatgggtgaggcaggcacctggaaagggactggagtggattggagagattctgccaggagggggagatacaaattacaatgaaatcttcaaggggcgggccaccttttcagcggataccagcaagaatacagcttacctgcagatgaatagcctccgggcagaagataccgctgtttattattgcacgagacgggtgccaataagactggactattgggggcaagggactcttgtcaccgtcagttcaacgcgtatccagaaccctgatcctgccgtgtaccagctgcgggatagcaagagcagcgacaagagcgtgtgtctgttcaccgacttcgacagccagaccaacgtgtcccagagcaaggactccgacgtgtacatcaccgataagtgcgtgctggacatgcggagcatggacttcaagagcaactccgccgtggcctggtccaacaagtccgatttcgcctgcgccaacgccttcaacaacagcattatccccgaggacacattcttcccaagccccgagagcagctgcgacgtgaagctggtggaaaagagcttcgagacagacaccaacctgaacttccagaacctgagcgtgatcggcttcagaatcctgctgctgaaagtggccggctttaacctgctgatgaccctgcggctgtggtccagc

SEQ ID NO: 4742 - DNA, 1860 bp, synthetic construct
  source 1..1860: mol_type = other DNA
atggccttaccagtgaccgccttgctcctgccgctggccttgctgctccacgccgccaggccggacatcgtgatgacacagagccctgatagcctggccgtgtctctgggagagagagccaccattaactgcaaggccagccagagcgtggactacgacggcgacagcttcctgaactggtatcagcagaagcccggccagcctcctaagctgctgatctacgccgccagcaatctggaaagcggcgtgccaagcagattttccggctctggcagcggcaccgatttcaccctgacaatatccagcctccagcctgaggacgtggccgtgtactactgccagcagagcaacgacgaccctctgacctttggacagggcaccaaggtggaaatcaaactcgaggacctgaagaacgtgttcccacctgaggtggccgtgttcgagcctagcgaggccgagatcagccacacccagaaagccaccctcgtgtgcctggctaccggcttctaccccgaccatgtggaactgtcttggtgggtcaacggcaaagaggtgcacagcggcgtgtgtaccgacccccagccactgaaagaacagcccgccctgaacgacagccggtactgcctgagcagcagactgagagtgtccgccaccttctggcagaacccccggaaccacttcagatgccaggtgcagttctacggcctgagcgagaacgacgagtggacccaggacagagccaagcccgtgacccagatcgtgtctgccgaagcctggggcagagccgattgcggctttaccagcgagagctaccagcagggcgtgctgagcgccaccatcctgtacgagatcctgctgggcaaggccaccctgtacgccgtgctggtgtctgccctggtgctgatggctatggtcaagcggaaggacagccggggaagggccaagcgatctggatctggagcaacaaacttctcactactcaaacaagcaggtgacgtggaggagaatcccgggcctactagtatggactggatttggcgcatccttttccttgtcggcgctgctaccggcgcgcattccttcgaagtccaacttgtggagtctggagggggcctggtgcagcccggcggctctctcagactgtcttgtgcggcaagcggctacaccttcacctcttactggatagaatgggtgaggcaggcacctggaaagggactggagtggattggagagattctgccaggagggggagatacaaattacaatgaaatcttcaaggggcgggccaccttttcagcggataccagcaagaatacagcttacctgcagatgaatagcctccgggcagaagataccgctgtttattattgcacgagacgggtgccaataagactggactattgggggcaagggactcttgtcaccgtcagttcaacgcgtatccagaaccctgatcctgccgtgtaccagctgcgggatagcaagagcagcgacaagagcgtgtgtctgttcaccgacttcgacagccagaccaacgtgtcccagagcaaggactccgacgtgtacatcaccgataagtgcgtgctggacatgcggagcatggacttcaagagcaactccgccgtggcctggtccaacaagtccgatttcgcctgcgccaacgccttcaacaacagcattatccccgaggacacattcttcccaagccccgagagcagctgcgacgtgaagctggtggaaaagagcttcgagacagacaccaacctgaacttccagaacctgagcgtgatcggcttcagaatcctgctgctgaaagtggccggctttaacctgctgatgaccctgcggctgtggtccagc

SEQ ID NO: 4743 - DNA, 1860 bp, synthetic construct
  source 1..1860: mol_type = other DNA
atggccttaccagtgaccgccttgctcctgccgctggccttgctgctccacgccgccaggccggacatcgtgatgacacagagccctgatagcctggccgtgtctctgggagagagagccaccattaactgcaaggccagccagagcgtggactacgacggcgacagcttcctgaactggtatcagcagaagcccggccagcctcctaagctgctgatctacgccgccagcaatctggaaagcggcgtgccaagcagattttccggctctggcagcggcaccgatttcaccctgacaatatccagcctccagcctgaggacgtggccgtgtactactgccagcagagcaacgacgaccctctgacctttggacagggcaccaaggtggaaatcaaactcgaggacctgaagaacgtgttcccacctgaggtggccgtgttcgagcctagcgaggccgagatcagccacacccagaaagccaccctcgtgtgcctggctaccggcttctaccccgaccatgtggaactgtcttggtgggtcaacggcaaagaggtgcacagcggcgtgtgtaccgacccccagccactgaaagaacagcccgccctgaacgacagccggtactgcctgagcagcagactgagagtgtccgccaccttctggcagaacccccggaaccacttcagatgccaggtgcagttctacggcctgagcgagaacgacgagtggacccaggacagagccaagcccgtgacccagatcgtgtctgccgaagcctggggcagagccgattgcggctttaccagcgagagctaccagcagggcgtgctgagcgccaccatcctgtacgagatcctgctgggcaaggccaccctgtacgccgtgctggtgtctgccctggtgctgatggctatggtcaagcggaaggacagccggggaagggccaagcgatctggatctggagcaacaaacttctcactactcaaacaagcaggtgacgtggaggagaatcccgggcctactagtatggactggatttggcgcatccttttccttgtcggcgctgctaccggcgcgcattccttcgaagtccaacttgtggagtctggagggggcctggtgcagcccggcggctctctcagactgtcttgtgcggcaagcggctacaccttcagctcttactggatagaatgggtgaggcaggcacctggaaagggactggagtggattggagagattctgccaggagggggagatacaaattacaatgaaatcttcaaggggcgggccaccttttcagcggataccagcaagaatacagcttacctgcagatgaatagcctccgggcagaagataccgctgtttattattgcacgagacgggtgccaataagactggactattgggggcaagggactcttgtcaccgtcagttcaacgcgtatccagaaccctgatcctgccgtgtaccagctgcgggatagcaagagcagcgacaagagcgtgtgtctgttcaccgacttcgacagccagaccaacgtgtcccagagcaaggactccgacgtgtacatcaccgataagtgcgtgctggacatgcggagcatggacttcaagagcaactccgccgtggcctggtccaacaagtccgatttcgcctgcgccaacgccttcaacaacagcattatccccgaggacacattcttcccaagccccgagagcagctgcgacgtgaagctggtggaaaagagcttcgagacagacaccaacctgaacttccagaacctgagcgtgatcggcttcagaatcctgctgctgaaagtggccggctttaacctgctgatgaccctgcggctgtggtccagc

SEQ ID NO: 4744 - DNA, 1869 bp, synthetic construct
  source 1..1869: mol_type = other DNA
atggccttaccagtgaccgccttgctcctgccgctggccttgctgctccacgccgccaggccggacgacatcgtgatgacacagagccctgatagcctggccgtgtctctgggagagagagccaccattaactgcaaggccagccagagcgtggactacgacggcgacagcttcctgaactggtatcagcagaagcccggccagcctcctaagctgctgatctacgccgccagcaatctggaaagcggcgtgccaagcagattttccggctctggcagcggcaccgatttcaccctgacaatatccagcctccagcctgaggacgtggccgtgtactactgccagcagagcaacgacgaccctctgacctttggacagggcaccaaggtggaaatcaaactcgaggacctgaagaacgtgttcccacctgaggtggccgtgttcgagcctagcgaggccgagatcagccacacccagaaagccaccctcgtgtgcctggctaccggcttctaccccgaccatgtggaactgtcttggtgggtcaacggcaaagaggtgcacagcggcgtgtgtaccgacccccagccactgaaagaacagcccgccctgaacgacagccggtactgcctgagcagcagactgagagtgtccgccaccttctggcagaacccccggaaccacttcagatgccaggtgcagttctacggcctgagcgagaacgacgagtggacccaggacagagccaagcccgtgacccagatcgtgtctgccgaagcctggggcagagccgattgcggctttaccagcgagagctaccagcagggcgtgctgagcgccaccatcctgtacgagatcctgctgggcaaggccaccctgtacgccgtgctggtgtctgccctggtgctgatggctatggtcaagcggaaggacagccggggaagggccaagcgatctggatctggagcaacaaacttctcactactcaaacaagcaggtgacgtggaggagaatcccgggcctactagtatggactggatttggcgcatccttttccttgtcggcgctgctaccggcgcgcattccttcgaagaagtccaacttgtggagtctggagggggcctggtgcagcccggcggctctctcagactgtcttgtgcggcaagcggctacaccttcacctcttactggatagaatgggtgaggcaggcacctggaaagggactggagtggattggagagattctgccaggagggggagatacaaattacaatgaaatcttcaaggggcgggccaccttttcagcggataccagcaagaatacagcttacctgcagatgaatagcctccgggcagaagataccgctgtttattattgcacgagacgggtgccaataagactggactattgggggcaagggactcttgtcaccgtcagttcaacgcgtatccagaaccctgatcctgccgtgtaccagctgcgggatagcaagagcagcgacaagagcgtgtgtctgttcaccgacttcgacagccagaccaacgtgtcccagagcaaggactccgacgtgtacatcaccgataagtgcgtgctggacatgcggagcatggacttcaagagcaactccgccgtggcctggtccaacaagtccgatttcgcctgcgccaacgccttcaacaacagcattatccccgaggacacattcttcccaagccccgagagcagctgcgacgtgaagctggtggaaaagagcttcgagacagacaccaacctgaacttccagaacctgagcgtgatcggcttcagaatcctgctgctgaaagtggccggctttaacctgctgatgaccctgcggctgtggtccagctaa

SEQ ID NO: 4745 - DNA, 1866 bp, synthetic construct
  source 1..1866: mol_type = other DNA
atggccttaccagtgaccgccttgctcctgccgctggccttgctgctccacgccgccaggccggacatccagttgacccagtcccccagctcactcagcgccagtgtgggggaccgggtgaccattacctgtaaagccagtcagagtgtggactatgacggggatagcttcctgaattggtatcagcagaagcctggcaaagccccaaagctgctgatctacgctgcatctaatctggagtcaggcgtgccttccaggttctccggtagtgggtctgggaccgatttcacattgaccatttcatccctccaacccgaggatttcgctacatattactgtcagcagtccaatgaggaccctctcacctttggccagggcaccaaagttgaaattaagagactcgaggacctgaagaacgtgttcccacctgaggtggccgtgttcgagcctagcgaggccgagatcagccacacccagaaagccaccctcgtgtgcctggctaccggcttctaccccgaccatgtggaactgtcttggtgggtcaacggcaaagaggtgcacagcggcgtgtgtaccgacccccagccactgaaagaacagcccgccctgaacgacagccggtactgcctgagcagcagactgagagtgtccgccaccttctggcagaacccccggaaccacttcagatgccaggtgcagttctacggcctgagcgagaacgacgagtggacccaggacagagccaagcccgtgacccagatcgtgtctgccgaagcctggggcagagccgattgcggctttaccagcgagagctaccagcagggcgtgctgagcgccaccatcctgtacgagatcctgctgggcaaggccaccctgtacgccgtgctggtgtctgccctggtgctgatggctatggtcaagcggaaggacagccggggaagggccaagcgatctggatctggagcaacaaacttctcactactcaaacaagcaggtgacgtggaggagaatcccgggcctactagtatggactggatttggcgcatccttttccttgtcggcgctgctaccggcgcgcattccttcgaagtccaacttgtggagtctggagggggcctggtgcagcccggcggctctctcagactgtcttgtgcggcaagcggctacaccttcacctcttactggatagaatgggtgaggcaggcacctggaaagggactggagtggattggagagattctgccaggagggggagatacaaattacaatgaaatcttcaaggggcgggccaccttttcagcggataccagcaagaatacagcttacctgcagatgaatagcctccgggcagaagataccgctgtttattattgcacgagacgggtgccaataagactggactattgggggcaagggactcttgtcaccgtcagttcaacgcgtatccagaaccctgatcctgccgtgtaccagctgcgggatagcaagagcagcgacaagagcgtgtgtctgttcaccgacttcgacagccagaccaacgtgtcccagagcaaggactccgacgtgtacatcaccgataagtgcgtgctggacatgcggagcatggacttcaagagcaactccgccgtggcctggtccaacaagtccgatttcgcctgcgccaacgccttcaacaacagcattatccccgaggacacattcttcccaagccccgagagcagctgcgacgtgaagctggtggaaaagagcttcgagacagacaccaacctgaacttccagaacctgagcgtgatcggcttcagaatcctgctgctgaaagtggccggctttaacctgctgatgaccctgcggctgtggtccagctaa

SEQ ID NO: 4746 - DNA, 2217 bp, synthetic construct
  source 1..2217: mol_type = other DNA
atggccttaccagtgaccgccttgctcctgccgctggccttgctgctccacgccgccaggccggacatccagttgacccagtcccccagctcactcagcgccagtgtgggggaccgggtgaccattacctgtaaagccagtcagagtgtggactatgacggggatagcttcctgaattggtatcagcagaagcctggcaaagccccaaagctgctgatctacgctgcatctaatctggagtcaggcgtgccttccaggttctccggtagtgggtctgggaccgatttcacattgaccatttcatccctccaacccgaggatttcgctacatattactgtcagcagtccaatgaggaccctctcacctttggccagggcaccaaagttgaaattaagagactcgaggacctgaagaacgtgttcccacctgaggtggccgtgttcgagcctagcgaggccgagatcagccacacccagaaagccaccctcgtgtgcctggctaccggcttctaccccgaccatgtggaactgtcttggtgggtcaacggcaaagaggtgcacagcggcgtgtctaccgacccccagccactgaaagaacagcccgccctgaacgacagccggtactgcctgagcagcagactgagagtgtccgccaccttctggcagaacccccggaaccacttcagatgccaggtgcagttctacggcctgagcgagaacgacgagtggacccaggacagagccaagcccgtgacccagatcgtgtctgccgaagcctggggcagagccgattgcggatcccagagcttcggcctgctggaccccaagctgtgctacctgctggatggcatcctgttcatctacggcgtgatcctgaccgccctgttcctgagagtgaagttcagcagaagcgccgacgcccctgcctaccagcagggacagaaccaactgtacaacgagctgaacctgggcagacgggaagagtacgacgtgctggacaagcggagaggcagggaccctgagatgggcggaaagccccggagaaagaacccccaggaaggactgtataacgaactccagaaagacaagatggccgaagcctacagcgagatcggcatgaagggcgagcggagaagaggcaagggccacgatggcctgtaccagggcctgagcaccgccaccaaggacacctatgacgccctgcacatgcaggccctgcctccaagaagggccaagcgatctggatctggagcaacaaacttctcactactcaaacaagcaggtgacgtggaggagaatcccgggcctactagtatggactggatttggcgcatccttttccttgtcggcgctgctaccggcgcgcattccttcgaagtccaacttgtggagtctggagggggcctggtgcagcccggcggctctctcagactgtcttgtgcggcaagcggctacaccttcacctcttactggatagaatgggtgaggcaggcacctggaaagggactggagtggattggagagattctgccaggagggggagatacaaattacaatgaaatcttcaaggggcgggccaccttttcagcggataccagcaagaatacagcttacctgcagatgaatagcctccgggcagaagataccgctgtttattattgcacgagacgggtgccaataagactggactattgggggcaagggactcttgtcaccgtcagttcaacgcgtatccagaaccctgatcctgccgtgtaccagctgcgggatagcaagagcagcgacaagagcgtgtgtctgttcaccgacttcgacagccagaccaacgtgtcccagagcaaggactccgacgtgtacatcaccgataagaccgtgctggacatgcggagcatggacttcaagagcaactccgccgtggcctggtccaacaagtccgatttcgcctgcgccaacgccttcaacaacagcattatccccgaggacacattcttcccaagccccgagagcagctgcggtaccatcactcaaggtttggcagtgtcaaccatctcatcattctttccacctggctaccaagtgtccttctgcctggtcatggtgctgctgttcgccgtggataccggcctgtacttcagcgtcaagaccaacatccggtccagcaccagagactggaaggaccacaagttcaagtggcggaaggaccctcaggacaagtaa

SEQ ID NO: 4747 - DNA, 1869 bp, synthetic construct
  source 1..1869: mol_type = other DNA
atggccttaccagtgaccgccttgctcctgccgctggccttgctgctccacgccgccaggccggacatccagttgacccagtcccccagctcactcagcgccagtgtgggggaccgggtgaccattacctgtaaagccagtcagagtgtggactatgacggggatagcttcctgaattggtatcagcagaagcctggcaaagccccaaagctgctgatctacgctgcatctaatctggagtcaggcgtgccttccaggttctccggtagtgggtctgggaccgatttcacattgaccatttcatccctccaacccgaggatttcgctacatattactgtcagcagtccaatgaggaccctctcacctttggccagggcaccaaagttgaaattaagagactcgaggacctgaagaacgtgttcccacctgaggtggccgtgttcgagcctagcgaggccgagatcagccacacccagaaagccaccctcgtgtgcctggctaccggcttctaccccgaccatgtggaactgtcttggtgggtcaacggcaaagaggtgcacagcggcgtgtgtaccgacccccagccactgaaagaacagcccgccctgaacgacagccggtactgcctgagcagcagactgagagtgtccgccaccttctggcagaacccccggaaccacttcagatgccaggtgcagttctacggcctgagcgagaacgacgagtggacccaggacagagccaagcccgtgacccagatcgtgtctgccgaagcctggggcagagccgattgcggctttaccagcgagagctaccagcagggcgtgctgagcgcctactacatgtacttgttgctgctgctgaagtccgtggtgtacttcgccatcatcacatgctgcctgctgcggagaaccgccttctgctgcaacggcgagaagtctagggccaagcgatctggatctggagcaacaaacttctcactactcaaacaagcaggtgacgtggaggagaatcccgggcctactagtatggactggatttggcgcatccttttccttgtcggcgctgctaccggcgcgcattccttcgaagtccaacttgtggagtctggagggggcctggtgcagcccggcggctctctcagactgtcttgtgcggcaagcggctacaccttcacctcttactggatagaatgggtgaggcaggcacctggaaagggactggagtggattggagagattctgccaggagggggagatacaaattacaatgaaatcttcaaggggcgggccaccttttcagcggataccagcaagaatacagcttacctgcagatgaatagcctccgggcagaagataccgctgtttattattgcacgagacgggtgccaataagactggactattgggggcaagggactcttgtcaccgtcagttcaacgcgtatccagaaccctgatcctgccgtgtaccagctgcgggatagcaagagcagcgacaagagcgtgtgtctgttcaccgacttcgacagccagaccaacgtgtcccagagcaaggactccgacgtgtacatcaccgataagtgcgtgctggacatgcggagcatggacttcaagagcaactccgccgtggcctggtccaacaagtccgatttcgcctgcgccaacgccttcaacaacagcattatccccgaggacacattcttcccaagccccgagagcagctgcgacgtgaagctggtggaaaagagcttcgagacagacaccaacctgaacttccagaacctgagcgtgatcggcttcagaatcctgctgctgaaagtggccggctttaacctgctgatgaccctgcggctgtggtccagctaa

SEQ ID NO: 4748 - DNA, 2217 bp, synthetic construct
  source 1..2217: mol_type = other DNA
atggccttaccagtgaccgccttgctcctgccgctggccttgctgctccacgccgccaggccggacatccagttgacccagtcccccagctcactcagcgccagtgtgggggaccgggtgaccattacctgtaaagccagtcagagtgtggactatgagggggatagcttcctgaattggtatcagcagaagcctggcaaagccccaaagctgctgatctacgctgcatctaatctggagtcaggcgtgccttctaggttctccggtagtgggtctgggaccgatttcacattgaccatttcatccctccaacccgaggatttcgctacatattactgtcagcagtccaatgaggaccctctcacctttggccagggcaccaaagttgaaattaagagactcgaggacctgaagaacgtgttcccacctgaggtggccgtgttcgagcctagcgaggccgagatcagccacacccagaaagccaccctcgtgtgcctggctaccggcttctaccccgaccatgtggaactgtcttggtgggtcaacggcaaagaggtgcacagcggcgtgtctaccgacccccagccactgaaagaacagcccgccctgaacgacagccggtactgcctgagcagcagactgagagtgtccgccaccttctggcagaacccccggaaccacttcagatgccaggtgcagttctacggcctgagcgagaacgacgagtggacccaggacagagccaagcccgtgacccagatcgtgtctgccgaagcctggggcagagccgattgcggatcccagagcttcggcctgctggaccccaagctgtgctacctgctggatggcatcctgttcatctacggcgtgatcctgaccgccctgttcctgagagtgaagttcagcagaagcgccgacgcccctgcctaccagcagggacagaaccaactgtacaacgagctgaacctgggcagacgggaagagtacgacgtgctggacaagcggagaggcagggaccctgagatgggcggaaagccccggagaaagaacccccaggaaggactgtataacgaactccagaaagacaagatggccgaagcctacagcgagatcggcatgaagggcgagcggagaagaggcaagggccacgatggcctgtaccagggcctgagcaccgccaccaaggacacctatgacgccctgcacatgcaggccctgcctccaagaagggccaagcgatctggatctggagcaacaaacttctcactactcaaacaagcaggtgacgtggaggagaatcccgggcctactagtatggactggatttggcgcatccttttccttgtcggcgctgctaccggcgcgcattccttcgaagtccaacttgtggagtctggagggggcctggtgcagcccggcggctctctcagactgtcttgtgcggcaagcggctacaccttcagctcttactggatagaatgggtgaggcaggcacctggaaagggactggagtggattggagagattctgccaggagggggagatacaaattacaatgaaatcttcaaggggcgggccaccttttcagcggataccagcaagaatacagcttacctgcagatgaatagcctccgggcagaagataccgctgtttattattgcacgagacgggtgccaataagactggactattgggggcaagggactcttgtcaccgtcagttcaacgcgtatccagaaccctgatcctgccgtgtaccagctgcgggatagcaagagcagcgacaagagcgtgtgtctgttcaccgacttcgacagccagaccaacgtgtcccagagcaaggactccgacgtgtacatcaccgataagaccgtgctggacatgcggagcatggacttcaagagcaactccgccgtggcctggtccaacaagtccgatttcgcctgcgccaacgccttcaacaacagcattatccccgaggacacattcttcccaagccccgagagcagctgcggtaccatcactcaaggtttggcagtgtcaaccatctcatcattctttccacctggctaccaagtgtccttctgcctggtcatggtgctgctgttcgccgtggataccggcctgtacttcagcgtcaagaccaacatccggtccagcaccagagactggaaggaccacaagttcaagtggcggaaggaccctcaggacaagtaa

SEQ ID NO: 4749 - DNA, 1866 bp, synthetic construct
  source 1..1866: mol_type = other DNA
atggccttaccagtgaccgccttgctcctgccgctggccttgctgctccacgccgccaggccggacatccagttgacccagtcccccagctcactcagcgccagtgtgggggaccgggtgaccattacctgtaaagccagtcagagtgtggactatgagggggatagcttcctgaattggtatcagcagaagcctggcaaagccccaaagctgctgatctacgctgcatctaatctggagtcaggcgtgccttctaggttctccggtagtgggtctgggaccgatttcacattgaccatttcatccctccaacccgaggatttcgctacatattactgtcagcagtccaatgaggaccctctcacctttggccagggcaccaaagttgaaattaagagactcgaggacctgaagaacgtgttcccacctgaggtggccgtgttcgagcctagcgaggccgagatcagccacacccagaaagccaccctcgtgtgcctggctaccggcttctaccccgaccatgtggaactgtcttggtgggtcaacggcaaagaggtgcacagcggcgtgtgtaccgacccccagccactgaaagaacagcccgccctgaacgacagccggtactgcctgagcagcagactgagagtgtccgccaccttctggcagaacccccggaaccacttcagatgccaggtgcagttctacggcctgagcgagaacgacgagtggacccaggacagagccaagcccgtgacccagatcgtgtctgccgaagcctggggcagagccgattgcggctttaccagcgagagctaccagcagggcgtgctgagcgccaccatcctgtacgagatcctgctgggcaaggccaccctgtacgccgtgctggtgtctgccctggtgctgatggctatggtcaagcggaaggacagccggggaagggccaagcgatctggatctggagcaacaaacttctcactactcaaacaagcaggtgacgtggaggagaatcccgggcctactagtatggactggatttggcgcatccttttccttgtcggcgctgctaccggcgcgcattccttcgaagtccaacttgtggagtctggagggggcctggtgcagcccggcggctctctcagactgtcttgtgcggcaagcggctacaccttcagctcttactggatagaatgggtgaggcaggcacctggaaagggactggagtggattggagagattctgccaggagggggagatacaaattacaatgaaatcttcaaggggcgggccaccttttcagcggataccagcaagaatacagcttacctgcagatgaatagcctccgggcagaagataccgctgtttattattgcacgagacgggtgccaataagactggactattgggggcaagggactcttgtcaccgtcagttcaacgcgtatccagaaccctgatcctgccgtgtaccagctgcgggatagcaagagcagcgacaagagcgtgtgtctgttcaccgacttcgacagccagaccaacgtgtcccagagcaaggactccgacgtgtacatcaccgataagtgcgtgctggacatgcggagcatggacttcaagagcaactccgccgtggcctggtccaacaagtccgatttcgcctgcgccaacgccttcaacaacagcattatccccgaggacacattcttcccaagccccgagagcagctgcgacgtgaagctggtggaaaagagcttcgagacagacaccaacctgaacttccagaacctgagcgtgatcggcttcagaatcctgctgctgaaagtggccggctttaacctgctgatgaccctgcggctgtggtccagctaa

SEQ ID NO: 4750 - DNA, 1869 bp, synthetic construct
  source 1..1869: mol_type = other DNA
atggccttaccagtgaccgccttgctcctgccgctggccttgctgctccacgccgccaggccggacatccagttgacccagtcccccagctcactcagcgccagtgtgggggaccgggtgaccattacctgtaaagccagtcagagtgtggactatgagggggatagcttcctgaattggtatcagcagaagcctggcaaagccccaaagctgctgatctacgctgcatctaatctggagtcaggcgtgccttctaggttctccggtagtgggtctgggaccgatttcacattgaccatttcatccctccaacccgaggatttcgctacatattactgtcagcagtccaatgaggaccctctcacctttggccagggcaccaaagttgaaattaagagactcgaggacctgaagaacgtgttcccacctgaggtggccgtgttcgagcctagcgaggccgagatcagccacacccagaaagccaccctcgtgtgcctggctaccggcttctaccccgaccatgtggaactgtcttggtgggtcaacggcaaagaggtgcacagcggcgtgtgtaccgacccccagccactgaaagaacagcccgccctgaacgacagccggtactgcctgagcagcagactgagagtgtccgccaccttctggcagaacccccggaaccacttcagatgccaggtgcagttctacggcctgagcgagaacgacgagtggacccaggacagagccaagcccgtgacccagatcgtgtctgccgaagcctggggcagagccgattgcggctttaccagcgagagctaccagcagggcgtgctgagcgcctactacatgtacttgttgctgctgctgaagtccgtggtgtacttcgccatcatcacatgctgcctgctgcggagaaccgccttctgctgcaacggcgagaagtctagggccaagcgatctggatctggagcaacaaacttctcactactcaaacaagcaggtgacgtggaggagaatcccgggcctactagtatggactggatttggcgcatccttttccttgtcggcgctgctaccggcgcgcattccttcgaagtccaacttgtggagtctggagggggcctggtgcagcccggcggctctctcagactgtcttgtgcggcaagcggctacaccttcagctcttactggatagaatgggtgaggcaggcacctggaaagggactggagtggattggagagattctgccaggagggggagatacaaattacaatgaaatcttcaaggggcgggccaccttttcagcggataccagcaagaatacagcttacctgcagatgaatagcctccgggcagaagataccgctgtttattattgcacgagacgggtgccaataagactggactattgggggcaagggactcttgtcaccgtcagttcaacgcgtatccagaaccctgatcctgccgtgtaccagctgcgggatagcaagagcagcgacaagagcgtgtgtctgttcaccgacttcgacagccagaccaacgtgtcccagagcaaggactccgacgtgtacatcaccgataagtgcgtgctggacatgcggagcatggacttcaagagcaactccgccgtggcctggtccaacaagtccgatttcgcctgcgccaacgccttcaacaacagcattatccccgaggacacattcttcccaagccccgagagcagctgcgacgtgaagctggtggaaaagagcttcgagacagacaccaacctgaacttccagaacctgagcgtgatcggcttcagaatcctgctgctgaaagtggccggctttaacctgctgatgaccctgcggctgtggtccagctaa

SEQ ID NO: 4751 - DNA, 1473 bp, synthetic construct
  source 1..1473: mol_type = other DNA
atggccttaccagtgaccgccttgctcctgccgctggccttgctgctccacgccgccaggccggacatccagttgacccagtcccccagctcactcagcgccagtgtgggggaccgggtgaccattacctgtaaagccagtcagagtgtggactatgacggggatagcttcctgaattggtatcagcagaagcctggcaaagccccaaagctgctgatctacgctgcatctaatctggagtcaggcgtgccttccaggttctccggtagtgggtctgggaccgatttcacattgaccatttcatccctccaacccgaggatttcgctacatattactgtcagcagtccaatgaggaccctctcacctttggccagggcaccaaagttgaaattaagagaggcggaggcggaagtggaggcggaggatctggcggcggaggctctgaagtccaacttgtggagtctggagggggcctggtgcagcccggcggctctctcagactgtcttgtgcggcaagcggctacaccttcacctcttactggatagaatgggtgaggcaggcacctggaaagggactggagtggattggagagattctgccaggagggggagatacaaattacaatgaaatcttcaaggggcgggccaccttttcagcggataccagcaagaatacagcttacctgcagatgaatagcctccgggcagaagataccgctgtttattattgcacgagacgggtgccaataagactggactattgggggcaagggactcttgtcaccgtcagttcaacgcgtaccacgacgccagcgccgcgaccaccaacaccggcgcccaccatcgcgtcgcagcccctgtccctgcgcccagaggcgtgccggccagcggcggggggcgcagtgcacacgagggggctggacttcgcctgtgacatctacatctgggcgcccttggccgggacttgtggggtccttctcctgtcactggttatcaccctttactgcaaacggggcagaaagaaactcctgtatatattcaaacaaccatttatgagaccagtacaaactactcaagaggaagatggctgtagctgccgatttccagaagaagaagaaggaggatgtgaactgagagtgaagttcagcaggagcgcagacgcccccgcgtaccagcagggccagaaccagctctataacgagctgaatctaggacgaagagaggagtacgatgttttggacaagagacgtggccgggaccctgagatggggggaaagccgagaaggaagaaccctcaggaaggcctgtacaatgaactgcagaaagataagatggcggaggcctacagtgagattgggatgaaaggcgagcgccggaggggcaaggggcacgatggcctttaccagggtctcagtacagccaccaaggacacctacgacgcccttcacatgcaggccctgccccctcgctaa

SEQ ID NO: 4752 - DNA, 1857 bp, synthetic construct
  source 1..1857: mol_type = other DNA
atggccttaccagtgaccgccttgctcctgccgctggccttgctgctccacgccgccaggccggacatcgtgatgacccagacccccctgaccctgagcgtgacaatcggacagcctgccagcatctcctgcaagagcagccagagcctgctggacagcgacggcaagacctacctgaactggctgctgcagaggccaggccagagccccgagagactgatctacctggtgtccaagctggactccggcgtgcccgatagattcacaggcagcggctccggcaccgacttcaccctgaagatcagccgggtggaagccgaggacctgggcgtgtactgttgttggcagggcacccacttcccttacaccttcggcggagggaccaaggtggaaatcaagctcgaggacctgaagaacgtgttcccacctgaggtggccgtgttcgagcctagcgaggccgagatcagccacacccagaaagccaccctcgtgtgcctggctaccggcttctaccccgaccatgtggaactgtcttggtgggtcaacggcaaagaggtgcacagcggcgtgtgtaccgacccccagccactgaaagaacagcccgccctgaacgacagccggtactgcctgagcagcagactgagagtgtccgccaccttctggcagaacccccggaaccacttcagatgccaggtgcagttctacggcctgagcgagaacgacgagtggacccaggacagagccaagcccgtgacccagatcgtgtctgccgaagcctggggcagagccgattgcggctttaccagcgagagctaccagcagggcgtgctgagcgccaccatcctgtacgagatcctgctgggcaaggccaccctgtacgccgtgctggtgtctgccctggtgctgatggctatggtcaagcggaaggacagccggggaagggccaagcgatctggatctggagcaacaaacttctcactactcaaacaagcaggtgacgtggaggagaatcccgggcctactagtatggactggatttggcgcatccttttccttgtcggcgctgctaccggcgcgcattccttcgaacaggtgcaactgcagcagcctggcgctgaacttgtgcggccaggcgcctctgtgaagctgagctgtaaagccagcggctacaccttcaccagctactggatgaactgggtcaagcagcgcccaggccagggcctggaatggatcggaatgatcgaccccagcgacagcgagacacactacaaccacatcttcaaggacaaggccaccctgaccgtggacaagtccagcagcacagcctacctgcaactgtccagcctgaccagcgaggacagcgccgtgtactactgcgcccggaacctgtatctgtggggccagggaacaagcgtgaccgtgtctagcacgcgtatccagaaccctgatcctgccgtgtaccagctgcgggatagcaagagcagcgacaagagcgtgtgtctgttcaccgacttcgacagccagaccaacgtgtcccagagcaaggactccgacgtgtacatcaccgataagtgcgtgctggacatgcggagcatggacttcaagagcaactccgccgtggcctggtccaacaagtccgatttcgcctgcgccaacgccttcaacaacagcattatccccgaggacacattcttcccaagccccgagagcagctgcgacgtgaagctggtggaaaagagcttcgagacagacaccaacctgaacttccagaacctgagcgtgatcggcttcagaatcctgctgctgaaagtggccggctttaacctgctgatgaccctgcggctgtggtccagctaa

SEQ ID NO: 4753 - DNA, 11 bp, synthetic construct
  source 1..11: mol_type = other DNA
ggggggggggg

SEQ ID NO: 4754 - DNA, 1665 bp, synthetic construct
  source 1..1665: mol_type = other DNA
atggccttaccagtgaccgccttgctcctgccgctggccttgctgctccacgccgccaggccggacatccagatgacacagagccctagcagcctgtctgccagcgtgggagacagagtgaccatcacatgcaaggccagcgaccacatcaacaactggctggcctggtatcagcagaagcctggacaggcccctaagctgctgatctacggcgctaccacactggaaacaggcgtgcccagcagattttctggcagcggctctggcaccgactacaccctgacaatatccagcctccagcctgaggacttcgccacctactactgtcagcagagctggaacaccccttggacattcggccagggcaccaagctggaaatcaagagactcgagggaggctctgccagaagcgaggacagatacagaaaccccaaaggcggaagcttcgaacaagttcagcttcaacagcctggcgctgagctggtcaaacctggcgcttctgtgaagatgagctgcaaagccagcggctacgccttcagcagctactggatcaactggatgaagcagaaacccggccagggactcgaatggatcggccaaatctatcccggcgacggcgacaccaactacaacggcaagttcaagggcagagccacactgaccgccgatacctctagcagcacagcctacatgcagctgagcagcctgaccagcgaagatagcgccgtgtacttctgtgcccggtccatcacaacagtcgtgggctgcgctatggactattggggccagggaacaagcgtgaccgtgtctagtacgcgtatccagaaccctgatcctgccgtgtaccagctgcgggatagcaagagcagcgacaagagcgtgtgtctgttcaccgacttcgacagccagaccaacgtgtcccagagcaaggactccgacgtgtacatcaccgataagaccgtgctggacatgcggagcatggacttcaagagcaactccgccgtggcctggtccaacaagtccgatttcgcctgcgccaacgccttcaacaacagcattatccccgaggacacattcttcccaagccccgagagcagctgcggtacccagagttttgggttgttggaccctaaattgtgctatctgttggacggaatcctgttcatttacggagtgatcctgaccgcattgttcctgaagagaggccggaagaagctgctgtacatcttcaagcagcctttcatgcggcccgtgcagaccacccaggaagaggacggctgctcctgccggttccccgaggaagaagaaggcggctgcgagctgcgggttaagttttccagatccgcagacgcacccgcttaccaacaagggcagaaccaactctacaatgaacttaatttggggcggagggaagagtacgacgttctggacaaaaggaggggacgagatcccgagatgggcggaaagcctcagcgaaggaagaatccgcaagaggggctttataacgaactccagaaagataaaatggcagaagcctatagtgagattgggatgaagggagaaaggaggaggggtaaaggtcacgatgggttgtaccaaggattgagcacagccactaaagatacctatgatgcgctccacatgcaggccctgccgccaagataa

SEQ ID NO: 4755 - DNA, 1854 bp, synthetic construct
  source 1..1854: mol_type = other DNA
atggccttaccagtgaccgccttgctcctgccgctggccttgctgctccacgccgccaggccgcagatcgtgctgacacagagccctgccatcatgtccgcttctcccggcgagaaagtgaccatgacatgtagcgccagcagcagcgtgtccttcatgcactggtatcagcagaagtccggcacaagccccaagcggtggatctacgataccagcacactggcctctggcgtgccagccagatttggcggatctggcagcggcacatcttacagcctgaccatcagcagcatggaagccgaagatgccgccacctactactgccagcagtggtccagcaatcccctgacatttggagccggcaccaagctggaactgaagagactcgaggacctgaagaacgtgttcccacctgaggtggccgtgttcgagcctagcgaggccgagatcagccacacccagaaagccaccctcgtgtgcctggctaccggcttctaccccgaccatgtggaactgtcttggtgggtcaacggcaaagaggtgcacagcggcgtgtctaccgacccccagccactgaaagaacagcccgccctgaacgacagccggtactgcctgagcagcagactgagagtgtccgccaccttctggcagaacccccggaaccacttcagatgccaggtgcagttctacggcctgagcgagaacgacgagtggacccaggacagagccaagcccgtgacccagatcgtgtctgccgaagcctggggcagagccgattgcggctttaccagcgagagctaccagcagggcgtgctgagcgcctactacatgtacttgttgctgctgctgaagtccgtggtgtacttcgccatcatcacatgctgcctgctgcggagaaccgccttctgctgcaacggcgagaagtctagggccaagcgatctggatctggagcaacaaacttctcactactcaaacaagcaggtgacgtggaggagaatcccgggcctactagtatggactggatttggcgcatccttttccttgtcggcgctgctaccggcgcgcattccttcgaacaagttcagctgcaacagagcggccctgagctggttaagcctggcgcttctgtgcggatctcttgcaaggccagcggctacaccttcaccagctactacatccactgggtcaagcagcggcctggacagggactcgaatggatcggctggatctaccccggcaacctgaacaccaagtacaacgagaagttcaagggcaaagccacactgaccgccgacaagagcagcagcacagcctacatgcagctgagcagcctgacaagcgaggacagcgccgtgtacttctgcgccagatacgactggtacttcgacgtgtggggagccggaaccaccgtgacagtttcttctacgcgtatccagaaccctgatcctgccgtgtaccagctgcgggatagcaagagcagcgacaagagcgtgtgtctgttcaccgacttcgacagccagaccaacgtgtcccagagcaaggactccgacgtgtacatcaccgataagtgcgtgctggacatgcggagcatggacttcaagagcaactccgccgtggcctggtccaacaagtccgatttcgcctgcgccaacgccttcaacaacagcattatccccgaggacacattcttcccaagcagcgacgtgccctgcgacgtgaagctggtggaaaagagcttcgagacagacaccaacctgaacttccagaacctgagcgtgatcggcttcagaatcctgctgctgaaagtggccggctttaacctgctgatgaccctgcggctgtggtccagctaa

SEQ ID NO: 4756 - DNA, 1872 bp, synthetic construct
  source 1..1872: mol_type = other DNA
atggccttaccagtgaccgccttgctcctgccgctggccttgctgctccacgccgccaggccggacgacatcgtgatgacacagagccctgatagcctggccgtgtctctgggagagagagccaccattaactgcaaggccagccagagcgtggactacgacggcgacagcttcctgaactggtatcagcagaagcccggccagcctcctaagctgctgatctacgccgccagcaatctggaaagcggcgtgccaagcagattttccggctctggcagcggcaccgatttcaccctgacaatatccagcctccagcctgaggacgtggccgtgtactactgccagcagagcaacgacgaccctctgacctttggacagggcaccaaggtggaaatcaaactcgaggacctgaagaacgtgttcccacctgaggtggccgtgttcgagcctagcgaggccgagatcagccacacccagaaagccaccctcgtgtgcctggctaccggcttctaccccgaccatgtggaactgtcttggtgggtcaacggcaaagaggtgcacagcggcgtgtctaccgacccccagccactgaaagaacagcccgccctgaacgacagccggtactgcctgagcagcagactgagagtgtccgccaccttctggcagaacccccggaaccacttcagatgccaggtgcagttctacggcctgagcgagaacgacgagtggacccaggacagagccaagcccgtgacccagatcgtgtctgccgaagcctggggcagagccgattgcggctttaccagcgagagctaccagcagggcgtgctgagcgcctactacatgtacttgttgctgctgctgaagtccgtggtgtacttcgccatcatcacatgctgcctgctgcggagaaccgccttctgctgcaacggcgagaagtctagggccaagcgatctggatctggagcaacaaacttctcactactcaaacaagcaggtgacgtggaggagaatcccgggcctactagtatggactggatttggcgcatccttttccttgtcggcgctgctaccggcgcgcattccttcgaagaagtccaacttgtggagtctggagggggcctggtgcagcccggcggctctctcagactgtcttgtgcggcaagcggctacaccttcacctcttactggatagaatgggtgaggcaggcacctggaaagggactggagtggattggagagattctgccaggagggggagatacaaattacaatgaaatcttcaaggggcgggccaccttttcagcggataccagcaagaatacagcttacctgcagatgaatagcctccgggcagaagataccgctgtttattattgcacgagacgggtgccaataagactggactattgggggcaagggactcttgtcaccgtcagttcaacgcgtatccagaaccctgatcctgccgtgtaccagctgcgggatagcaagagcagcgacaagagcgtgtgtctgttcaccgacttcgacagccagaccaacgtgtcccagagcaaggactccgacgtgtacatcaccgataagtgcgtgctggacatgcggagcatggacttcaagagcaactccgccgtggcctggtccaacaagtccgatttcgcctgcgccaacgccttcaacaacagcattatccccgaggacacattcttcccaagccccgagagcagctgcgacgtgaagctggtggaaaagagcttcgagacagacaccaacctgaacttccagaacctgagcgtgatcggcttcagaatcctgctgctgaaagtggccggctttaacctgctgatgaccctgcggctgtggtccagctaa

SEQ ID NO: 4757 - DNA, 2673 bp, synthetic construct
  source 1..2673: mol_type = other DNA
atggccttaccagtgaccgccttgctcctgccgctggccttgctgctccacgccgccaggccggacatccagatgacacagagccctagcagcctgtctgccagcgtgggagacagagtgaccatcacatgcaaggccagcgaccacatcaacaactggctggcctggtatcagcagaagcctggacaggcccctaagctgctgatctacggcgctaccacactggaaacaggcgtgcccagcagattttctggcagcggctctggcaccgactacaccctgacaatatccagcctccagcctgaggacttcgccacctactactgtcagcagagctggaacaccccttggacattcggccagggcaccaagctggaaatcaagagactcgaggacctgaagaacgtgttcccacctgaggtggccgtgttcgagcctagcgaggccgagatcagccacacccagaaagccaccctcgtgtgcctggctaccggcttctaccccgaccatgtggaactgtcttggtgggtcaacggcaaagaggtgcacagcggcgtgtgtaccgacccccagccactgaaagaacagcccgccctgaacgacagccggtactgcctgagcagcagactgagagtgtccgccaccttctggcagaacccccggaaccacttcagatgccaggtgcagttctacggcctgagcgagaacgacgagtggacccaggacagagccaagcccgtgacccagatcgtgtctgccgaagcctggggcagagccgattgcggctttaccagcgagagctaccagcagggcgtgctgagcgccaccatcctgtacgagatcctgctgggcaaggccaccctgtacgccgtgctggtgtctgccctggtgctgatggctatggtcaagcggaaggacagccggggaagggccaagcgatctggatctggagcaacaaacttctcactactcaaacaagcaggtgacgtggaggagaatcccgggcctactagtgccaccatggactggatttggcgcatccttttccttgtcggcgctgctaccggcgcccattccgggcccgcaagaagtgaagatcgctacaggaaccctaaggggtcagccggatccggcggcggaggatctggcggaggcggatctgggggcggaggctctttcgaacaagttcagcttcaacagcctggcgctgagctggtcaaacctggcgcttctgtgaagatgagctgcaaagccagcggctacgccttcagcagctactggatcaactggatgaagcagaaacccggccagggactcgaatggatcggccaaatctatcccggcgacggcgacaccaactacaacggcaagttcaagggcagagccacactgaccgccgatacctctagcagcacagcctacatgcagctgagcagcctgaccagcgaagatagcgccgtgtacttctgtgcccggtccatcacaacagtcgtgggctgcgctatggactattggggccagggaacaagcgtgaccgtgtctagtacgcgtatccagaaccctgatcctgccgtgtaccagctgcgggatagcaagagcagcgacaagagcgtgtgtctgttcaccgacttcgacagccagaccaacgtgtcccagagcaaggactccgacgtgtacatcaccgataagtgcgtgctggacatgcggagcatggacttcaagagcaactccgccgtggcctggtccaacaagtccgatttcgcctgcgccaacgccttcaacaacagcattatccccgaggacacattcttcccaagccccgagagcagctgcgacgtgaagctggtggaaaagagcttcgagacagacaccaacctgaacttccagaacctgagcgtgatcggcttcagaatcctgctgctgaaagtggccggctttaacctgctgatgaccctgcggctgtggtccagccgcgccaagagaagcggatctggcgtgaagcagaccctgaatttcgacctgctgaagctggctggcgacgtggaatccaacccaggcccttctagaggccatatgaccgagtacaagcccacggtgcgcctcgccacccgcgacgacgtccccagggccgtacgcaccctcgccgccgcgttcgccgactaccccgccacgcgccacaccgtcgatccggaccgccacatcgagcgggtcaccgagctgcaagaactcttcctcacgcgcgtcgggctcgacatcggcaaggtgtgggtcgcggacgacggcgccgcggtggcggtctggaccacgccggagagcgtcgaagcgggggcggtgttcgccgagatcggcccgcgcatggccgagttgagcggttcccggctggccgcgcagcaacagatggaaggcctcctggcgccgcaccggcccaaggagcccgcgtggttcctggccaccgtcggcgtctcgcccgaccaccagggcaagggtctgggcagcgccgtcgtgctccccggagtggaggcggccgagcgcgccggggtgcccgccttcctggagacctccgcgccccgcaacctccccttctacgagcggctcggcttcaccgtcaccgccgacgtcgaggtgcccgaaggaccgcgcacctggtgcatgacccgcaagcccggtgcctga

SEQ ID NO: 4758 - DNA, 2664 bp, synthetic construct
  source 1..2664: mol_type = other DNA
atggccttaccagtgaccgccttgctcctgccgctggccttgctgctccacgccgccaggccggacatccagatgacacagagccctagcagcctgtctgccagcgtgggagacagagtgaccatcacatgcaaggccagcgaccacatcaacaactggctggcctggtatcagcagaagcctggacaggcccctaagctgctgatctacggcgctaccacactggaaacaggcgtgcccagcagattttctggcagcggctctggcaccgactacaccctgacaatatccagcctccagcctgaggacttcgccacctactactgtcagcagagctggaacaccccttggacattcggccagggcaccaagctggaaatcaagagactcgaggacctgaagaacgtgttcccacctgaggtggccgtgttcgagcctagcgaggccgagatcagccacacccagaaagccaccctcgtgtgcctggctaccggcttctaccccgaccatgtggaactgtcttggtgggtcaacggcaaagaggtgcacagcggcgtgtgtaccgacccccagccactgaaagaacagcccgccctgaacgacagccggtactgcctgagcagcagactgagagtgtccgccaccttctggcagaacccccggaaccacttcagatgccaggtgcagttctacggcctgagcgagaacgacgagtggacccaggacagagccaagcccgtgacccagatcgtgtctgccgaagcctggggcagagccgattgcggctttaccagcgagagctaccagcagggcgtgctgagcgccaccatcctgtacgagatcctgctgggcaaggccaccctgtacgccgtgctggtgtctgccctggtgctgatggctatggtcaagcggaaggacagccggggaagggccaagcgatctggatctggagcaacaaacttctcactactcaaacaagcaggtgacgtggaggagaatcccgggcctactagtgccaccatggactggatttggcgcatccttttccttgtcggcgctgctaccggcgcccattccgggcccgccagaagcgaggacagatacagaaaccccaaaggatcctttgggggaggatctggcggaggcggatctgggggcggaggctctttcgaacaagttcagcttcaacagcctggcgctgagctggtcaaacctggcgcttctgtgaagatgagctgcaaagccagcggctacgccttcagcagctactggatcaactggatgaagcagaaacccggccagggactcgaatggatcggccaaatctatcccggcgacggcgacaccaactacaacggcaagttcaagggcagagccacactgaccgccgatacctctagcagcacagcctacatgcagctgagcagcctgaccagcgaagatagcgccgtgtacttctgtgcccggtccatcacaacagtcgtgggctgcgctatggactattggggccagggaacaagcgtgaccgtgtctagtacgcgtatccagaaccctgatcctgccgtgtaccagctgcgggatagcaagagcagcgacaagagcgtgtgtctgttcaccgacttcgacagccagaccaacgtgtcccagagcaaggactccgacgtgtacatcaccgataagtgcgtgctggacatgcggagcatggacttcaagagcaactccgccgtggcctggtccaacaagtccgatttcgcctgcgccaacgccttcaacaacagcattatccccgaggacacattcttcccaagccccgagagcagctgcgacgtgaagctggtggaaaagagcttcgagacagacaccaacctgaacttccagaacctgagcgtgatcggcttcagaatcctgctgctgaaagtggccggctttaacctgctgatgaccctgcggctgtggtccagccgcgccaagagaagcggatctggcgtgaagcagaccctgaatttcgacctgctgaagctggctggcgacgtggaatccaacccaggcccttctagaggccatatgaccgagtacaagcccacggtgcgcctcgccacccgcgacgacgtccccagggccgtacgcaccctcgccgccgcgttcgccgactaccccgccacgcgccacaccgtcgatccggaccgccacatcgagcgggtcaccgagctgcaagaactcttcctcacgcgcgtcgggctcgacatcggcaaggtgtgggtcgcggacgacggcgccgcggtggcggtctggaccacgccggagagcgtcgaagcgggggcggtgttcgccgagatcggcccgcgcatggccgagttgagcggttcccggctggccgcgcagcaacagatggaaggcctcctggcgccgcaccggcccaaggagcccgcgtggttcctggccaccgtcggcgtctcgcccgaccaccagggcaagggtctgggcagcgccgtcgtgctccccggagtggaggcggccgagcgcgccggggtgcccgccttcctggagacctccgcgccccgcaacctccccttctacgagcggctcggcttcaccgtcaccgccgacgtcgaggtgcccgaaggaccgcgcacctggtgcatgacccgcaagcccggtgcctga

SEQ ID NO: 4759 - DNA, 2394 bp, synthetic construct
  source 1..2394: mol_type = other DNA
atggccttaccagtgaccgccttgctcctgccgctggccttgctgctccacgccgccaggccggcatgccgcgcacgcagcgaggacaggtataggaaccccaaaggaagtgcgggtaccggcggaggcggatctggcggcggaggtagcggtggcggaggatctgaattcgacatccagatgacacagagccctagcagcctgtctgccagcgtgggagacagagtgaccatcacatgcaaggccagcgaccacatcaacaactggctggcctggtatcagcagaagcctggacaggcccctaagctgctgatctacggcgctaccacactggaaacaggcgtgcccagcagattttctggcagcggctctggcaccgactacaccctgacaatatccagcctccagcctgaggacttcgccacctactactgtcagcagagctggaacaccccttggacattcggccagggcaccaagctggaaatcaagagactcgaggacctgaagaacgtgttcccacctgaggtggccgtgttcgagcctagcgaggccgagatcagccacacccagaaagccaccctcgtgtgcctggctaccggcttctaccccgaccatgtggaactgtcttggtgggtcaacggcaaagaggtgcacagcggcgtgtgtaccgacccccagccactgaaagaacagcccgccctgaacgacagccggtactgcctgagcagcagactgagagtgtccgccaccttctggcagaacccccggaaccacttcagatgccaggtgcagttctacggcctgagcgagaacgacgagtggacccaggacagagccaagcccgtgacccagatcgtgtctgccgaagcctggggcagagccgattgcggctttaccagcgagagctaccagcagggcgtgctgagcgccaccatcctgtacgagatcctgctgggcaaggccaccctgtacgccgtgctggtgtctgccctggtgctgatggctatggtcaagcggaaggacagccggggaagggccaagcgatctggatctggagcaacaaacttctcactactcaaacaagcaggtgacgtggaggagaatcccgggcctactagtgccaccatggactggatttggcgcatccttttccttgtcggcgctgctaccggcgcccattccgggcccgaagtgcaactggttgaatccggtggcggcctggtgcaagcaggcggatctctcagacttagctgtgccgcctccggcagaaccttcacaatgggatggtttaggcaggctccagggaaagagagagagttcgtcgccgccatctctctgtctcccacactggcctactacgccgactctgtgaaaggccggttcaccatctccagagataatgccaagaacaccgtggtgctgcaaatgaactctctgaaacccgaggatacagccctgtactattgtgccgctgaccggaagtccgtgatgagcatcagacccgattactggggacagggcacacaagtcacagtgtcctctggatccggcggcggaggatctggcggaggcggatctgggggcggaggctctttcgaacaagttcagcttcaacagcctggcgctgagctggtcaaacctggcgcttctgtgaagatgagctgcaaagccagcggctacgccttcagcagctactggatcaactggatgaagcagaaacccggccagggactcgaatggatcggccaaatctatcccggcgacggcgacaccaactacaacggcaagttcaagggcagagccacactgaccgccgatacctctagcagcacagcctacatgcagctgagcagcctgaccagcgaagatagcgccgtgtacttctgtgcccggtccatcacaacagtcgtgggctgcgctatggactattggggccagggaacaagcgtgaccgtgtctagtacgcgtatccagaaccctgatcctgccgtgtaccagctgcgggatagcaagagcagcgacaagagcgtgtgtctgttcaccgacttcgacagccagaccaacgtgtcccagagcaaggactccgacgtgtacatcaccgataagtgcgtgctggacatgcggagcatggacttcaagagcaactccgccgtggcctggtccaacaagtccgatttcgcctgcgccaacgccttcaacaacagcattatccccgaggacacattcttcccaagccccgagagcagctgcgacgtgaagctggtggaaaagagcttcgagacagacaccaacctgaacttccagaacctgagcgtgatcggcttcagaatcctgctgctgaaagtggccggctttaacctgctgatgaccctgcggctgtggtccagctaa

SEQ ID NO: 4760 - DNA, 2382 bp, synthetic construct
  source 1..2382: mol_type = other DNA
atggccttaccagtgaccgccttgctcctgccgctggccttgctgctccacgccgccaggccggcatgcgctagaagcgaagatcggtatcggaaccccaagggtaccggcggaggcggatctggcggcggaggtagcggtggcggaggatctgaattcgacatccagatgacacagagccctagcagcctgtctgccagcgtgggagacagagtgaccatcacatgcaaggccagcgaccacatcaacaactggctggcctggtatcagcagaagcctggacaggcccctaagctgctgatctacggcgctaccacactggaaacaggcgtgcccagcagattttctggcagcggctctggcaccgactacaccctgacaatatccagcctccagcctgaggacttcgccacctactactgtcagcagagctggaacaccccttggacattcggccagggcaccaagctggaaatcaagagactcgaggacctgaagaacgtgttcccacctgaggtggccgtgttcgagcctagcgaggccgagatcagccacacccagaaagccaccctcgtgtgcctggctaccggcttctaccccgaccatgtggaactgtcttggtgggtcaacggcaaagaggtgcacagcggcgtgtgtaccgacccccagccactgaaagaacagcccgccctgaacgacagccggtactgcctgagcagcagactgagagtgtccgccaccttctggcagaacccccggaaccacttcagatgccaggtgcagttctacggcctgagcgagaacgacgagtggacccaggacagagccaagcccgtgacccagatcgtgtctgccgaagcctggggcagagccgattgcggctttaccagcgagagctaccagcagggcgtgctgagcgccaccatcctgtacgagatcctgctgggcaaggccaccctgtacgccgtgctggtgtctgccctggtgctgatggctatggtcaagcggaaggacagccggggaagggccaagcgatctggatctggagcaacaaacttctcactactcaaacaagcaggtgacgtggaggagaatcccgggcctactagtgccaccatggactggatttggcgcatccttttccttgtcggcgctgctaccggcgcccattccgggcccgaagtgcaactggttgaatccggtggcggcctggtgcaagcaggcggatctctcagacttagctgtgccgcctccggcagaaccttcacaatgggatggtttaggcaggctccagggaaagagagagagttcgtcgccgccatctctctgtctcccacactggcctactacgccgactctgtgaaaggccggttcaccatctccagagataatgccaagaacaccgtggtgctgcaaatgaactctctgaaacccgaggatacagccctgtactattgtgccgctgaccggaagtccgtgatgagcatcagacccgattactggggacagggcacacaagtcacagtgtcctctggatccggcggcggaggatctggcggaggcggatctgggggcggaggctctttcgaacaagttcagcttcaacagcctggcgctgagctggtcaaacctggcgcttctgtgaagatgagctgcaaagccagcggctacgccttcagcagctactggatcaactggatgaagcagaaacccggccagggactcgaatggatcggccaaatctatcccggcgacggcgacaccaactacaacggcaagttcaagggcagagccacactgaccgccgatacctctagcagcacagcctacatgcagctgagcagcctgaccagcgaagatagcgccgtgtacttctgtgcccggtccatcacaacagtcgtgggctgcgctatggactattggggccagggaacaagcgtgaccgtgtctagtacgcgtatccagaaccctgatcctgccgtgtaccagctgcgggatagcaagagcagcgacaagagcgtgtgtctgttcaccgacttcgacagccagaccaacgtgtcccagagcaaggactccgacgtgtacatcaccgataagtgcgtgctggacatgcggagcatggacttcaagagcaactccgccgtggcctggtccaacaagtccgatttcgcctgcgccaacgccttcaacaacagcattatccccgaggacacattcttcccaagccccgagagcagctgcgacgtgaagctggtggaaaagagcttcgagacagacaccaacctgaacttccagaacctgagcgtgatcggcttcagaatcctgctgctgaaagtggccggctttaacctgctgatgaccctgcggctgtggtccagctaa

SEQ ID NO: 4761 - DNA, 2664 bp, synthetic construct
  source 1..2664: mol_type = other DNA
atggccttaccagtgaccgccttgctcctgccgctggccttgctgctccacgccgccaggccggacatccagatgacacagagccctagcagcctgtctgccagcgtgggagacagagtgaccatcacatgcaaggccagcgaccacatcaacaactggctggcctggtatcagcagaagcctggacaggcccctaagctgctgatctacggcgctaccacactggaaacaggcgtgcccagcagattttctggcagcggctctggcaccgactacaccctgacaatatccagcctccagcctgaggacttcgccacctactactgtcagcagagctggaacaccccttggacattcggccagggcaccaagctggaaatcaagagactcgaggacctgaagaacgtgttcccacctgaggtggccgtgttcgagcctagcgaggccgagatcagccacacccagaaagccaccctcgtgtgcctggctaccggcttctaccccgaccatgtggaactgtcttggtgggtcaacggcaaagaggtgcacagcggcgtgtgtaccgacccccagccactgaaagaacagcccgccctgaacgacagccggtactgcctgagcagcagactgagagtgtccgccaccttctggcagaacccccggaaccacttcagatgccaggtgcagttctacggcctgagcgagaacgacgagtggacccaggacagagccaagcccgtgacccagatcgtgtctgccgaagcctggggcagagccgattgcggctttaccagcgagagctaccagcagggcgtgctgagcgccaccatcctgtacgagatcctgctgggcaaggccaccctgtacgccgtgctggtgtctgccctggtgctgatggctatggtcaagcggaaggacagccggggaagggccaagcgatctggatctggagcaacaaacttctcactactcaaacaagcaggtgacgtggaggagaatcccgggcctactagtgccaccatggactggatttggcgcatccttttccttgtcggcgctgctaccggcgcccattccgggcccgccagaagcgaggacagatacagaaaccccaaaggatccggcggcggaggatctggcggaggcggatctgggggcggaggctctttcgaacaagttcagcttcaacagcctggcgctgagctggtcaaacctggcgcttctgtgaagatgagctgcaaagccagcggctacgccttcagcagctactggatcaactggatgaagcagaaacccggccagggactcgaatggatcggccaaatctatcccggcgacggcgacaccaactacaacggcaagttcaagggcagagccacactgaccgccgatacctctagcagcacagcctacatgcagctgagcagcctgaccagcgaagatagcgccgtgtacttctgtgcccggtccatcacaacagtcgtgggctgcgctatggactattggggccagggaacaagcgtgaccgtgtctagtacgcgtatccagaaccctgatcctgccgtgtaccagctgcgggatagcaagagcagcgacaagagcgtgtgtctgttcaccgacttcgacagccagaccaacgtgtcccagagcaaggactccgacgtgtacatcaccgataagtgcgtgctggacatgcggagcatggacttcaagagcaactccgccgtggcctggtccaacaagtccgatttcgcctgcgccaacgccttcaacaacagcattatccccgaggacacattcttcccaagccccgagagcagctgcgacgtgaagctggtggaaaagagcttcgagacagacaccaacctgaacttccagaacctgagcgtgatcggcttcagaatcctgctgctgaaagtggccggctttaacctgctgatgaccctgcggctgtggtccagccgcgccaagagaagcggatctggcgtgaagcagaccctgaatttcgacctgctgaagctggctggcgacgtggaatccaacccaggcccttctagaggccatatgaccgagtacaagcccacggtgcgcctcgccacccgcgacgacgtccccagggccgtacgcaccctcgccgccgcgttcgccgactaccccgccacgcgccacaccgtcgatccggaccgccacatcgagcgggtcaccgagctgcaagaactcttcctcacgcgcgtcgggctcgacatcggcaaggtgtgggtcgcggacgacggcgccgcggtggcggtctggaccacgccggagagcgtcgaagcgggggcggtgttcgccgagatcggcccgcgcatggccgagttgagcggttcccggctggccgcgcagcaacagatggaaggcctcctggcgccgcaccggcccaaggagcccgcgtggttcctggccaccgtcggcgtctcgcccgaccaccagggcaagggtctgggcagcgccgtcgtgctccccggagtggaggcggccgagcgcgccggggtgcccgccttcctggagacctccgcgccccgcaacctccccttctacgagcggctcggcttcaccgtcaccgccgacgtcgaggtgcccgaaggaccgcgcacctggtgcatgacccgcaagcccggtgcctga

SEQ ID NO: 4762 - DNA, 2382 bp, synthetic construct; identical to SEQ ID NO: 4760
  source 1..2382: mol_type = other DNA

SEQ ID NO: 4763 - DNA, 2613 bp, synthetic construct
  source 1..2613: mol_type = other DNA
atggccttaccagtgaccgccttgctcctgccgctggccttgctgctccacgccgccaggccgagctacgtgctgacacagcctccatccgtgtctgtggctccaggacagaccgccagaatcacatgcggcggcaacaacatcggcggcaagagcgtgcactggtatcagcagccacctggacaggctccagtggtggtggtgtacgacgacagcgatagacctagcggcatccccgagagattcagcggcagcaattccggcaataccgccacactgaccatcagcagagtggaagctggcgacgaggccgtgtactactgccaagtgtgggacagcagcagcgatcacgtggtgtttggcggcggaacaaagctgacagtgcttctcgaggacctgaagcacgtgttcccacctgaggtggccgtgttcgagcctagcgacgccgagatctggcacacccagaaagccaccctcgtgtgcctggctaccggcttctaccccgaccatgtggaactgtcttggtgggtcaacggcaaagaggtgcacagcggcgtgtctaccgacccccagccactgaaagaacagcccgccctgaacgacagccggtactgcctgagcagcagactgagagtgtccgccaccttctggcagaacccccggaaccacttcagatgccaggtgcagttctacggcctgagcgagaacgacgagtggacccaggacagagccaagcccgtgacccagatcgtgtctgccgaagcctggggcagagccgattgcggctttaccagcgagagctaccagcagggcgtgctgagcgcctactacatgtacttgttgctgctgctgaagtccgtggtgtacttcgccatcatcacatgctgcctgctgcggagaaccgccttctgctgcaacggcgagaagtctagggccaagcgatctggatctggagcaacaaacttctcactactcaaacaagcaggtgacgtggaggagaatcccgggcctactagtatggactggatttggcgcatccttttccttgtcggcgctgctaccggcgcgcattccttcgaacaactccagctgcaagagtctggccctggcctggtcaagcctagcgaaacactgagcctgacctgtaccgtgtctggcggctctatcagctccagcagctatttctggggctggatcagacaacctcctggcaaaggactggaatggatcggctccatctactacagcggcatcacctactacaaccccagcctgaagtccagagtgaccatctccgtggacaccagcaagaaccagttctccctgaagctgagcagcgtgacagccgccgataccgccgtgtattattgtgccagacatgacggcgctgtggccggcctgtttgattattggggacagggcaccctggtcaccgtgtcatctgctacgcgtagccagcctcacaccaagcccagcgtgttcgtgatgaagaacggcaccaacgtggcctgcctcgtgaaagagttctaccccaaggacatcaggatcaacctggtgtccagcaagaagatcaccgagttcgaccccgccatcgtgatctcccccagcggcaagtacaacgccgtgaagctggggaagtacgaggacagcaacagcgtgacctgctccgtgcagcacgacaacaagaccgtgcacagcaccgactttgaagtgaaaaccgactccaccgaccacgtgaagcccaaagagacagagaacaccaagcagcccagcaagagctgccacaagcccaaggccatcgtgcacaccgagaaagtgaacatgatgagcctgaccgtgctgggcttcagaatcctgctgctgaaagtggccggctttaacctgctgatgaccctgcggctgtggtccagccgcgccaagagaagcggatctggcgtgaagcagaccctgaatttcgacctgctgaagctggctggcgacgtggaatccaacccaggcccttctagaggccatatgaccgagtacaagcccacggtgcgcctcgccacccgcgacgacgtccccagggccgtacgcaccctcgccgccgcgttcgccgactaccccgccacgcgccacaccgtcgatccggaccgccacatcgagcgggtcaccgagctgcaagaactcttcctcacgcgcgtcgggctcgacatcggcaaggtgtgggtcgcggacgacggcgccgcggtggcggtctggaccacgccggagagcgtcgaagcgggggcggtgttcgccgagatcggcccgcgcatggccgagttgagcggttcccggctggccgcgcagcaacagatggaaggcctcctggcgccgcaccggcccaaggagcccgcgtggttcctggccaccgtcggcgtctcgcccgaccaccagggcaagggtctgggcagcgccgtcgtgctccccggagtggaggcggccgagcgcgccggggtgcccgccttcctggagacctccgcgccccgcaacctccccttctacgagcggctcggcttcaccgtcaccgccgacgtcgaggtgcccgaaggaccgcgcacctggtgcatgacccgcaagcccggtgcctga

SEQ ID NO: 4764 - DNA, 3231 bp, synthetic construct
  source 1..3231: mol_type = other DNA
atggccttaccagtgaccgccttgctcctgccgctggccttgctgctccacgccgccaggccggacgacatccagttgacccagtcccccagctcactcagcgccagtgtgggggaccgggtgaccattacctgtaaagccagtcagagtgtggactatgagggggatagcttcctgaattggtatcagcagaagcctggcaaagccccaaagctgctgatctacgctgcatctaatctggagtcaggcgtgccttctaggttctccggtagtgggtctgggaccgatttcacattgaccatttcatccctccaacccgaggatttcgctacatattactgtcagcagtccaatgaggaccctctcacctttggccagggcaccaaagttgaaattaagagactcgaggacctgaagaacgtgttcccacctgaggtggccgtgttcgagcctagcgaggccgagatcagccacacccagaaagccaccctcgtgtgcctggctaccggcttctaccccgaccatgtggaactgtcttggtgggtcaacggcaaagaggtgcacagcggcgtgtctaccgacccccagccactgaaagaacagcccgccctgaacgacagccggtactgcctgagcagcagactgagagtgtccgccaccttctggcagaacccccggaaccacttcagatgccaggtgcagttctacggcctgagcgagaacgacgagtggacccaggacagagccaagcccgtgacccagatcgtgtctgccgaagcctggggcagagccgattgcggatcccagagcttcggcctgctggaccccaagctgtgctacctgctggatggcatcctgttcatctacggcgtgatcctgaccgccctgttcctgagagtgaagttcagcagaagcgccgacgcccctgcctaccagcagggacagaaccaactgtacaacgagctgaacctgggcagacgggaagagtacgacgtgctggacaagcggagaggcagggaccctgagatgggcggaaagccccggagaaagaacccccaggaaggactgtataacgaactccagaaagacaagatggccgaagcctacagcgagatcggcatgaagggcgagcggagaagaggcaagggccacgatggcctgtaccagggcctgagcaccgccaccaaggacacctatgacgccctgcacatgcaggccctgcctccaagaagggccaagcgatctggatctggagcaacaaacttctcactactcaaacaagcaggtgacgtggaggagaatcccgggcctactagtatggactggatttggcgcatccttttccttgtcggcgctgctaccggcgcgcattccttcgaagaagtccaacttgtggagtctggagggggcctggtgcagcccggcggctctctcagactgtcttgtgcggcaagcggctacaccttcagctcttactggatagaatgggtgaggcaggcacctggaaagggactggagtggattggagagattctgccaggagggggagatacaaattacaatgaaatcttcaaggggcgggccaccttttcagcggataccagcaagaatacagcttacctgcagatgaatagcctccgggcagaagataccgctgtttattattgcacgagacgggtgccaataagactggactattgggggcaagggactcttgtcaccgtcagttcaacgcgtatccagaaccctgatcctgccgtgtaccagctgcgggatagcaagagcagcgacaagagcgtgtgtctgttcaccgacttcgacagccagaccaacgtgtcccagagcaaggactccgacgtgtacatcaccgataagaccgtgctggacatgcggagcatggacttcaagagcaactccgccgtggcctggtccaacaagtccgatttcgcctgcgccaacgccttcaacaacagcattatccccgaggacacattcttcccaagccccgagagcagctgcggtacccagagttttgggttgttggaccctaaattgtgctatctgttggacggaatcctgttcatttacggagtgatcctgaccgcattgttcctgcgggttaagttttccagatccgcagacgcacccgcttaccaacaagggcagaaccaactctacaatgaacttaatttggggcggagggaagagtacgacgttctggacaaaaggaggggacgagatcccgagatgggcggaaagcctcgaaggaagaatccgcaagaggggctttataacgaactccagaaagataaaatggcagaagcctatagtgagattgggatgaagggagaaaggaggaggggtaaaggtcacgatgggttgtaccaaggattgagcacagccactaaagatacctatgatgcgctccacatgcaggccctgccgccaagacgcgccaagagaagcggatctggcgtgaagcagaccctgaatttcgacctgctgaagctggctggcgacgtggaatccaacccaggcccttctagaatgtaccggatgcagctgctgagctgtatcgccctgtctctggccctggtcacaaatagcgcccctaccagcagcagcaccaagaaaacccagctgcaactggaacacctcctgctggacctccagatgatcctgaacggcatcaacaactacaagaaccccaagctgacccggatgctgaccttcaagttctacatgcccaagaaggccaccgagctgaagcacctccagtgcctggaagaggaactgaagcccctggaagaagtgctgaatctggcccagagcaagaacttccacctgaggccaagggacctgatctccaacatcaacgtgatcgtgctggaactgaaaggcagcgagacaaccttcatgtgcgagtacgccgacgagacagctaccatcgtggaatttctgaatcggtggatcaccttctgccagagcatcatcagcaccctgacagcgcgtaaaattgaagttatgtatcctcctccttacctagacaatgagaagagcaatggaaccattatccatgtgaaagggaaacacctttgtccaagtcccctatttcccggaccttctaagcccttttgggtgctggtggtggttgggggagtcctggcttgctatagcttgctagtaacagtggcctttattattttctgggtgaggagtaagaggagctaa

SEQ ID NO: 4765 - DNA, 2604 bp, synthetic construct
  source 1..2604: mol_type = other DNA
atggccttaccagtgaccgccttgctcctgccgctggccttgctgctccacgccgccaggccggacatccagatgacacagagccctagcagcctgtctgccagcgtgggagacagagtgaccatcacatgcaaggccagcgaccacatcaacaactggctggcctggtatcagcagaagcctggacaggcccctaagctgctgatctacggcgctaccacactggaaacaggcgtgcccagcagattttctggcagcggctctggcaccgactacaccctgacaatatccagcctccagcctgaggacttcgccacctactactgtcagcagagctggaacaccccttggacattcggccagggcaccaagctggaaatcaagagactcgaggctagaagcgaagatcggtatcggaaccccaaggaggacctgaagaacgtgttcccacctgaggtggccgtgttcgagcctagcgaggccgagatcagccacacccagaaagccaccctcgtgtgcctggctaccggcttctaccccgaccatgtggaactgtcttggtgggtcaacggcaaagaggtgcacagcggcgtgtgtaccgacccccagccactgaaagaacagcccgccctgaacgacagccggtactgcctgagcagcagactgagagtgtccgccaccttctggcagaacccccggaaccacttcagatgccaggtgcagttctacggcctgagcgagaacgacgagtggacccaggacagagccaagcccgtgacccagatcgtgtctgccgaagcctggggcagagccgattgcggctttaccagcgagagctaccagcagggcgtgctgagcgccaccatcctgtacgagatcctgctgggcaaggccaccctgtacgccgtgctggtgtctgccctggtgctgatggctatggtcaagcggaaggacagccggggaagggccaagcgatctggatctggagcaacaaacttctcactactcaaacaagcaggtgacgtggaggagaatcccgggcctactagtatggactggatttggcgcatccttttccttgtcggcgctgctaccggcgcgcattccttcgaacaagttcagcttcaacagcctggcgctgagctggtcaaacctggcgcttctgtgaagatgagctgcaaagccagcggctacgccttcagcagctactggatcaactggatgaagcagaaacccggccagggactcgaatggatcggccaaatctatcccggcgacggcgacaccaactacaacggcaagttcaagggcagagccacactgaccgccgatacctctagcagcacagcctacatgcagctgagcagcctgaccagcgaagatagcgccgtgtacttctgtgcccggtccatcacaacagtcgtgggctgcgctatggactattggggccagggaacaagcgtgaccgtgtctagtacgcgtatccagaaccctgatcctgccgtgtaccagctgcgggatagcaagagcagcgacaagagcgtgtgtctgttcaccgacttcgacagccagaccaacgtgtcccagagcaaggactccgacgtgtacatcaccgataagtgcgtgctggacatgcggagcatggacttcaagagcaactccgccgtggcctggtccaacaagtccgatttcgcctgcgccaacgccttcaacaacagcattatccccgaggacacattcttcccaagccccgagagcagctgcgacgtgaagctggtggaaaagagcttcgagacagacaccaacctgaacttccagaacctgagcgtgatcggcttcagaatcctgctgctgaaagtggccggctttaacctgctgatgaccctgcggctgtggtccagccgcgccaagagaagcggatctggcgtgaagcagaccctgaatttcgacctgctgaagctggctggcgacgtggaatccaacccaggcccttctagaggccatatgaccgagtacaagcccacggtgcgcctcgccacccgcgacgacgtccccagggccgtacgcaccctcgccgccgcgttcgccgactaccccgccacgcgccacaccgtcgatccggaccgccacatcgagcgggtcaccgagctgcaagaactcttcctcacgcgcgtcgggctcgacatcggcaaggtgtgggtcgcggacgacggcgccgcggtggcggtctggaccacgccggagagcgtcgaagcgggggcggtgttcgccgagatcggcccgcgcatggccgagttgagcggttcccggctggccgcgcagcaacagatggaaggcctcctggcgccgcaccggcccaaggagcccgcgtggttcctggccaccgtcggcgtctcgcccgaccaccagggcaagggtctgggcagcgccgtcgtgctccccggagtggaggcggccgagcgcgccggggtgcccgccttcctggagacctccgcgccccgcaacctccccttctacgagcggctcggcttcaccgtcaccgccgacgtcgaggtgcccgaaggaccgcgcacctggtgcatgacccgcaagcccggtgcctga

SEQ ID NO: 4766 - DNA, 2892 bp, synthetic construct
  source 1..2892: mol_type = other DNA
atggccttaccagtgaccgccttgctcctgccgctggccttgctgctccacgccgccaggccggacatccagatgacacagagccctagcagcctgtctgccagcgtgggagacagagtgaccatcacatgcaaggccagcgaccacatcaacaactggctggcctggtatcagcagaagcctggacaggcccctaagctgctgatctacggcgctaccacactggaaacaggcgtgcccagcagattttctggcagcggctctggcaccgactacaccctgacaatatccagcctccagcctgaggacttcgccacctactactgtcagcagagctggaacaccccttggacattcggccagggcaccaagctggaaatcaagagactcgaggctagaagcgaagatcggtatcggaaccccaaggaggacctgaagaacgtgttcccacctgaggtggccgtgttcgagcctagcgaggccgagatcagccacacccagaaagccaccctcgtgtgcctggctaccggcttctaccccgaccatgtggaactgtcttggtgggtcaacggcaaagaggtgcacagcggcgtgtctaccgacccccagccactgaaagaacagcccgccctgaacgacagccggtactgcctgagcagcagactgagagtgtccgccaccttctggcagaacccccggaaccacttcagatgccaggtgcagttctacggcctgagcgagaacgacgagtggacccaggacagagccaagcccgtgacccagatcgtgtctgccgaagcctggggcagagccgattgcggatcccagagcttcggcctgctggaccccaagctgtgctacctgctggatggcatcctgttcatctacggcgtgatcctgaccgccctgttcctgagagtgaagttcagcagaagcgccgacgcccctgcctaccagcagggacagaaccaactgtacaacgagctgaacctgggcagacgggaagagtacgacgtgctggacaagcggagaggcagggaccctgagatgggcggaaagccccggagaaagaacccccaggaaggactgtataacgaactccagaaagacaagatggccgaagcctacagcgagatcggcatgaagggcgagcggagaagaggcaagggccacgatggcctgtaccagggcctgagcaccgccaccaaggacacctatgacgccctgcacatgcaggccctgcctccaagaagggccaagcgatctggatctggagcaacaaacttctcactactcaaacaagcaggtgacgtggaggagaatcccgggcctactagtatggactggatttggcgcatccttttccttgtcggcgctgctaccggcgcgcattccttcgaacaagttcagcttcaacagcctggcgctgagctggtcaaacctggcgcttctgtgaagatgagctgcaaagccagcggctacgccttcagcagctactggatcaactggatgaagcagaaacccggccagggactcgaatggatcggccaaatctatcccggcgacggcgacaccaactacaacggcaagttcaagggcagagccacactgaccgccgatacctctagcagcacagcctacatgcagctgagcagcctgaccagcgaagatagcgccgtgtacttctgtgcccggtccatcacaacagtcgtgggctgcgctatggactattggggccagggaacaagcgtgaccgtgtctagtacgcgtatccagaaccctgatcctgccgtgtaccagctgcgggatagcaagagcagcgacaagagcgtgtgtctgttcaccgacttcgacagccagaccaacgtgtcccagagcaaggactccgacgtgtacatcaccgataagtgcgtgctggacatgcggagcatggacttcaagagcaactccgccgtggcctggtccaacaagtccgatttcgcctgcgccaacgccttcaacaacagcattatccccgaggacacattcttcccaagccccgagagcagctgcgacgtgaagctggtggaaaagagcttcgagacagacaccaacctgaacttccagaacctgagcgtgatcggcttcagaatcctgctgctgaaagtggccggctttaacctgctgatgaccctgcggctgtggtccagccgcgccaagagaagcggatctggcgtgaagcagaccctgaatttcgacctgctgaagctggctggcgacgtggaatccaacccaggcccttctagaggccatatgaccgagtacaagcccacggtgcgcctcgccacccgcgacgacgtccccagggccgtacgcaccctcgccgccgcgttcgccgactaccccgccacgcgccacaccgtcgatccggaccgccacatcgagcgggtcaccgagctgcaagaactcttcctcacgcgcgtcgggctcgacatcggcaaggtgtgggtcgcggacgacggcgccgcggtggcggtctggaccacgccggagagcgtcgaagcgggggcggtgttcgccgagatcggcccgcgcatggccgagttgagcggttcccggctggccgcgcagcaacagatggaaggcctcctggcgccgcaccggcccaaggagcccgcgtggttcctggccaccgtcggcgtctcgcccgaccaccagggcaagggtctgggcagcgccgtcgtgctccccggagtggaggcggccgagcgcgccggggtgcccgccttcctggagacctccgcgccccgcaacctccccttctacgagcggctcggcttcaccgtcaccgccgacgtcgaggtgcccgaaggaccgcgcacctggtgcatgacccgcaagcccggtgcctga

SEQ ID NO: 4767 - DNA, 2892 bp, synthetic construct; identical to SEQ ID NO: 4766
  source 1..2892: mol_type = other DNA

SEQ ID NO: 4768 - DNA, 1905 bp, synthetic construct
  source 1..1905: mol_type = other DNA
atggccttaccagtgaccgccttgctcctgccgctggccttgctgctccacgccgccaggccggacatccagatgacacagagccctagcagcctgtctgccagcgtgggagacagagtgaccatcacatgcaaggccagcgaccacatcaacaactggctggcctggtatcagcagaagcctggacaggcccctaagctgctgatctacggcgctaccacactggaaacaggcgtgcccagcagattttctggcagcggctctggcaccgactacaccctgacaatatccagcctccagcctgaggacttcgccacctactactgtcagcagagctggaacaccccttggacattcggccagggcaccaagctggaaatcaagagactcgaggctagaagcgaagatcggtatcggaaccccaaggaggacctgaagaacgtgttcccacctgaggtggccgtgttcgagcctagcgaggccgagatcagccacacccagaaagccaccctcgtgtgcctggctaccggcttctaccccgaccatgtggaactgtcttggtgggtcaacggcaaagaggtgcacagcggcgtgtgtaccgacccccagccactgaaagaacagcccgccctgaacgacagccggtactgcctgagcagcagactgagagtgtccgccaccttctggcagaacccccggaaccacttcagatgccaggtgcagttctacggcctgagcgagaacgacgagtggacccaggacagagccaagcccgtgacccagatcgtgtctgccgaagcctggggcagagccgattgcggctttaccagcgagagctaccagcagggcgtgctgagcgccaccatcctgtacgagatcctgctgggcaaggccaccctgtacgccgtgctggtgtctgccctggtgctgatggctatggtcaagcggaaggacagccggggaagggccaagcgatctggatctggagcaacaaacttctcactactcaaacaagcaggtgacgtggaggagaatcccgggcctactagtatggactggatttggcgcatccttttccttgtcggcgctgctaccggcgcgcattccttcgaacaagttcagcttcaacagcctggcgctgagctggtcaaacctggcgcttctgtgaagatgagctgcaaagccagcggctacgccttcagcagctactggatcaactggatgaagcagaaacccggccagggactcgaatggatcggccaaatctatcccggcgacggcgacaccaactacaacggcaagttcaagggcagagccacactgaccgccgatacctctagcagcacagcctacatgcagctgagcagcctgaccagcgaagatagcgccgtgtacttctgtgcccggtccatcacaacagtcgtgggctgcgctatggactattggggccagggaacaagcgtgaccgtgtctagtacgcgtatccagaaccctgatcctgccgtgtaccagctgcgggatagcaagagcagcgacaagagcgtgtgtctgttcaccgacttcgacagccagaccaacgtgtcccagagcaaggactccgacgtgtacatcaccgataagtgcgtgctggacatgcggagcatggacttcaagagcaactccgccgtggcctggtccaacaagtccgatttcgcctgcgccaacgccttcaacaacagcattatccccgaggacacattcttcccaagccccgagagcagctgcgacgtgaagctggtggaaaagagcttcgagacagacaccaacctgaacttccagaacctgagcgtgatcggcttcagaatcctgctgctgaaagtggccggctttaacctgctgatgaccctgcggctgtggtccagctaa

SEQ ID NO: 4769 - DNA, 2193 bp, synthetic construct
  source 1..2193: mol_type = other DNA
atggccttaccagtgaccgccttgctcctgccgctggccttgctgctccacgccgccaggccggacatccagatgacacagagccctagcagcctgtctgccagcgtgggagacagagtgaccatcacatgcaaggccagcgaccacatcaacaactggctggcctggtatcagcagaagcctggacaggcccctaagctgctgatctacggcgctaccacactggaaacaggcgtgcccagcagattttctggcagcggctctggcaccgactacaccctgacaatatccagcctccagcctgaggacttcgccacctactactgtcagcagagctggaacaccccttggacattcggccagggcaccaagctggaaatcaagagactcgaggctagaagcgaagatcggtatcggaaccccaaggaggacctgaagaacgtgttcccacctgaggtggccgtgttcgagcctagcgaggccgagatcagccacacccagaaagccaccctcgtgtgcctggctaccggcttctaccccgaccatgtggaactgtcttggtgggtcaacggcaaagaggtgcacagcggcgtgtctaccgacccccagccactgaaagaacagcccgccctgaacgacagccggtactgcctgagcagcagactgagagtgtccgccaccttctggcagaacccccggaaccacttcagatgccaggtgcagttctacggcctgagcgagaacgacgagtggacccaggacagagccaagcccgtgacccagatcgtgtctgccgaagcctggggcagagccgattgcggatcccagagcttcggcctgctggaccccaagctgtgctacctgctggatggcatcctgttcatctacggcgtgatcctgaccgccctgttcctgagagtgaagttcagcagaagcgccgacgcccctgcctaccagcagggacagaaccaactgtacaacgagctgaacctgggcagacgggaagagtacgacgtgctggacaagcggagaggcagggaccctgagatgggcggaaagccccggagaaagaacccccaggaaggactgtataacgaactccagaaagacaagatggccgaagcctacagcgagatcggcatgaagggcgagcggagaagaggcaagggccacgatggcctgtaccagggcctgagcaccgccaccaaggacacctatgacgccctgcacatgcaggccctgcctccaagaatggccaagcgatctggatctggagcaacaaacttctcactactcaaacaagcaggtgacgtggaggagaatcccgggcctactagtatggactggatttggcgcatccttttccttgtcggcgctgctaccggcgcgcattccttcgaacaagttcagcttcaacagcctggcgctgagctggtcaaacctggcgcttctgtgaagatgagctgcaaagccagcggctacgccttcagcagctactggatcaactggatgaagcagaaacccggccagggactcgaatggatcggccaaatctatcccggcgacggcgacaccaactacaacggcaagttcaagggcagagccacactgaccgccgatacctctagcagcacagcctacatgcagctgagcagcctgaccagcgaagatagcgccgtgtacttctgtgcccggtccatcacaacagtcgtgggctgcgctatggactattggggccagggaacaagcgtgaccgtgtctagtacgcgtatccagaaccctgatcctgccgtgtaccagctgcgggatagcaagagcagcgacaagagcgtgtgtctgttcaccgacttcgacagccagaccaacgtgtcccagagcaaggactccgacgtgtacatcaccgataagtgcgtgctggacatgcggagcatggacttcaagagcaactccgccgtggcctggtccaacaagtccgatttcgcctgcgccaacgccttcaacaacagcattatccccgaggacacattcttcccaagccccgagagcagctgcgacgtgaagctggtggaaaagagcttcgagacagacaccaacctgaacttccagaacctgagcgtgatcggcttcagaatcctgctgctgaaagtggccggctttaacctgctgatgaccctgcggctgtggtccagctaa

SEQ ID NO: 4770 - DNA, 1905 bp, synthetic construct
  source 1..1905: mol_type = other DNA
atggccttaccagtgaccgccttgctcctgccgctggccttgctgctccacgccgccaggccggacatccagatgacacagagccctagcagcctgtctgccagcgtgggagacagagtgaccatcacatgcaaggccagcgaccacatcaacaactggctggcctggtatcagcagaagcctggacaggcccctaagctgctgatctacggcgctaccacactggaaacaggcgtgcccagcagattttctggcagcggctctggcaccgactacaccctgacaatatccagcctccagcctgaggacttcgccacctactactgtcagcagagctggaacaccccttggacattcggccagggcaccaagctggaaatcaagagactcgaggctagaagcgaagatcggtatcggaaccccaaggaggacctgaagaacgtgttcccacctgaggtggccgtgttcgagcctagcgaggccgagatcagccacacccagaaagccaccctcgtgtgcctggctaccggcttctaccccgaccatgtggaactgtcttggtgggtcaacggcaaagaggtgcacagcggcgtgtgtaccgacccccagccactgaaagaacagcccgccctgaacgacagccggtactgcctgagcagcagactgagagtgtccgccaccttctggcagaacccccggaaccacttcagatgccaggtgcagttctacggcctgagcgagaacgacgagtggacccaggacagagccaagcccgtgacccagatcgtgtctgccgaagcctggggcagagccgattgcggctttaccagcgagagctaccagcagggcgtgctgagcgccaccatcctgtacgagatcctgctgggcaaggccaccctgtacgccgtgctggtgtctgccctggtgctgatggctatggtcaagcggaaggacagccggggaagggccaagcgatctggatctggagcaacaaacttctcactactcaaacaagcaggtgacgtggaggagaatcccgggcctactagtatggactggatttggcgcatccttttccttgtcggcgctgctaccggcgcgcattccttcgaacaagttcagcttcaacagcctggcgctgagctggtcaaacctggcgcttctgtgaagatgagctgcaaagccagcggctacgccttcaacagctactggatcaactggatgaagcagaaacccggccagggactcgaatggatcggccaaatctatcccggcgacggcgacaccaactacaacggcaagttcaagggcagagccacactgaccgccgatacctctagcagcacagcctacatgcagctgagcagcctgaccagcgaagatagcgccgtgtacttctgtgcccggtccatcacaacagtcgtgggctgcgctatggactattggggccagggaacaagcgtgaccgtgtctagtacgcgtatccagaaccctgatcctgccgtgtaccagctgcgggatagcaagagcagcgacaagagcgtgtgtctgttcaccgacttcgacagccagaccaacgtgtcccagagcaaggactccgacgtgtacatcaccgataagtgcgtgctggacatgcggagcatggacttcaagagcaactccgccgtggcctggtccaacaagtccgatttcgcctgcgccaacgccttcaacaacagcattatccccgaggacacattcttcccaagccccgagagcagctgcgacgtgaagctggtggaaaagagcttcgagacagacaccaacctgaacttccagaacctgagcgtgatcggcttcagaatcctgctgctgaaagtggccggctttaacctgctgatgaccctgcggctgtggtccagctaa

SEQ ID NO: 4771 - DNA, 2193 bp, synthetic construct
  source 1..2193: mol_type = other DNA
atggccttaccagtgaccgccttgctcctgccgctggccttgctgctccacgccgccaggccggacatccagatgacacagagccctagcagcctgtctgccagcgtgggagacagagtgaccatcacatgcaaggccagcgaccacatcaacaactggctggcctggtatcagcagaagcctggacaggcccctaagctgctgatctacggcgctaccacactggaaacaggcgtgcccagcagattttctggcagcggctctggcaccgactacaccctgacaatatccagcctccagcctgaggacttcgccacctactactgtcagcagagctggaacaccccttggacattcggccagggcaccaagctggaaatcaagagactcgaggctagaagcgaagatcggtatcggaaccccaaggaggacctgaagaacgtgttcccacctgaggtggccgtgttcgagcctagcgaggccgagatcagccacacccagaaagccaccctcgtgtgcctggctaccggcttctaccccgaccatgtggaactgtcttggtgggtcaacggcaaagaggtgcacagcggcgtgtctaccgacccccagccactgaaagaacagcccgccctgaacgacagccggtactgcctgagcagcagactgagagtgtccgccaccttctggcagaacccccggaaccacttcagatgccaggtgcagttctacggcctgagcgagaacgacgagtggacccaggacagagccaagcccgtgacccagatcgtgtctgccgaagcctggggcagagccgattgcggatcccagagcttcggcctgctggaccccaagctgtgctacctgctggatggcatcctgttcatctacggcgtgatcctgaccgccctgttcctgagagtgaagttcagcagaagcgccgacgcccctgcctaccagcagggacagaaccaactgtacaacgagctgaacctgggcagacgggaagagtacgacgtgctggacaagcggagaggcagggaccctgagatgggcggaaagccccggagaaagaacccccaggaaggactgtataacgaactccagaaagacaagatggccgaagcctacagcgagatcggcatgaagggcgagcggagaagaggcaagggccacgatggcctgtaccagggcctgagcaccgccaccaaggacacctatgacgccctgcacatgcaggccctgcctccaagaagggccaagcgatctggatctggagcaacaaacttctcactactcaaacaagcaggtgacgtggaggagaatcccgggcctactagtatggactggatttggcgcatccttttccttgtcggcgctgctaccggcgcgcattccttcgaacaagttcagcttcaacagcctggcgctgagctggtcaaacctggcgcttctgtgaagatgagctgcaaagccagcggctacgccttcaacagctactggatcaactggatgaagcagaaacccggccagggactcgaatggatcggccaaatctatcccggcgacggcgacaccaactacaacggcaagttcaagggcagagccacactgaccgccgatacctctagcagcacagcctacatgcagctgagcagcctgaccagcgaagatagcgccgtgtacttctgtgcccggtccatcacaacagtcgtgggctgcgctatggactattggggccagggaacaagcgtgaccgtgtctagtacgcgtatccagaaccctgatcctgccgtgtaccagctgcgggatagcaagagcagcgacaagagcgtgtgtctgttcaccgacttcgacagccagaccaacgtgtcccagagcaaggactccgacgtgtacatcaccgataagtgcgtgctggacatgcggagcatggacttcaagagcaactccgccgtggcctggtccaacaagtccgatttcgcctgcgccaacgccttcaacaacagcattatccccgaggacacattcttcccaagccccgagagcagctgcgacgtgaagctggtggaaaagagcttcgagacagacaccaacctgaacttccagaacctgagcgtgatcggcttcagaatcctgctgctgaaagtggccggctttaacctgctgatgaccctgcggctgtggtccagctaa

SEQ ID NO: 4772 - DNA, 2193 bp, synthetic construct; identical to SEQ ID NO: 4771
  source 1..2193: mol_type = other DNA

SEQ ID NO: 4773 - DNA, 1893 bp, synthetic construct
  source 1..1893: mol_type = other DNA
atggccttaccagtgaccgccttgctcctgccgctggccttgctgctccacgccgccaggccggacatccagatgacacagagccctagcagcctgtctgccagcgtgggagacagagtgaccatcacatgcaaggccagcgaccacatcaacaactggctggcctggtatcagcagaagcctggacaggcccctaagctgctgatctacggcgctaccacactggaaacaggcgtgcccagcagattttctggcagcggctctggcaccgactacaccctgacaatatccagcctccagcctgaggacttcgccacctactactgtcagcagagctggaacaccccttggacattcggccagggcaccaagctggaaatcaagagactcgaggctagaagcgaagatcggtatcggaaccccaaggaggacctgaagaacgtgttcccacctgaggtggccgtgttcgagcctagcgaggccgagatcagccacacccagaaagccaccctcgtgtgcctggctaccggcttctaccccgaccatgtggaactgtcttggtgggtcaacggcaaagaggtgcacagcggcgtgtgtaccgacccccagccactgaaagaacagcccgccctgaacgacagccggtactgcctgagcagcagactgagagtgtccgccaccttctggcagaacccccggaaccacttcagatgccaggtgcagttctacggcctgagcgagaacgacgagtggacccaggacagagccaagcccgtgacccagatcgtgtctgccgaagcctggggcagagccgattgcggctttaccagcgagagctaccagcagggcgtgctgagcgccaccatcctgtacgagatcctgctgggcaaggccaccctgtacgccgtgctggtgtctgccctggtgctgatggctatggtcaagcggaaggacagccggggaagggccaagcgatctggatctggagcaacaaacttctcactactcaaacaagcaggtgacgtggaggagaatcccgggcctactagtatggactggatttggcgcatccttttccttgtcggcgctgctaccggcgcgcattccttcgaacaagttcagcttcaacagcctggcgctgagctggtcaaacctggcgcttctgtgaagatgagctgcaaagccagcggctacgccttcagcagctactggatcaactggatgaagcagaaacccggccagggactcgaatggatcggccaaatctatcccggcgacggcgacaccaactacaacggcaagttcaagggcagagccacactgaccgccgatacctctagcagcacagcctacatgcagctgagcagcctgaccagcgaagatagcgccgtgtacttctgtgcccggtccatcacaacagtcgtgggctgcgctatggactattggggccagggaacaagcgtgaccgtgtctagtacgcgtatccagaaccctgatcctgccgtgtaccagctgcgggatagcaagagcagcgacaagagcgtgtgtctgttcaccgacttcgacagccagaccaacgtgtcccagagcaaggactccgacgtgtacatcaccgataagaccgtgctggacatgcggagcatggacttcaagagcaactccgccgtggcctggtccaacaagtccgatttcgcctgcgccaacgccttcaacaacagcattatccccgaggacacattcttcccaagccccgagagcagctgcggtaccattacccaaggactggctgtgcctacaatctctagcttctttccgcctggataccaagtctccttctgtcttgtgatggtcctcctgtttgctgtggacacaggactgtacttttccgtgtaa

SEQ ID NO: 4774 - DNA, 2181 bp, synthetic construct
  source 1..2181: mol_type = other DNA
atggccttaccagtgaccgccttgctcctgccgctggccttgctgctccacgccgccaggccggacatccagatgacacagagccctagcagcctgtctgccagcgtgggagacagagtgaccatcacatgcaaggccagcgaccacatcaacaactggctggcctggtatcagcagaagcctggacaggcccctaagctgctgatctacggcgctaccacactggaaacaggcgtgcccagcagattttctggcagcggctctggcaccgactacaccctgacaatatccagcctccagcctgaggacttcgccacctactactgtcagcagagctggaacaccccttggacattcggccagggcaccaagctggaaatcaagagactcgaggctagaagcgaagatcggtatcggaaccccaaggaggacctgaagaacgtgttcccacctgaggtggccgtgttcgagcctagcgaggccgagatcagccacacccagaaagccaccctcgtgtgcctggctaccggcttctaccccgaccatgtggaactgtcttggtgggtcaacggcaaagaggtgcacagcggcgtgtctaccgacccccagccactgaaagaacagcccgccctgaacgacagccggtactgcctgagcagcagactgagagtgtccgccaccttctggcagaacccccggaaccacttcagatgccaggtgcagttctacggcctgagcgagaacgacgagtggacccaggacagagccaagcccgtgacccagatcgtgtctgccgaagcctggggcagagccgattgcggatcccagagcttcggcctgctggaccccaagctgtgctacctgctggatggcatcctgttcatctacggcgtgatcctgaccgccctgttcctgagagtgaagttcagcagaagcgccgacgcccctgcctaccagcagggacagaaccaactgtacaacgagctgaacctgggcagacgggaagagtacgacgtgctggacaagcggagaggcagggaccctgagatgggcggaaagccccggagaaagaacccccaggaaggactgtataacgaactccagaaagacaagatggccgaagcctacagcgagatcggcatgaagggcgagcggagaagaggcaagggccacgatggcctgtaccagggcctgagcaccgccaccaaggacacctatgacgccctgcacatgcaggccctgcctccaagaagggccaagcgatctggatctggagcaacaaacttctcactactcaaacaagcaggtgacgtggaggagaatcccgggcctactagtatggactggatttggcgcatccttttccttgtcggcgctgctaccggcgcgcattccttcgaacaagttcagcttcaacagcctggcgctgagctggtcaaacctggcgcttctgtgaagatgagctgcaaagccagcggctacgccttcagcagctactggatcaactggatgaagcagaaacccggccagggactcgaatggatcggccaaatctatcccggcgacggcgacaccaactacaacggcaagttcaagggcagagccacactgaccgccgatacctctagcagcacagcctacatgcagctgagcagcctgaccagcgaagatagcgccgtgtacttctgtgcccggtccatcacaacagtcgtgggctgcgctatggactattggggccagggaacaagcgtgaccgtgtctagtacgcgtatccagaaccctgatcctgccgtgtaccagctgcgggatagcaagagcagcgacaagagcgtgtgtctgttcaccgacttcgacagccagaccaacgtgtcccagagcaaggactccgacgtgtacatcaccgataagaccgtgctggacatgcggagcatggacttcaagagcaactccgccgtggcctggtccaacaagtccgatttcgcctgcgccaacgccttcaacaacagcattatccccgaggacacattcttcccaagccccgagagcagctgcggtaccattacccaaggactggctgtgcctacaatctctagcttctttccgcctggataccaagtctccttctgtcttgtgatggtcctcctgtttgctgtggacacaggactgtacttttccgtgtaa

SEQ ID NO: 4775 - DNA, 2181 bp, synthetic construct; identical to SEQ ID NO: 4774
  source 1..2181: mol_type = other DNA

SEQ ID NO: 4776 - DNA, 2202 bp, synthetic construct
  source 1..2202: mol_type = other DNA
atggccttaccagtgaccgccttgctcctgccgctggccttgctgctccacgccgccaggccgagctacgtgctgacacagcctccatccgtgtctgtggctccaggacagaccgccagaatcacatgcggcggcaacaacatcggcagcaagagcgtgcactggtatcagcagccacctggacaggctccagtggtggtggtgtacgacgacagcgatagacctagcggcatccccgagagattcagcggcagcaattccggcaataccgccacactgaccatcagcagagtggaagctggcgacgaggccgtgtactactgccaagtgtgggacagcagcagcgatcacgtggtgtttggcggcggaacaaagctgacagtgcttctcgaggctagaagcgaagatcggtatcggaaccccaaggaggacctgaagaacgtgttcccacctgaggtggccgtgttcgagcctagcgaggccgagatcagccacacccagaaagccaccctcgtgtgcctggctaccggcttctaccccgaccatgtggaactgtcttggtgggtcaacggcaaagaggtgcacagcggcgtgtgtaccgacccccagccactgaaagaacagcccgccctgaacgacagccggtactgcctgagcagcagactgagagtgtccgccaccttctggcagaacccccggaaccacttcagatgccaggtgcagttctacggcctgagcgagaacgacgagtggacccaggacagagccaagcccgtgacccagatcgtgtctgccgaagcctggggcagagccgattgcggctttaccagcgagagctaccagcagggcgtgctgagcgccaccatcctgtacgagatcctgctgggcaaggccaccctgtacgccgtgctggtgtctgccctggtgctgatggctatggtcaagcggaaggacagccggggaagggccaagcgatctggatctggagcaacaaacttctcactactcaaacaagcaggtgacgtggaggagaatcccgggcctactagtatggactggatttggcgcatccttttccttgtcggcgctgctaccggcgcgcattccttcgaacaactccagctgcaagagtctggccctggcctggtcaagcctagcgaaacactgagcctgacctgtaccgtgtctggcggctctatcagctccggcagctatttctggggctggatcagacaacctcctggcaaaggactggaatggatcggctccatctactacagcggcatcacctactacaaccccagcctgaagtccagagtgaccatctccgtggacaccagcaagaaccagttctccctgaagctgagcagcgtgacagccgccgataccgccgtgtattattgtgccagacatgacggcgctgtggccggcctgtttgattattggggacagggcaccctggtcaccgtgtcatctgctacgcgtatccagaaccctgatcctgccgtgtaccagctgcgggatagcaagagcagcgacaagagcgtgtgtctgttcaccgacttcgacagccagaccaacgtgtcccagagcaaggactccgacgtgtacatcaccgataagaccgtgctggacatgcggagcatggacttcaagagcaactccgccgtggcctggtccaacaagtccgatttcgcctgcgccaacgccttcaacaacagcattatccccgaggacacattcttcccaagccccgagagcagctgcggtacccagagttttgggttgttggaccctaaattgtgctatctgttggacggaatcctgttcatttacggagtgatcctgaccgcattgttcctgcgggttaagttttccagatccgcagacgcacccgcttaccaacaagggcagaaccaactctacaatgaacttaatttggggcggagggaagagtacgacgttctggacaaaaggaggggacgagatcccgagatgggcggaaagcctcgaaggaagaatccgcaagaggggctttataacgaactccagaaagataaaatggcagaagcctatagtgagattgggatgaagggagaaaggaggaggggtaaaggtcacgatgggttgtaccaaggattgagcacagccactaaagatacctatgatgcgctccacatgcaggccctgccgccaagataa

SEQ ID NO: 4777 - DNA, 2490 bp, synthetic construct
  source 1..2490: mol_type = other DNA
atggccttaccagtgaccgccttgctcctgccgctggccttgctgctccacgccgccaggccgagctacgtgctgacacagcctccatccgtgtctgtggctccaggacagaccgccagaatcacatgcggcggcaacaacatcggcagcaagagcgtgcactggtatcagcagccacctggacaggctccagtggtggtggtgtacgacgacagcgatagacctagcggcatccccgagagattcagcggcagcaattccggcaataccgccacactgaccatcagcagagtggaagctggcgacgaggccgtgtactactgccaagtgtgggacagcagcagcgatcacgtggtgtttggcggcggaacaaagctgacagtgcttctcgaggctagaagcgaagatcggtatcggaaccccaaggaggacctgaagaacgtgttcccacctgaggtggccgtgttcgagcctagcgaggccgagatcagccacacccagaaagccaccctcgtgtgcctggctaccggcttctaccccgaccatgtggaactgtcttggtgggtcaacggcaaagaggtgcacagcggcgtgtctaccgacccccagccactgaaagaacagcccgccctgaacgacagccggtactgcctgagcagcagactgagagtgtccgccaccttctggcagaacccccggaaccacttcagatgccaggtgcagttctacggcctgagcgagaacgacgagtggacccaggacagagccaagcccgtgacccagatcgtgtctgccgaagcctggggcagagccgattgcggatcccagagcttcggcctgctggaccccaagctgtgctacctgctggatggcatcctgttcatctacggcgtgatcctgaccgccctgttcctgagagtgaagttcagcagaagcgccgacgcccctgcctaccagcagggacagaaccaactgtacaacgagctgaacctgggcagacgggaagagtacgacgtgctggacaagcggagaggcagggaccctgagatgggcggaaagccccggagaaagaacccccaggaaggactgtataacgaactccagaaagacaagatggccgaagcctacagcgagatcggcatgaagggcgagcggagaagaggcaagggccacgatggcctgtaccagggcctgagcaccgccaccaaggacacctatgacgccctgcacatgcaggccctgcctccaagaagggccaagcgatctggatctggagcaacaaacttctcactactcaaacaagcaggtgacgtggaggagaatcccgggcctactagtatggactggatttggcgcatccttttccttgtcggcgctgctaccggcgcgcattccttcgaacaactccagctgcaagagtctggccctggcctggtcaagcctagcgaaacactgagcctgacctgtaccgtgtctggcggctctatcagctccggcagctatttctggggctggatcagacaacctcctggcaaaggactggaatggatcggctccatctactacagcggcatcacctactacaaccccagcctgaagtccagagtgaccatctccgtggacaccagcaagaaccagttctccctgaagctgagcagcgtgacagccgccgataccgccgtgtattattgtgccagacatgacggcgctgtggccggcctgtttgattattggggacagggcaccctggtcaccgtgtcatctgctacgcgtatccagaaccctgatcctgccgtgtaccagctgcgggatagcaagagcagcgacaagagcgtgtgtctgttcaccgacttcgacagccagaccaacgtgtcccagagcaaggactccgacgtgtacatcaccgataagaccgtgctggacatgcggagcatggacttcaagagcaactccgccgtggcctggtccaacaagtccgatttcgcctgcgccaacgccttcaacaacagcattatccccgaggacacattcttcccaagccccgagagcagctgcggtacccagagttttgggttgttggaccctaaattgtgctatctgttggacggaatcctgttcatttacggagtgatcctgaccgcattgttcctgcgggttaagttttccagatccgcagacgcacccgcttaccaacaagggcagaaccaactctacaatgaacttaatttggggcggagggaagagtacgacgttctggacaaaaggaggggacgagatcccgagatgggcggaaagcctcgaaggaagaatccgcaagaggggctttataacgaactccagaaagataaaatggcagaagcctatagtgagattgggatgaagggagaaaggaggaggggtaaaggtcacgatgggttgtaccaaggattgagcacagccactaaagatacctatgatgcgctccacatgcaggccctgccgccaagataa

SEQ ID NO: 4778 - DNA, 2490 bp, synthetic construct; identical to SEQ ID NO: 4777
  source 1..2490: mol_type = other DNA

SEQ ID NO: 4779 - DNA, 1902 bp, synthetic construct
  source 1..1902: mol_type = other DNA
atggccttaccagtgaccgccttgctcctgccgctggccttgctgctccacgccgccaggccggacatccagatgacacagagccctagcagcctgtctgccagcgtgggagacagagtgaccatcacatgcaaggccagcgaccacatcaacaactggctggcctggtatcagcagaagcctggacaggcccctaagctgctgatctacggcgctaccacactggaaacaggcgtgcccagcagattttctggcagcggctctggcaccgactacaccctgacaatatccagcctccagcctgaggacttcgccacctactactgtcagcagagctggaacaccccttggacattcggccagggcaccaagctggaaatcaagagactcgaggacctgaagaacgtgttcccacctgaggtggccgtgttcgagcctagcgaggccgagatcagccacacccagaaagccaccctcgtgtgcctggctaccggcttctaccccgaccatgtggaactgtcttggtgggtcaacggcaaagaggtgcacagcggcgtgtgtaccgacccccagccactgaaagaacagcccgccctgaacgacagccggtactgcctgagcagcagactgagagtgtccgccaccttctggcagaacccccggaaccacttcagatgccaggtgcagttctacggcctgagcgagaacgacgagtggacccaggacagagccaagcccgtgacccagatcgtgtctgccgaagcctggggcagagccgattgcggctttaccagcgagagctaccagcagggcgtgctgagcgccaccatcctgtacgagatcctgctgggcaaggccaccctgtacgccgtgctggtgtctgccctggtgctgatggctatggtcaagcggaaggacagccggggaagggccaagcgatctggatctggagcaacaaacttctcactactcaaacaagcaggtgacgtggaggagaatcccgggcctactagtatggactggatttggcgcatccttttccttgtcggcgctgctaccggcgcgcattccttcgaacaagttcagcttcaacagcctggcgctgagctggtcaaacctggcgcttctgtgaagatgagctgcaaagccagcggctacgccttcagcagctactggatcaactggatgaagcagaaacccggccagggactcgaatggatcggccaaatctatcccggcgacggcgacaccaactacaacggcaagttcaagggcagagccacactgaccgccgatacctctagcagcacagcctacatgcagctgagcagcctgaccagcgaagatagcgccgtgtacttctgtgcccggtccatcacaacagtcgtgggctgcgctatggactattggggccagggaacaagcgtgaccgtgtctagtacgcgtgccagaagcgaggacagatacagaaaccccaaaatccagaaccctgatcctgccgtgtaccagctgcgggatagcaagagcagcgacaagagcgtgtgtctgttcaccgacttcgacagccagaccaacgtgtcccagagcaaggactccgacgtgtacatcaccgataagtgcgtgctggacatgcggagcatggacttcaagagcaactccgccgtggcctggtccaacaagtccgatttcgcctgcgccaacgccttcaacaacagcattatccccgaggacacattcttcccaagccccgagagcagctgcgacgtgaagctggtggaaaagagcttcgagacagacaccaacctgaacttccagaacctgagcgtgatcggcttcagaatcctgctgctgaaagtggccggctttaacctgctgatgaccctgcggctgtggtccagctaa

SEQ ID NO: 4780 - DNA, 1890 bp, synthetic construct
  source 1..1890: mol_type = other DNA
atggccttaccagtgaccgccttgctcctgccgctggccttgctgctccacgccgccaggccggacatccagatgacacagagccctagcagcctgtctgccagcgtgggagacagagtgaccatcacatgcaaggccagcgaccacatcaacaactggctggcctggtatcagcagaagcctggacaggcccctaagctgctgatctacggcgctaccacactggaaacaggcgtgcccagcagattttctggcagcggctctggcaccgactacaccctgacaatatccagcctccagcctgaggacttcgccacctactactgtcagcagagctggaacaccccttggacattcggccagggcaccaagctggaaatcaagagactcgaggacctgaagaacgtgttcccacctgaggtggccgtgttcgagcctagcgaggccgagatcagccacacccagaaagccaccctcgtgtgcctggctaccggcttctaccccgaccatgtggaactgtcttggtgggtcaacggcaaagaggtgcacagcggcgtgtgtaccgacccccagccactgaaagaacagcccgccctgaacgacagccggtactgcctgagcagcagactgagagtgtccgccaccttctggcagaacccccggaaccacttcagatgccaggtgcagttctacggcctgagcgagaacgacgagtggacccaggacagagccaagcccgtgacccagatcgtgtctgccgaagcctggggcagagccgattgcggctttaccagcgagagctaccagcagggcgtgctgagcgccaccatcctgtacgagatcctgctgggcaaggccaccctgtacgccgtgctggtgtctgccctggtgctgatggctatggtcaagcggaaggacagccggggaagggccaagcgatctggatctggagcaacaaacttctcactactcaaacaagcaggtgacgtggaggagaatcccgggcctactagtatggactggatttggcgcatccttttccttgtcggcgctgctaccggcgcgcattccttcgaacaagttcagcttcaacagcctggcgctgagctggtcaaacctggcgcttctgtgaagatgagctgcaaagccagcggctacgccttcagcagctactggatcaactggatgaagcagaaacccggccagggactcgaatggatcggccaaatctatcccggcgacggcgacaccaactacaacggcaagttcaagggcagagccacactgaccgccgatacctctagcagcacagcctacatgcagctgagcagcctgaccagcgaagatagcgccgtgtacttctgtgcccggtccatcacaacagtcgtgggctgcgctatggactattggggccagggaacaagcgtgaccgtgtctagtacgcgtgccagaagcgaggacagatacagaaaccccaaaatccagaaccctgatcctgccgtgtaccagctgcgggatagcaagagcagcgacaagagcgtgtgtctgttcaccgacttcgacagccagaccaacgtgtcccagagcaaggactccgacgtgtacatcaccgataagaccgtgctggacatgcggagcatggacttcaagagcaactccgccgtggcctggtccaacaagtccgatttcgcctgcgccaacgccttcaacaacagcattatccccgaggacacattcttcccaagccccgagagcagctgcggtaccattacccaaggactggctgtgcctacaatctctagcttctttccgcctggataccaagtctccttctgtcttgtgatggtcctcctgtttgctgtggacacaggactgtacttttccgtgtaa

SEQ ID NO: 4781 - DNA, 2196 bp, synthetic construct
  source 1..2196: mol_type = other DNA
atggccttaccagtgaccgccttgctcctgccgctggccttgctgctccacgccgccaggccggacatccagatgacacagagccctagcagcctgtctgccagcgtgggagacagagtgaccatcacatgcaaggccagcgaccacatcaacaactggctggcctggtatcagcagaagcctggacaggcccctaagctgctgatctacggcgctaccacactggaaacaggcgtgcccagcagattttctggcagcggctctggcaccgactacaccctgacaatatccagcctccagcctgaggacttcgccacctactactgtcagcagagctggaacaccccttggacattcggccagggcaccaagctggaaatcaagagactcgaggacctgaagaacgtgttcccacctgaggtggccgtgttcgagcctagcgaggccgagatcagccacacccagaaagccaccctcgtgtgcctggctaccggcttctaccccgaccatgtggaactgtcttggtgggtcaacggcaaagaggtgcacagcggcgtgtgtaccgacccccagccactgaaagaacagcccgccctgaacgacagccggtactgcctgagcagcagactgagagtgtccgccaccttctggcagaacccccggaaccacttcagatgccaggtgcagttctacggcctgagcgagaacgacgagtggacccaggacagagccaagcccgtgacccagatcgtgtctgccgaagcctggggcagagccgattgcggctttaccagcgagagctaccagcagggcgtgctgagcgccaccatcctgtacgagatcctgctgggcaaggccaccctgtacgccgtgctggtgtctgccctggtgctgatggctatggtcaagcggaaggacagccggggaagggccaagcgatctggatctggagcaacaaacttctcactactcaaacaagcaggtgacgtggaggagaatcccgggcctactagtatggactggatttggcgcatccttttccttgtcggcgctgctaccggcgcgcattccttcgaacaagttcagcttcaacagcctggcgctgagctggtcaaacctggcgcttctgtgaagatgagctgcaaagccagcggctacgccttcagcagctactggatcaactggatgaagcagaaacccggccagggactcgaatggatcggccaaatctatcccggcgacggcgacaccaactacaacggcaagttcaagggcagagccacactgaccgccgatacctctagcagcacagcctacatgcagctgagcagcctgaccagcgaagatagcgccgtgtacttctgtgcccggtccatcacaacagtcgtgggctgcgctatggactattggggccagggaacaagcgtgaccgtgtctagtacgcgtgccagaagcgaggacagatacagaaaccccaaaatccagaaccctgatcctgccgtgtaccagctgcgggatagcaagagcagcgacaagagcgtgtgtctgttcaccgacttcgacagccagaccaacgtgtcccagagcaaggactccgacgtgtacatcaccgataagaccgtgctggacatgcggagcatggacttcaagagcaactccgccgtggcctggtccaacaagtccgatttcgcctgcgccaacgccttcaacaacagcattatccccgaggacacattcttcccaagccccgagagcagctgcggtacccagagttttgggttgttggaccctaaattgtgctatctgttggacggaatcctgttcatttacggagtgatcctgaccgcattgttcctgcgggttaagttttccagatccgcagacgcacccgcttaccaacaagggcagaaccaactctacaatgaacttaatttggggcggagggaagagtacgacgttctggacaaaaggaggggacgagatcccgagatgggcggaaagcctcgaaggaagaatccgcaagaggggctttataacgaactccagaaagataaaatggcagaagcctatagtgagattgggatgaagggagaaaggaggaggggtaaaggtcacgatgggttgtaccaaggattgagcacagccactaaagatacctatgatgcgctccacatgcaggccctgccgccaagataa

SEQ ID NO: 4782 - DNA, 2121 bp, synthetic construct
  source 1..2121: mol_type = other DNA
atggccttaccagtgaccgccttgctcctgccgctggccttgctgctccacgccgccaggccggacatccagatgacacagagccctagcagcctgtctgccagcgtgggagacagagtgaccatcacatgcaaggccagcgaccacatcaacaactggctggcctggtatcagcagaagcctggacaggcccctaagctgctgatctacggcgctaccacactggaaacaggcgtgcccagcagattttctggcagcggctctggcaccgactacaccctgacaatatccagcctccagcctgaggacttcgccacctactactgtcagcagagctggaacaccccttggacattcggccagggcaccaagctggaaatcaagagactcgaggacctgaagaacgtgttcccacctgaggtggccgtgttcgagcctagcgaggccgagatcagccacacccagaaagccaccctcgtgtgcctggctaccggcttctaccccgaccatgtggaactgtcttggtgggtcaacggcaaagaggtgcacagcggcgtgtgtaccgacccccagccactgaaagaacagcccgccctgaacgacagccggtactgcctgagcagcagactgagagtgtccgccaccttctggcagaacccccggaaccacttcagatgccaggtgcagttctacggcctgagcgagaacgacgagtggacccaggacagagccaagcccgtgacccagatcgtgtctgccgaagcctggggcagagccgattgcggctttaccagcgagagctaccagcagggcgtgctgagcgccaccatcctgtacgagatcctgctgggcaaggccaccctgtacgccgtgctggtgtctgccctggtgctgatggctatggtcaagcggaaggacagccggggaagggccaagcgatctggatctggagcaacaaacttctcactactcaaacaagcaggtgacgtggaggagaatcccgggcctactagtatggactggatttggcgcatccttttccttgtcggcgctgctaccggcgcgcattccttcgaacaagttcagcttcaacagcctggcgctgagctggtcaaacctggcgcttctgtgaagatgagctgcaaagccagcggctacgccttcagcagctactggatcaactggatgaagcagaaacccggccagggactcgaatggatcggccaaatctatcccggcgacggcgacaccaactacaacggcaagttcaagggcagagccacactgaccgccgatacctctagcagcacagcctacatgcagctgagcagcctgaccagcgaagatagcgccgtgtacttctgtgcccggtccatcacaacagtcgtgggctgcgctatggactattggggccagggaacaagcgtgaccgtgtctagtacgcgtgctagaagcgaagatcggtatcggaaccccaaggcgaagcccaccatcgcgtcgcagcccctgtccctgcgcccagaggcgtgccggccagcggcggggggcgcagtgcacacgagggggctggacttcgcctgtgacatctacatctgggcgcccttggccgggacttgtggggtccttctcctgtcactggttatcaccctttactgcaaacggggcagaaagaaactcctgtatatattcaaacaaccatttatgagaccagtacaaactactcaagaggaagatggctgtagctgccgatttccagaagaagaagaaggaggatgtgaactgagagtgaagttcagcaggagcgcagacgcccccgcgtaccagcagggccagaaccagctctataacgagctgaatctaggacgaagagaggagtacgatgttttggacaagagacgtggccgggaccctgagatggggggaaagccgagaaggaagaaccctcaggaaggcctgtacaatgaactgcagaaagataagatggcggaggcctacagtgagattgggatgaaaggcgagcgccggaggggcaaggggcacgatggcctttaccagggtctcagtacagccaccaaggacacctacgacgcccttcacatgcaggccctgccccctcgctaa

SEQ ID NO: 4783 - DNA, 1890 bp, synthetic construct
  source 1..1890: mol_type = other DNA
atggccttaccagtgaccgccttgctcctgccgctggccttgctgctccacgccgccaggccggacatccagatgacacagagccctagcagcctgtctgccagcgtgggagacagagtgaccatcacatgcaaggccagcgaccacatcaacaactggctggcctggtatcagcagaagcctggacaggcccctaagctgctgatctacggcgctaccacactggaaacaggcgtgcccagcagattttctggcagcggctctggcaccgactacaccctgacaatatccagcctccagcctgaggacttcgccacctactactgtcagcagagctggaacaccccttggacattcggccagggcaccaagctggaaatcaagagactcgaggacctgaagaacgtgttcccacctgaggtggccgtgttcgagcctagcgaggccgagatcagccacacccagaaagccaccctcgtgtgcctggctaccggcttctaccccgaccatgtggaactgtcttggtgggtcaacggcaaagaggtgcacagcggcgtgtgtaccgacccccagccactgaaagaacagcccgccctgaacgacagccggtactgcctgagcagcagactgagagtgtccgccaccttctggcagaacccccggaaccacttcagatgccaggtgcagttctacggcctgagcgagaacgacgagtggacccaggacagagccaagcccgtgacccagatcgtgtctgccgaagcctggggcagagccgattgcggctttaccagcgagagctaccagcagggcgtgctgagcgccaccatcctgtacgagatcctgctgggcaaggccaccctgtacgccgtgctggtgtctgccctggtgctgatggctatggtcaagcggaaggacagccggggaagggccaagcgatctggatctggagcaacaaacttctcactactcaaacaagcaggtgacgtggaggagaatcccgggcctactagtatggactggatttggcgcatccttttccttgtcggcgctgctaccggcgcgcattccttcgaacaagttcagcttcaacagcctggcgctgagctggtcaaacctggcgcttctgtgaagatgagctgcaaagccagcggctacgccttcaacagctactggatcaactggatgaagcagaaacccggccagggactcgaatggatcggccaaatctatcccggcgacggcgacaccaactacaacggcaagttcaagggcagagccacactgaccgccgatacctctagcagcacagcctacatgcagctgagcagcctgaccagcgaagatagcgccgtgtacttctgtgcccggtccatcacaacagtcgtgggctgcgctatggactattggggccagggaacaagcgtgaccgtgtctagtacgcgtgccagaagcgaggacagatacagaaaccccaaaatccagaaccctgatcctgccgtgtaccagctgcgggatagcaagagcagcgacaagagcgtgtgtctgttcaccgacttcgacagccagaccaacgtgtcccagagcaaggactccgacgtgtacatcaccgataagaccgtgctggacatgcggagcatggacttcaagagcaactccgccgtggcctggtccaacaagtccgatttcgcctgcgccaacgccttcaacaacagcattatccccgaggacacattcttcccaagccccgagagcagctgcggtaccattacccaaggactggctgtgcctacaatctctagcttctttccgcctggataccaagtctccttctgtcttgtgatggtcctcctgtttgctgtggacacaggactgtacttttccgtgtaa

SEQ ID NO: 4784 - DNA, 2196 bp, synthetic construct
  source 1..2196: mol_type = other DNA
atggccttaccagtgaccgccttgctcctgccgctggccttgctgctccacgccgccaggccggacatccagatgacacagagccctagcagcctgtctgccagcgtgggagacagagtgaccatcacatgcaaggccagcgaccacatcaacaactggctggcctggtatcagcagaagcctggacaggcccctaagctgctgatctacggcgctaccacactggaaacaggcgtgcccagcagattttctggcagcggctctggcaccgactacaccctgacaatatccagcctccagcctgaggacttcgccacctactactgtcagcagagctggaacaccccttggacattcggccagggcaccaagctggaaatcaagagactcgaggacctgaagaacgtgttcccacctgaggtggccgtgttcgagcctagcgaggccgagatcagccacacccagaaagccaccctcgtgtgcctggctaccggcttctaccccgaccatgtggaactgtcttggtgggtcaacggcaaagaggtgcacagcggcgtgtgtaccgacccccagccactgaaagaacagcccgccctgaacgacagccggtactgcctgagcagcagactgagagtgtccgccaccttctggcagaacccccggaaccacttcagatgccaggtgcagttctacggcctgagcgagaacgacgagtggacccaggacagagccaagcccgtgacccagatcgtgtctgccgaagcctggggcagagccgattgcggctttaccagcgagagctaccagcagggcgtgctgagcgccaccatcctgtacgagatcctgctgggcaaggccaccctgtacgccgtgctggtgtctgccctggtgctgatggctatggtcaagcggaaggacagccggggaagggccaagcgatctggatctggagcaacaaacttctcactactcaaacaagcaggtgacgtggaggagaatcccgggcctactagtatggactggatttggcgcatccttttccttgtcggcgctgctaccggcgcgcattccttcgaacaagttcagcttcaacagcctggcgctgagctggtcaaacctggcgcttctgtgaagatgagctgcaaagccagcggctacgccttcaacagctactggatcaactggatgaagcagaaacccggccagggactcgaatggatcggccaaatctatcccggcgacggcgacaccaactacaacggcaagttcaagggcagagccacactgaccgccgatacctctagcagcacagcctacatgcagctgagcagcctgaccagcgaagatagcgccgtgtacttctgtgcccggtccatcacaacagtcgtgggctgcgctatggactattggggccagggaacaagcgtgaccgtgtctagtacgcgtgccagaagcgaggacagatacagaaaccccaaaatccagaaccctgatcctgccgtgtaccagctgcgggatagcaagagcagcgacaagagcgtgtgtctgttcaccgacttcgacagccagaccaacgtgtcccagagcaaggactccgacgtgtacatcaccgataagaccgtgctggacatgcggagcatggacttcaagagcaactccgccgtggcctggtccaacaagtccgatttcgcctgcgccaacgccttcaacaacagcattatccccgaggacacattcttcccaagccccgagagcagctgcggtacccagagttttgggttgttggaccctaaattgtgctatctgttggacggaatcctgttcatttacggagtgatcctgaccgcattgttcctgcgggttaagttttccagatccgcagacgcacccgcttaccaacaagggcagaaccaactctacaatgaacttaatttggggcggagggaagagtacgacgttctggacaaaaggaggggacgagatcccgagatgggcggaaagcctcgaaggaagaatccgcaagaggggctttataacgaactccagaaagataaaatggcagaagcctatagtgagattgggatgaagggagaaaggaggaggggtaaaggtcacgatgggttgtaccaaggattgagcacagccactaaagatacctatgatgcgctccacatgcaggccctgccgccaagataa

SEQ ID NO: 4785 - DNA, 2190 bp, synthetic construct
  source 1..2190: mol_type = other DNA
atggccttaccagtgaccgccttgctcctgccgctggccttgctgctccacgccgccaggccggacatccagatgacacagagccctagcagcctgtctgccagcgtgggagacagagtgaccatcacatgcaaggccagcgaccacatcaacaactggctggcctggtatcagcagaagcctggacaggcccctaagctgctgatctacggcgctaccacactggaaacaggcgtgcccagcagattttctggcagcggctctggcaccgactacaccctgacaatatccagcctccagcctgaggacttcgccacctactactgtcagcagagctggaacaccccttggacattcggccagggcaccaagctggaaatcaagagactcgaggacctgaagaacgtgttcccacctgaggtggccgtgttcgagcctagcgaggccgagatcagccacacccagaaagccaccctcgtgtgcctggctaccggcttctaccccgaccatgtggaactgtcttggtgggtcaacggcaaagaggtgcacagcggcgtgtctaccgacccccagccactgaaagaacagcccgccctgaacgacagccggtactgcctgagcagcagactgagagtgtccgccaccttctggcagaacccccggaaccacttcagatgccaggtgcagttctacggcctgagcgagaacgacgagtggacccaggacagagccaagcccgtgacccagatcgtgtctgccgaagcctggggcagagccgattgcggatcccagagcttcggcctgctggaccccaagctgtgctacctgctggatggcatcctgttcatctacggcgtgatcctgaccgccctgttcctgagagtgaagttcagcagaagcgccgacgcccctgcctaccagcagggacagaaccaactgtacaacgagctgaacctgggcagacgggaagagtacgacgtgctggacaagcggagaggcagggaccctgagatgggcggaaagccccggagaaagaacccccaggaaggactgtataacgaactccagaaagacaagatggccgaagcctacagcgagatcggcatgaagggcgagcggagaagaggcaagggccacgatggcctgtaccagggcctgagcaccgccaccaaggacacctatgacgccctgcacatgcaggccctgcctccaagaagggccaagcgatctggatctggagcaacaaacttctcactactcaaacaagcaggtgacgtggaggagaatcccgggcctactagtatggactggatttggcgcatccttttccttgtcggcgctgctaccggcgcgcattccttcgaacaagttcagcttcaacagcctggcgctgagctggtcaaacctggcgcttctgtgaagatgagctgcaaagccagcggctacgccttcagcagctactggatcaactggatgaagcagaaacccggccagggactcgaatggatcggccaaatctatcccggcgacggcgacaccaactacaacggcaagttcaagggcagagccacactgaccgccgatacctctagcagcacagcctacatgcagctgagcagcctgaccagcgaagatagcgccgtgtacttctgtgcccggtccatcacaacagtcgtgggctgcgctatggactattggggccagggaacaagcgtgaccgtgtctagtacgcgtgccagaagcgaggacagatacagaaaccccaaaatccagaaccctgatcctgccgtgtaccagctgcgggatagcaagagcagcgacaagagcgtgtgtctgttcaccgacttcgacagccagaccaacgtgtcccagagcaaggactccgacgtgtacatcaccgataagtgcgtgctggacatgcggagcatggacttcaagagcaactccgccgtggcctggtccaacaagtccgatttcgcctgcgccaacgccttcaacaacagcattatccccgaggacacattcttcccaagccccgagagcagctgcgacgtgaagctggtggaaaagagcttcgagacagacaccaacctgaacttccagaacctgagcgtgatcggcttcagaatcctgctgctgaaagtggccggctttaacctgctgatgaccctgcggctgtggtccagctaa

SEQ ID NO: 4786 - DNA, 2178 bp, synthetic construct
  source 1..2178: mol_type = other DNA
atggccttaccagtgaccgccttgctcctgccgctggccttgctgctccacgccgccaggccggacatccagatgacacagagccctagcagcctgtctgccagcgtgggagacagagtgaccatcacatgcaaggccagcgaccacatcaacaactggctggcctggtatcagcagaagcctggacaggcccctaagctgctgatctacggcgctaccacactggaaacaggcgtgcccagcagattttctggcagcggctctggcaccgactacaccctgacaatatccagcctccagcctgaggacttcgccacctactactgtcagcagagctggaacaccccttggacattcggccagggcaccaagctggaaatcaagagactcgaggacctgaagaacgtgttcccacctgaggtggccgtgttcgagcctagcgaggccgagatcagccacacccagaaagccaccctcgtgtgcctggctaccggcttctaccccgaccatgtggaactgtcttggtgggtcaacggcaaagaggtgcacagcggcgtgtctaccgacccccagccactgaaagaacagcccgccctgaacgacagccggtactgcctgagcagcagactgagagtgtccgccaccttctggcagaacccccggaaccacttcagatgccaggtgcagttctacggcctgagcgagaacgacgagtggacccaggacagagccaagcccgtgacccagatcgtgtctgccgaagcctggggcagagccgattgcggatcccagagcttcggcctgctggaccccaagctgtgctacctgctggatggcatcctgttcatctacggcgtgatcctgaccgccctgttcctgagagtgaagttcagcagaagcgccgacgcccctgcctaccagcagggacagaaccaactgtacaacgagctgaacctgggcagacgggaagagtacgacgtgctggacaagcggagaggcagggaccctgagatgggcggaaagccccggagaaagaacccccaggaaggactgtataacgaactccagaaagacaagatggccgaagcctacagcgagatcggcatgaagggcgagcggagaagaggcaagggccacgatggcctgtaccagggcctgagcaccgccaccaaggacacctatgacgccctgcacatgcaggccctgcctccaagaagggccaagcgatctggatctggagcaacaaacttctcactactcaaacaagcaggtgacgtggaggagaatcccgggcctactagtatggactggatttggcgcatccttttccttgtcggcgctgctaccggcgcgcattccttcgaacaagttcagcttcaacagcctggcgctgagctggtcaaacctggcgcttctgtgaagatgagctgcaaagccagcggctacgccttcagcagctactggatcaactggatgaagcagaaacccggccagggactcgaatggatcggccaaatctatcccggcgacggcgacaccaactacaacggcaagttcaagggcagagccacactgaccgccgatacctctagcagcacagcctacatgcagctgagcagcctgaccagcgaagatagcgccgtgtacttctgtgcccggtccatcacaacagtcgtgggctgcgctatggactattggggccagggaacaagcgtgaccgtgtctagtacgcgtgccagaagcgaggacagatacagaaaccccaaaatccagaaccctgatcctgccgtgtaccagctgcgggatagcaagagcagcgacaagagcgtgtgtctgttcaccgacttcgacagccagaccaacgtgtcccagagcaaggactccgacgtgtacatcaccgataagaccgtgctggacatgcggagcatggacttcaagagcaactccgccgtggcctggtccaacaagtccgatttcgcctgcgccaacgccttcaacaacagcattatccccgaggacacattcttcccaagccccgagagcagctgcggtaccattacccaaggactggctgtgcctacaatctctagcttctttccgcctggataccaagtctccttctgtcttgtgatggtcctcctgtttgctgtggacacaggactgtacttttccgtgtaa

SEQ ID NO: 4787 - DNA, 2484 bp, synthetic construct
  source 1..2484: mol_type = other DNA
atggccttaccagtgaccgccttgctcctgccgctggccttgctgctccacgccgccaggccggacatccagatgacacagagccctagcagcctgtctgccagcgtgggagacagagtgaccatcacatgcaaggccagcgaccacatcaacaactggctggcctggtatcagcagaagcctggacaggcccctaagctgctgatctacggcgctaccacactggaaacaggcgtgcccagcagattttctggcagcggctctggcaccgactacaccctgacaatatccagcctccagcctgaggacttcgccacctactactgtcagcagagctggaacaccccttggacattcggccagggcaccaagctggaaatcaagagactcgaggacctgaagaacgtgttcccacctgaggtggccgtgttcgagcctagcgaggccgagatcagccacacccagaaagccaccctcgtgtgcctggctaccggcttctaccccgaccatgtggaactgtcttggtgggtcaacggcaaagaggtgcacagcggcgtgtctaccgacccccagccactgaaagaacagcccgccctgaacgacagccggtactgcctgagcagcagactgagagtgtccgccaccttctggcagaacccccggaaccacttcagatgccaggtgcagttctacggcctgagcgagaacgacgagtggacccaggacagagccaagcccgtgacccagatcgtgtctgccgaagcctggggcagagccgattgcggatcccagagcttcggcctgctggaccccaagctgtgctacctgctggatggcatcctgttcatctacggcgtgatcctgaccgccctgttcctgagagtgaagttcagcagaagcgccgacgcccctgcctaccagcagggacagaaccaactgtacaacgagctgaacctgggcagacgggaagagtacgacgtgctggacaagcggagaggcagggaccctgagatgggcggaaagccccggagaaagaacccccaggaaggactgtataacgaactccagaaagacaagatggccgaagcctacagcgagatcggcatgaagggcgagcggagaagaggcaagggccacgatggcctgtaccagggcctgagcaccgccaccaaggacacctatgacgccctgcacatgcaggccctgcctccaagaagggccaagcgatctggatctggagcaacaaacttctcactactcaaacaagcaggtgacgtggaggagaatcccgggcctactagtatggactggatttggcgcatccttttccttgtcggcgctgctaccggcgcgcattccttcgaacaagttcagcttcaacagcctggcgctgagctggtcaaacctggcgcttctgtgaagatgagctgcaaagccagcggctacgccttcagcagctactggatcaactggatgaagcagaaacccggccagggactcgaatggatcggccaaatctatcccggcgacggcgacaccaactacaacggcaagttcaagggcagagccacactgaccgccgatacctctagcagcacagcctacatgcagctgagcagcctgaccagcgaagatagcgccgtgtacttctgtgcccggtccatcacaacagtcgtgggctgcgctatggactattggggccagggaacaagcgtgaccgtgtctagtacgcgtgccagaagcgaggacagatacagaaaccccaaaatccagaaccctgatcctgccgtgtaccagctgcgggatagcaagagcagcgacaagagcgtgtgtctgttcaccgacttcgacagccagaccaacgtgtcccagagcaaggactccgacgtgtacatcaccgataagaccgtgctggacatgcggagcatggacttcaagagcaactccgccgtggcctggtccaacaagtccgatttcgcctgcgccaacgccttcaacaacagcattatccccgaggacacattcttcccaagccccgagagcagctgcggtacccagagttttgggttgttggaccctaaattgtgctatctgttggacggaatcctgttcatttacggagtgatcctgaccgcattgttcctgcgggttaagttttccagatccgcagacgcacccgcttaccaacaagggcagaaccaactctacaatgaacttaatttggggcggagggaagagtacgacgttctggacaaaaggaggggacgagatcccgagatgggcggaaagcctcgaaggaagaatccgcaagaggggctttataacgaactccagaaagataaaatggcagaagcctatagtgagattgggatgaagggagaaaggaggaggggtaaaggtcacgatgggttgtaccaaggattgagcacagccactaaagatacctatgatgcgctccacatgcaggccctgccgccaagataa

SEQ ID NO: 4788 - DNA, 2409 bp, synthetic construct
  source 1..2409: mol_type = other DNA
atggccttaccagtgaccgccttgctcctgccgctggccttgctgctccacgccgccaggccggacatccagatgacacagagccctagcagcctgtctgccagcgtgggagacagagtgaccatcacatgcaaggccagcgaccacatcaacaactggctggcctggtatcagcagaagcctggacaggcccctaagctgctgatctacggcgctaccacactggaaacaggcgtgcccagcagattttctggcagcggctctggcaccgactacaccctgacaatatccagcctccagcctgaggacttcgccacctactactgtcagcagagctggaacaccccttggacattcggccagggcaccaagctggaaatcaagagactcgaggacctgaagaacgtgttcccacctgaggtggccgtgttcgagcctagcgaggccgagatcagccacacccagaaagccaccctcgtgtgcctggctaccggcttctaccccgaccatgtggaactgtcttggtgggtcaacggcaaagaggtgcacagcggcgtgtctaccgacccccagccactgaaagaacagcccgccctgaacgacagccggtactgcctgagcagcagactgagagtgtccgccaccttctggcagaacccccggaaccacttcagatgccaggtgcagttctacggcctgagcgagaacgacgagtggacccaggacagagccaagcccgtgacccagatcgtgtctgccgaagcctggggcagagccgattgcggatcccagagcttcggcctgctggaccccaagctgtgctacctgctggatggcatcctgttcatctacggcgtgatcctgaccgccctgttcctgagagtgaagttcagcagaagcgccgacgcccctgcctaccagcagggacagaaccaactgtacaacgagctgaacctgggcagacgggaagagtacgacgtgctggacaagcggagaggcagggaccctgagatgggcggaaagccccggagaaagaacccccaggaaggactgtataacgaactccagaaagacaagatggccgaagcctacagcgagatcggcatgaagggcgagcggagaagaggcaagggccacgatggcctgtaccagggcctgagcaccgccaccaaggacacctatgacgccctgcacatgcaggccctgcctccaagaagggccaagcgatctggatctggagcaacaaacttctcactactcaaacaagcaggtgacgtggaggagaatcccgggcctactagtatggactggatttggcgcatccttttccttgtcggcgctgctaccggcgcgcattccttcgaacaagttcagcttcaacagcctggcgctgagctggtcaaacctggcgcttctgtgaagatgagctgcaaagccagcggctacgccttcagcagctactggatcaactggatgaagcagaaacccggccagggactcgaatggatcggccaaatctatcccggcgacggcgacaccaactacaacggcaagttcaagggcagagccacactgaccgccgatacctctagcagcacagcctacatgcagctgagcagcctgaccagcgaagatagcgccgtgtacttctgtgcccggtccatcacaacagtcgtgggctgcgctatggactattggggccagggaacaagcgtgaccgtgtctagtacgcgtgctagaagcgaagatcggtatcggaaccccaaggcgaagcccaccatcgcgtcgcagcccctgtccctgcgcccagaggcgtgccggccagcggcggggggcgcagtgcacacgagggggctggacttcgcctgtgacatctacatctgggcgcccttggccgggacttgtggggtccttctcctgtcactggttatcaccctttactgcaaacggggcagaaagaaactcctgtatatattcaaacaaccatttatgagaccagtacaaactactcaagaggaagatggctgtagctgccgatttccagaagaagaagaaggaggatgtgaactgagagtgaagttcagcaggagcgcagacgcccccgcgtaccagcagggccagaaccagctctataacgagctgaatctaggacgaagagaggagtacgatgttttggacaagagacgtggccgggaccctgagatggggggaaagccgagaaggaagaaccctcaggaaggcctgtacaatgaactgcagaaagataagatggcggaggcctacagtgagattgggatgaaaggcgagcgccggaggggcaaggggcacgatggcctttaccagggtctcagtacagccaccaaggacacctacgacgcccttcacatgcaggccctgccccctcgctaa

SEQ ID NO: 4789 - DNA, 2487 bp, synthetic construct
  source 1..2487: mol_type = other DNA
atggccttaccagtgaccgccttgctcctgccgctggccttgctgctccacgccgccaggccgagctacgtgctgacacagcctccatccgtgtctgtggctccaggacagaccgccagaatcacatgcggcggcaacaacatcggcagcaagagcgtgcactggtatcagcagccacctggacaggctccagtggtggtggtgtacgacgacagcgatagacctagcggcatccccgagagattcagcggcagcaattccggcaataccgccacactgaccatcagcagagtggaagctggcgacgaggccgtgtactactgccaagtgtgggacagcagcagcgatcacgtggtgtttggcggcggaacaaagctgacagtgcttctcgaggacctgaagaacgtgttcccacctgaggtggccgtgttcgagcctagcgaggccgagatcagccacacccagaaagccaccctcgtgtgcctggctaccggcttctaccccgaccatgtggaactgtcttggtgggtcaacggcaaagaggtgcacagcggcgtgtctaccgacccccagccactgaaagaacagcccgccctgaacgacagccggtactgcctgagcagcagactgagagtgtccgccaccttctggcagaacccccggaaccacttcagatgccaggtgcagttctacggcctgagcgagaacgacgagtggacccaggacagagccaagcccgtgacccagatcgtgtctgccgaagcctggggcagagccgattgcggatcccagagcttcggcctgctggaccccaagctgtgctacctgctggatggcatcctgttcatctacggcgtgatcctgaccgccctgttcctgagagtgaagttcagcagaagcgccgacgcccctgcctaccagcagggacagaaccaactgtacaacgagctgaacctgggcagacgggaagagtacgacgtgctggacaagcggagaggcagggaccctgagatgggcggaaagccccggagaaagaacccccaggaaggactgtataacgaactccagaaagacaagatggccgaagcctacagcgagatcggcatgaagggcgagcggagaagaggcaagggccacgatggcctgtaccagggcctgagcaccgccaccaaggacacctatgacgccctgcacatgcaggccctgcctccaagaagggccaagcgatctggatctggagcaacaaacttctcactactcaaacaagcaggtgacgtggaggagaatcccgggcctactagtatggactggatttggcgcatccttttccttgtcggcgctgctaccggcgcgcattccttcgaacaactccagctgcaagagtctggccctggcctggtcaagcctagcgaaacactgagcctgacctgtaccgtgtctggcggctctatcagctccggcagctatttctggggctggatcagacaacctcctggcaaaggactggaatggatcggctccatctactacagcggcatcacctactacaaccccagcctgaagtccagagtgaccatctccgtggacaccagcaagaaccagttctccctgaagctgagcagcgtgacagccgccgataccgccgtgtattattgtgccagacatgacggcgctgtggccggcctgtttgattattggggacagggcaccctggtcaccgtgtcatctgctacgcgtgccagaagcgaggacagatacagaaaccccaaaatccagaaccctgatcctgccgtgtaccagctgcgggatagcaagagcagcgacaagagcgtgtgtctgttcaccgacttcgacagccagaccaacgtgtcccagagcaaggactccgacgtgtacatcaccgataagaccgtgctggacatgcggagcatggacttcaagagcaactccgccgtggcctggtccaacaagtccgatttcgcctgcgccaacgccttcaacaacagcattatccccgaggacacattcttcccaagccccgagagcagctgcggtacccagagttttgggttgttggaccctaaattgtgctatctgttggacggaatcctgttcatttacggagtgatcctgaccgcattgttcctgcgggttaagttttccagatccgcagacgcacccgcttaccaacaagggcagaaccaactctacaatgaacttaatttggggcggagggaagagtacgacgttctggacaaaaggaggggacgagatcccgagatgggcggaaagcctcgaaggaagaatccgcaagaggggctttataacgaactccagaaagataaaatggcagaagcctatagtgagattgggatgaagggagaaaggaggaggggtaaaggtcacgatgggttgtaccaaggattgagcacagccactaaagatacctatgatgcgctccacatgcaggccctgccgccaagataa

SEQ ID NO: 4790 - DNA, 1257 bp, synthetic construct
  source 1..1257: mol_type = other DNA
atggccttaccagtgaccgccttgctcctgccgctggccttgctgctccacgccgccaggccggacatccagatgacacagagccctagcagcctgtctgccagcgtgggagacagagtgaccatcacatgcaaggccagcgaccacatcaacaactggctggcctggtatcagcagaagcctggacaggcccctaagctgctgatctacggcgctaccacactggaaacaggcgtgcccagcagattttctggcagcggctctggcaccgactacaccctgacaatatccagcctccagcctgaggacttcgccacctactactgtcagcagagctggaacaccccttggacattcggccagggcaccaagctggaaatcaagagaggcggaggcggaagtggaggcggaggatctggcggcggaggctctcaagttcagcttcaacagcctggcgctgagctggtcaaacctggcgcttctgtgaagatgagctgcaaagccagcggctacgccttcagcagctactggatcaactggatgaagcagaaacccggccagggactcgaatggatcggccaaatctatcccggcgacggcgacaccaactacaacggcaagttcaagggcagagccacactgaccgccgatacctctagcagcacagcctacatgcagctgagcagcctgaccagcgaagatagcgccgtgtacttctgtgcccggtccatcacaacagtcgtgggctgcgctatggactattggggccagggaacaagcgtgaccgtgtctagtacgcgtgccagaagcgaggacagatacagaaaccccaaaatccagaaccctgatcctgccgtgtaccagctgcgggatagcaagagcagcgacaagagcgtgtgtctgttcaccgacttcgacagccagaccaacgtgtcccagagcaaggactccgacgtgtacatcaccgataagtgcgtgctggacatgcggagcatggacttcaagagcaactccgccgtggcctggtccaacaagtccgatttcgcctgcgccaacgccttcaacaacagcattatccccgaggacacattcttcccaagccccgagagcagctgcgacgtgaagctggtggaaaagagcttcgagacagacaccaacctgaacttccagaacctgagcgtgatcggcttcagaatcctgctgctgaaagtggccggctttaacctgctgatgaccctgcggctgtggtccagctaa

SEQ ID NO: 4791 - DNA, 1665 bp, synthetic construct
  source 1..1665: mol_type = other DNA
atggccttaccagtgaccgccttgctcctgccgctggccttgctgctccacgccgccaggccggacatccagatgacacagagccctagcagcctgtctgccagcgtgggagacagagtgaccatcacatgcaaggccagcgaccacatcaacaactggctggcctggtatcagcagaagcctggacaggcccctaagctgctgatctacggcgctaccacactggaaacaggcgtgcccagcagattttctggcagcggctctggcaccgactacaccctgacaatatccagcctccagcctgaggacttcgccacctactactgtcagcagagctggaacaccccttggacattcggccagggcaccaagctggaaatcaagagactcgagggagcaagaagtgaagatcgctacaggaaccctaaggggtcagccggctctttcgaacaagttcagcttcaacagcctggcgctgagctggtcaaacctggcgcttctgtgaagatgagctgcaaagccagcggctacgccttcagcagctactggatcaactggatgaagcagaaacccggccagggactcgaatggatcggccaaatctatcccggcgacggcgacaccaactacaacggcaagttcaagggcagagccacactgaccgccgatacctctagcagcacagcctacatgcagctgagcagcctgaccagcgaagatagcgccgtgtacttctgtgcccggtccatcacaacagtcgtgggctgcgctatggactattggggccagggaacaagcgtgaccgtgtctagtacgcgtatccagaaccctgatcctgccgtgtaccagctgcgggatagcaagagcagcgacaagagcgtgtgtctgttcaccgacttcgacagccagaccaacgtgtcccagagcaaggactccgacgtgtacatcaccgataagaccgtgctggacatgcggagcatggacttcaagagcaactccgccgtggcctggtccaacaagtccgatttcgcctgcgccaacgccttcaacaacagcattatccccgaggacacattcttcccaagccccgagagcagctgcggtacccagagttttgggttgttggaccctaaattgtgctatctgttggacggaatcctgttcatttacggagtgatcctgaccgcattgttcctgaagagaggccggaagaagctgctgtacatcttcaagcagcctttcatgcggcccgtgcagaccacccaggaagaggacggctgctcctgccggttccccgaggaagaagaaggcggctgcgagctgcgggttaagttttccagatccgcagacgcacccgcttaccaacaagggcagaaccaactctacaatgaacttaatttggggcggagggaagagtacgacgttctggacaaaaggaggggacgagatcccgagatgggcggaaagcctcagcgaaggaagaatccgcaagaggggctttataacgaactccagaaagataaaatggcagaagcctatagtgagattgggatgaagggagaaaggaggaggggtaaaggtcacgatgggttgtaccaaggattgagcacagccactaaagatacctatgatgcgctccacatgcaggccctgccgccaagataa

SEQ ID NO: 4792 - DNA, 2574 bp, synthetic construct
  source 1..2574: mol_type = other DNA
atggccttaccagtgaccgccttgctcctgccgctggccttgctgctccacgccgccaggccgagctacgtgctgacacagcctccatccgtgtctgtggctccaggacagaccgccagaatcacatgcggcggcaacaacatcggcggcaagagcgtgcactggtatcagcagccacctggacaggctccagtggtggtggtgtacgacgacagcgatagacctagcggcatccccgagagattcagcggcagcaattccggcaataccgccacactgaccatcagcagagtggaagctggcgacgaggccgtgtactactgccaagtgtgggacagcagcagcgatcacgtggtgtttggcggcggaacaaagctgacagtgcttctcgaggacctgaagcacgtgttcccacctgaggtggccgtgttcgagcctagcgacgccgagatctggcacacccagaaagccaccctcgtgtgcctggctaccggcttctaccccgaccatgtggaactgtcttggtgggtcaacggcaaagaggtgcacagcggcgtgtctaccgacccccagccactgaaagaacagcccgccctgaacgacagccggtactgcctgagcagcagactgagagtgtccgccaccttctggcagaacccccggaaccacttcagatgccaggtgcagttctacggcctgagcgagaacgacgagtggacccaggacagagccaagcccgtgacccagatcgtgtctgccgaagcctggggcagagccgattgcggctttaccagcgagagctaccagcagggcgtgctgagcgccaccatcctgtacttgttgctgctgctgaagtccgtggtgtacttcgccatcatcacatgctgcctgctgcggagaaccgccttctgctgcaacggcgagaagtctagggccaagcgatctggatctggagcaacaaacttctcactactcaaacaagcaggtgacgtggaggagaatcccgggcctactagtatggactggatttggcgcatccttttccttgtcggcgctgctaccggcgcgcattccttcgaacaactccagctgcaagagtctggccctggcctggtcaagcctagcgaaacactgagcctgacctgtaccgtgtctggcggctctatcagctccagcagctatttctggggctggatcagacaacctcctggcaaaggactggaatggatcggctccatctactacagcggcatcacctactacaaccccagcctgaagtccagagtgaccatctccgtggacaccagcaagaaccagttctccctgaagctgagcagcgtgacagccgccgataccgccgtgtattattgtgccagacatgacggcgctgtggccggcctgtttgattattggggacagggcaccctggtcaccgtgtcatctgctacgcgtatccagaaccctgatcctgccgtgtaccagctgcgggatagcaagagcagcgacaagagcgtgtgtctgttcaccgacttcgacagccagaccaacgtgtcccagagcaaggactccgacgtgtacatcaccgataagtgcgtgctggacatgcggagcatggacttcaagagcaactccgccgtggcctggtccaacaagtccgatttcgcctgcgccaacgccttcaacaacagcattatccccgaggacacattcttcccaagccccgagagcagctgcgacgtgaagctggtggaaaagagcttcgagacagacaccaacctgaacttccagaacctgagcgtgctgggcctgcggatgctgttcgccaaaaccgtggccgtgaacttcctgctgaccgccaagctgttcttcctccgcgccaagagaagcggatctggcgtgaagcagaccctgaatttcgacctgctgaagctggctggcgacgtggaatccaacccaggcccttctagaggccatatgaccgagtacaagcccacggtgcgcctcgccacccgcgacgacgtccccagggccgtacgcaccctcgccgccgcgttcgccgactaccccgccacgcgccacaccgtcgatccggaccgccacatcgagcgggtcaccgagctgcaagaactcttcctcacgcgcgtcgggctcgacatcggcaaggtgtgggtcgcggacgacggcgccgcggtggcggtctggaccacgccggagagcgtcgaagcgggggcggtgttcgccgagatcggcccgcgcatggccgagttgagcggttcccggctggccgcgcagcaacagatggaaggcctcctggcgccgcaccggcccaaggagcccgcgtggttcctggccaccgtcggcgtctcgcccgaccaccagggcaagggtctgggcagcgccgtcgtgctccccggagtggaggcggccgagcgcgccggggtgcccgccttcctggagacctccgcgccccgcaacctccccttctacgagcggctcggcttcaccgtcaccgccgacgtcgaggtgcccgaaggaccgcgcacctggtgcatgacccgcaagcccggtgcctga

SEQ ID NO: 4793 - DNA, 1872 bp, synthetic construct
  source 1..1872: mol_type = other DNA
atggccttaccagtgaccgccttgctcctgccgctggccttgctgctccacgccgccaggccggacatccagttgacccagtcccccagctcactcagcgccagtgtgggggaccgggtgaccattacctgtaaagccagtcagagtgtggactatgacggggatagcttcctgaattggtatcagcagaagcctggcaaagccccaaagctgctgatctacgctgcatctaatctggagtcaggcgtgccttccaggttctccggtagtgggtctgggaccgatttcacattgaccatttcatccctccaacccgaggatttcgctacatattactgtcagcagtccaatgaggaccctctcacctttggccagggcaccaaagttgaaattaagagactcgaggacctgaagcacgtgttcccacctgaggtggccgtgttcgagcctagcgacgccgagatctggcacacccagaaagccaccctcgtgtgcctggctaccggcttctaccccgaccatgtggaactgtcttggtgggtcaacggcaaagaggtgcacagcggcgtgtctaccgacccccagccactgaaagaacagcccgccctgaacgacagccggtactgcctgagcagcagactgagagtgtccgccaccttctggcagaacccccggaaccacttcagatgccaggtgcagttctacggcctgagcgagaacgacgagtggacccaggacagagccaagcccgtgacccagatcgtgtctgccgaagcctggggcagagccgattgcggctttaccagcgagagctaccagcagggcgtgctgagcgccaccatcctgtacttgttgctgctgctgaagtccgtggtgtacttcgccatcatcacatgctgcctgctgcggagaaccgccttctgctgcaacggcgagaagtctagggccaagcgatctggatctggagcaacaaacttctcactactcaaacaagcaggtgacgtggaggagaatcccgggcctactagtatggactggatttggcgcatccttttccttgtcggcgctgctaccggcgcgcattccttcgaagaagtccaacttgtggagtctggagggggcctggtgcagcccggcggctctctcagactgtcttgtgcggcaagcggctacaccttcacctcttactggatagaatgggtgaggcaggcacctggaaagggactggagtggattggagagattctgccaggagggggagatacaaattacaatgaaatcttcaaggggcgggccaccttttcagcggataccagcaagaatacagcttacctgcagatgaatagcctccgggcagaagataccgctgtttattattgcacgagacgggtgccaataagactggactattgggggcaagggactcttgtcaccgtcagttcaacgcgtatccagaaccctgatcctgccgtgtaccagctgcgggatagcaagagcagcgacaagagcgtgtgtctgttcaccgacttcgacagccagaccaacgtgtcccagagcaaggactccgacgtgtacatcaccgataagtgcgtgctggacatgcggagcatggacttcaagagcaactccgccgtggcctggtccaacaagtccgatttcgcctgcgccaacgccttcaacaacagcattatccccgaggacacattcttcccaagccccgagagcagctgcgacgtgaagctggtggaaaagagcttcgagacagacaccaacctgaacttccagaacctgagcgtgatcggcttcagaatcctgctgctgaaagtggccggctttaacctgctgatgaccctgcggctgtggtccagctaa

SEQ ID NO: 4794 - DNA, 1491 bp, synthetic construct
  source 1..1491: mol_type = other DNA
atggccttaccagtgaccgccttgctcctgccgctggccttgctgctccacgccgccaggccggacatccagatgacacagagccctagcagcctgtctgccagcgtgggagacagagtgaccatcacatgcaaggccagcgaccacatcaacaactggctggcctggtatcagcagaagcctggacaggcccctaagctgctgatctacggcgctaccacactggaaacaggcgtgcccagcagattttctggcagcggctctggcaccgactacaccctgacaatatccagcctccagcctgaggacttcgccacctactactgtcagcagagctggaacaccccttggacattcggccagggcaccaagctggaaatcaagagactcgagggaggctctgccagaagcgaggacagatacagaaaccccaaaggcggaagcttcgaacaagttcagcttcaacagcctggcgctgagctggtcaaacctggcgcttctgtgaagatgagctgcaaagccagcggctacgccttcagcagctactggatcaactggatgaagcagaaacccggccagggactcgaatggatcggccaaatctatcccggcgacggcgacaccaactacaacggcaagttcaagggcagagccacactgaccgccgatacctctagcagcacagcctacatgcagctgagcagcctgaccagcgaagatagcgccgtgtacttctgtgcccggtccatcacaacagtcgtgggctgcgctatggactattggggccagggaacaagcgtgaccgtgtctagtacgcgtaccacgacgccagcgccgcgaccaccaacaccggcgcccaccatcgcgtcgcagcccctgtccctgcgcccagaggcgtgccggccagcggcggggggcgcagtgcacacgagggggctggacttcgcctgtgacatctacatctgggcgcccttggccgggacttgtggggtccttctcctgtcactggttatcaccctttactgcaaacggggcagaaagaaactcctgtatatattcaaacaaccatttatgagaccagtacaaactactcaagaggaagatggctgtagctgccgatttccagaagaagaagaaggaggatgtgaactgagagtgaagttcagcaggagcgcagacgcccccgcgtaccagcagggccagaaccagctctataacgagctgaatctaggacgaagagaggagtacgatgttttggacaagagacgtggccgggaccctgagatggggggaaagccgagaaggaagaaccctcaggaaggcctgtacaatgaactgcagaaagataagatggcggaggcctacagtgagattgggatgaaaggcgagcgccggaggggcaaggggcacgatggcctttaccagggtctcagtacagccaccaaggacacctacgacgcccttcacatgcaggccctgccccctcgctaa

SEQ ID NO: 4795 - DNA, 1977 bp, synthetic construct
  source 1..1977: mol_type = other DNA
atggccttaccagtgaccgccttgctcctgccgctggccttgctgctccacgccgccaggccggacatccagatgacacagagccctagcagcctgtctgccagcgtgggagacagagtgaccatcacatgcaaggccagcgaccacatcaacaactggctggcctggtatcagcagaagcctggacaggcccctaagctgctgatctacggcgctaccacactggaaacaggcgtgcccagcagattttctggcagcggctctggcaccgactacaccctgacaatatccagcctccagcctgaggacttcgccacctactactgtcagcagagctggaacaccccttggacattcggccagggcaccaagctggaaatcaagagactcgagatccagaaccctgatcctgccgtgtaccagctgcgggatagcaagagcagcgacaagagcgtgtgtctgttcaccgacttcgacagccagaccaacgtgtcccagagcaaggactccgacgtgtacatcaccgataagtgcgtgctggacatgcggagcatggacttcaagagcaactccgccgtggcctggtccaacaagtccgatttcgcctgcgccaacgccttcaacaacagcattatccccgaggacacattcttcccaagcagcgacgtgccctgcgacgtgaagctggtggaaaagagcttcgagacagacaccaacctgaacttccagaacctgagcgtgatcggcttcagaatcctgctgctgaaagtggccggctttaacctgctgatgaccctgcggctgtggtccagccgcgccaagagaagcggatctggcgtgaagcagaccctgaatttcgacctgctgaagctggctggcgacgtggaatccaacccaggccctactagtgccaccatggactggatttggcgcatccttttccttgtcggcgctgctaccggcgcccattccgggcccgccagaagcgaggacagatacagaaaccccaaaggatccggcggcggaggatctggcggaggcggatctgggggcggaggctctttcgaacaagttcagcttcaacagcctggcgctgagctggtcaaacctggcgcttctgtgaagatgagctgcaaagccagcggctacgccttcagcagctactggatcaactggatgaagcagaaacccggccagggactcgaatggatcggccaaatctatcccggcgacggcgacaccaactacaacggcaagttcaagggcagagccacactgaccgccgatacctctagcagcacagcctacatgcagctgagcagcctgaccagcgaagatagcgccgtgtacttctgtgcccggtccatcacaacagtcgtgggctgcgctatggactattggggccagggaacaagcgtgaccgtgtctagtacgcgtgaggacctgaagaacgtgttcccacctgaggtggccgtgttcgagcctagcaaggccgagatcgcccacacccagaaagccaccctcgtgtgcctggctaccggcttctaccccgaccatgtggaactgtcttggtgggtcaacggcaaagaggtgcacagcggcgtgtgtaccgacccccagccactgaaagaacagcccgccctgaacgacagccggtactgcctgagcagcagactgagagtgtccgccaccttctggcagaacccccggaaccacttcagatgccaggtgcagttctacggcctgagcgagaacgacgagtggacccaggacagagccaagcccgtgacccagatcgtgtctgccgaagcctggggcagagccgattgcggcatcaccagcgccagctaccaccagggcgtgctgagcgccaccatcctgtacgagatcctgctgggcaaggccaccctgtacgccgtgctggtgtctgccctggtgctgatggctatggtcaagcggaaggacagccggggataa

SEQ ID NO: 4796 - DNA, 1929 bp, synthetic construct
  source 1..1929: mol_type = other DNA
atggccttaccagtgaccgccttgctcctgccgctggccttgctgctccacgccgccaggccggacgacatccagttgacccagtcccccagctcactcagcgccagtgtgggggaccgggtgaccattacctgtaaagccagtcagagtgtggactatgagggggatagcttcctgaattggtatcagcagaagcctggcaaagccccaaagctgctgatctacgctgcatctaatctggagtcaggcgtgccttctaggttctccggtagtgggtctgggaccgatttcacattgaccatttcatccctccaacccgaggatttcgctacatattactgtcagcagtccaatgaggaccctctcacctttggccagggcaccaaagttgaaattaagagactcgagggacagcctaaggccaatcctaccgtgacactgttccctccaagcagcgaagaactccaggccaacaaggccacacttgtgtgcctgatctccgacttctaccctggggctgtgacagtggcttggaaggccgatggatctcctgtgaaagccggcgtggaaaccaccaagccatccaagcagagcaacaacaaatacgccgccagctcctacctgagcctgacacctgagcagtggaagtcccacagatcctacagctgccaagtgacccacgaaggcagcaccgtggaaaagacagtggcccctacagagtgcagcggatccctgggagagcctcagctgtgctatatcctggacgccatcctgtttctgtacggcatcgtgctgaccctgctgtactgccggctgaagatccaagtgcggaaggccgccatcaccagctacgagaaatccgacggcgtgtacaccggcctgagcaccagaaatcaagagacatacgagacactgaagcacgaaaagcctccacaaagggccaagcgatctggatctggagcaacaaacttctcactactcaaacaagcaggtgacgtggaggagaatcccgggcctactagtatggactggatttggcgcatccttttccttgtcggcgctgctaccggcgcgcattccttcgaagaagtccaacttgtggagtctggagggggcctggtgcagcccggcggctctctcagactgtcttgtgcggcaagcggctacaccttcagctcttactggatagaatgggtgaggcaggcacctggaaagggactggagtggattggagagattctgccaggagggggagatacaaattacaatgaaatcttcaaggggcgggccaccttttcagcggataccagcaagaatacagcttacctgcagatgaatagcctccgggcagaagataccgctgtttattattgcacgagacgggtgccaataagactggactattgggggcaagggactcttgtcaccgtcagttcaacgcgtatccagaaccctgatcctgccgtgtaccagctgcgggatagcaagagcagcgacaagagcgtgtgtctgttcaccgacttcgacagccagaccaacgtgtcccagagcaaggactccgacgtgtacatcaccgataagaccgtgctggacatgcggagcatggacttcaagagcaactccgccgtggcctggtccaacaagtccgatttcgcctgcgccaacgccttcaacaacagcattatccccgaggacacattcttcccaagccccgagagcagctgcggtaccatcactcaaggtttggcagtgtcaaccatctcatcattctttccacctggctaccaagtgtccttctgcctggtcatggtgctgctgttcgccgtggataccggcctgtacttcagcgtcaagaccaacatccggtccagcaccagagactggaaggaccacaagttcaagtggcggaaggaccctcaggacaagtaa

SEQ ID NO: 4797 - DNA, 2922 bp, synthetic construct
  source 1..2922: mol_type = other DNA
atggccttaccagtgaccgccttgctcctgccgctggccttgctgctccacgccgccaggccggacatccagatgacacagagccctagcagcctgtctgccagcgtgggagacagagtgaccatcacatgcaaggccagcgaccacatcaacaactggctggcctggtatcagcagaagcctggacaggcccctaagctgctgatctacggcgctaccacactggaaacaggcgtgcccagcagattttctggcagcggctctggcaccgactacaccctgacaatatccagcctccagcctgaggacttcgccacctactactgtcagcagagctggaacaccccttggacattcggccagggcaccaagctggaaatcaagagactcgaggacctgaagaacgtgttcccacctgaggtggccgtgttcgagcctagcgaggccgagatcagccacacccagaaagccaccctcgtgtgcctggctaccggcttctaccccgaccatgtggaactgtcttggtgggtcaacggcaaagaggtgcacagcggcgtgtctaccgacccccagccactgaaagaacagcccgccctgaacgacagccggtactgcctgagcagcagactgagagtgtccgccaccttctggcagaacccccggaaccacttcagatgccaggtgcagttctacggcctgagcgagaacgacgagtggacccaggacagagccaagcccgtgacccagatcgtgtctgccgaagcctggggcagagccgattgcggatcccagagcttcggcctgctggaccccaagctgtgctacctgctggatggcatcctgttcatctacggcgtgatcctgaccgccctgttcctgagagtgaagttcagcagaagcgccgacgcccctgcctaccagcagggacagaaccaactgtacaacgagctgaacctgggcagacgggaagagtacgacgtgctggacaagcggagaggcagggaccctgagatgggcggaaagccccggagaaagaacccccaggaaggactgtataacgaactccagaaagacaagatggccgaagcctacagcgagatcggcatgaagggcgagcggagaagaggcaagggccacgatggcctgtaccagggcctgagcaccgccaccaaggacacctatgacgccctgcacatgcaggccctgcctccaagaagggccaagcgatctggatctggagcaacaaacttctcactactcaaacaagcaggtgacgtggaggagaatcccgggcctactagtatggactggatttggcgcatccttttccttgtcggcgctgctaccggcgcgcattccttcgaacaagttcagcttcaacagcctggcgctgagctggtcaaacctggcgcttctgtgaagatgagctgcaaagccagcggctacgccttcagcagctactggatcaactggatgaagcagaaacccggccagggactcgaatggatcggccaaatctatcccggcgacggcgacaccaactacaacggcaagttcaagggcagagccacactgaccgccgatacctctagcagcacagcctacatgcagctgagcagcctgaccagcgaagatagcgccgtgtacttctgtgcccggtccatcacaacagtcgtgggctgcgctatggactattggggccagggaacaagcgtgaccgtgtctagtacgcgtatccagaaccctgatcctgccgtgtaccagctgcgggatagcaagagcagcgacaagagcgtgtgtctgttcaccgacttcgacagccagaccaacgtgtcccagagcaaggactccgacgtgtacatcaccgataagaccgtgctggacatgcggagcatggacttcaagagcaactccgccgtggcctggtccaacaagtccgatttcgcctgcgccaacgccttcaacaacagcattatccccgaggacacattcttcccaagccccgagagcagctgcggtacccagagttttgggttgttggaccctaaattgtgctatctgttggacggaatcctgttcatttacggagtgatcctgaccgcattgttcctgcgggttaagttttccagatccgcagacgcacccgcttaccaacaagggcagaaccaactctacaatgaacttaatttggggcggagggaagagtacgacgttctggacaaaaggaggggacgagatcccgagatgggcggaaagcctcgaaggaagaatccgcaagaggggctttataacgaactccagaaagataaaatggcagaagcctatagtgagattgggatgaagggagaaaggaggaggggtaaaggtcacgatgggttgtaccaaggattgagcacagccactaaagatacctatgatgcgctccacatgcaggccctgccgccaagacgcgccaagagaagcggatctggcgtgaagcagaccctgaatttcgacctgctgaagctggctggcgacgtggaatccaacccaggcccttctagaatggctagactggccctgtctcctgtgcctagccattggatggttgccctgctgctgctcctgtctgctgaacctgttcctgccgccagaagcgaggacagatacagaaaccccaagggcttcagcacactggcccagctgaaacagcggaacaccctgaaggacggcatcattatgatccagacactgctcatcatcctgtttattatcgtgcccatcttcctgctgctcgacaaggacgatagcaaggccggcatggaagaggaccacacctacgaaggactggacatcgaccagaccgccacatacgaggacatcgtgaccctgagaaccggcgaagtgaagtggagcgtgggagagcaccctggacaagaataa

SEQ ID NO: 4798 - DNA, 3234 bp, synthetic construct
  source 1..3234: mol_type = other DNA
atggccttaccagtgaccgccttgctcctgccgctggccttgctgctccacgccgccaggccggacatccagatgacacagagccctagcagcctgtctgccagcgtgggagacagagtgaccatcacatgcaaggccagcgaccacatcaacaactggctggcctggtatcagcagaagcctggacaggcccctaagctgctgatctacggcgctaccacactggaaacaggcgtgcccagcagattttctggcagcggctctggcaccgactacaccctgacaatatccagcctccagcctgaggacttcgccacctactactgtcagcagagctggaacaccccttggacattcggccagggcaccaagctggaaatcaagagactcgaggacctgaagaacgtgttcccacctgaggtggccgtgttcgagcctagcgaggccgagatcagccacacccagaaagccaccctcgtgtgcctggctaccggcttctaccccgaccatgtggaactgtcttggtgggtcaacggcaaagaggtgcacagcggcgtgtctaccgacccccagccactgaaagaacagcccgccctgaacgacagccggtactgcctgagcagcagactgagagtgtccgccaccttctggcagaacccccggaaccacttcagatgccaggtgcagttctacggcctgagcgagaacgacgagtggacccaggacagagccaagcccgtgacccagatcgtgtctgccgaagcctggggcagagccgattgcggatcccagagcttcggcctgctggaccccaagctgtgctacctgctggatggcatcctgttcatctacggcgtgatcctgaccgccctgttcctgagagtgaagttcagcagaagcgccgacgcccctgcctaccagcagggacagaaccaactgtacaacgagctgaacctgggcagacgggaagagtacgacgtgctggacaagcggagaggcagggaccctgagatgggcggaaagccccggagaaagaacccccaggaaggactgtataacgaactccagaaagacaagatggccgaagcctacagcgagatcggcatgaagggcgagcggagaagaggcaagggccacgatggcctgtaccagggcctgagcaccgccaccaaggacacctatgacgccctgcacatgcaggccctgcctccaagaagggccaagcgatctggatctggagcaacaaacttctcactactcaaacaagcaggtgacgtggaggagaatcccgggcctactagtatggactggatttggcgcatccttttccttgtcggcgctgctaccggcgcgcattccttcgaacaagttcagcttcaacagcctggcgctgagctggtcaaacctggcgcttctgtgaagatgagctgcaaagccagcggctacgccttcagcagctactggatcaactggatgaagcagaaacccggccagggactcgaatggatcggccaaatctatcccggcgacggcgacaccaactacaacggcaagttcaagggcagagccacactgaccgccgatacctctagcagcacagcctacatgcagctgagcagcctgaccagcgaagatagcgccgtgtacttctgtgcccggtccatcacaacagtcgtgggctgcgctatggactattggggccagggaacaagcgtgaccgtgtctagtacgcgtatccagaaccctgatcctgccgtgtaccagctgcgggatagcaagagcagcgacaagagcgtgtgtctgttcaccgacttcgacagccagaccaacgtgtcccagagcaaggactccgacgtgtacatcaccgataagaccgtgctggacatgcggagcatggacttcaagagcaactccgccgtggcctggtccaacaagtccgatttcgcctgcgccaacgccttcaacaacagcattatccccgaggacacattcttcccaagccccgagagcagctgcggtacccagagttttgggttgttggaccctaaattgtgctatctgttggacggaatcctgttcatttacggagtgatcctgaccgcattgttcctgcgggttaagttttccagatccgcagacgcacccgcttaccaacaagggcagaaccaactctacaatgaacttaatttggggcggagggaagagtacgacgttctggacaaaaggaggggacgagatcccgagatgggcggaaagcctcgaaggaagaatccgcaagaggggctttataacgaactccagaaagataaaatggcagaagcctatagtgagattgggatgaagggagaaaggaggaggggtaaaggtcacgatgggttgtaccaaggattgagcacagccactaaagatacctatgatgcgctccacatgcaggccctgccgccaagacgcgccaagagaagcggatctggcgtgaagcagaccctgaatttcgacctgctgaagctggctggcgacgtggaatccaacccaggcccttctagaatggctagactggccctgtctcctgtgcctagccattggatggttgccctgctgctgctcctgtctgctgaacctgttcctgccgccagaagcgaggacagatacagaaaccccaagggcagcgcctgctccagaatctggcaaagccccagattcattgcccggaagaggggcttcaccgtgaagatgcactgctacatgaacagcgccagcggcaacgtttcctggctgtggaagcaagagatggacgagaaccctcagcagctgaagctggaaaagggccgcatggaagagagccagaacgagtctctggccacactgaccatccagggcatcagattcgaggacaacggcatctacttttgccagcagaagtgcaacaacaccagcgaggtgtaccaaggctgtggcaccgagctgagagtgatgggctttagcacactggcccagctgaaacagcggaacaccctgaaggacggcatcattatgatccagacactgctcatcatcctgtttattatcgtgcccatcttcctgctgctcgacaaggacgatagcaaggccggcatggaagaggaccacacctacgaaggactggacatcgaccagaccgccacatacgaggacatcgtgaccctgagaaccggcgaagtgaagtggagcgtgggagagcaccctggacaagaataa

SEQ ID NO: 4799 - DNA, 3057 bp, synthetic construct
  source 1..3057: mol_type = other DNA
atggccttaccagtgaccgccttgctcctgccgctggccttgctgctccacgccgccaggccggacatccagatgacacagagccctagcagcctgtctgccagcgtgggagacagagtgaccatcacatgcaaggccagcgaccacatcaacaactggctggcctggtatcagcagaagcctggacaggcccctaagctgctgatctacggcgctaccacactggaaacaggcgtgcccagcagattttctggcagcggctctggcaccgactacaccctgacaatatccagcctccagcctgaggacttcgccacctactactgtcagcagagctggaacaccccttggacattcggccagggcaccaagctggaaatcaagagactcgaggacctgaagaacgtgttcccacctgaggtggccgtgttcgagcctagcgaggccgagatcagccacacccagaaagccaccctcgtgtgcctggctaccggcttctaccccgaccatgtggaactgtcttggtgggtcaacggcaaagaggtgcacagcggcgtgtctaccgacccccagccactgaaagaacagcccgccctgaacgacagccggtactgcctgagcagcagactgagagtgtccgccaccttctggcagaacccccggaaccacttcagatgccaggtgcagttctacggcctgagcgagaacgacgagtggacccaggacagagccaagcccgtgacccagatcgtgtctgccgaagcctggggcagagccgattgcggatcccagagcttcggcctgctggaccccaagctgtgctacctgctggatggcatcctgttcatctacggcgtgatcctgaccgccctgttcctgagagtgaagttcagcagaagcgccgacgcccctgcctaccagcagggacagaaccaactgtacaacgagctgaacctgggcagacgggaagagtacgacgtgctggacaagcggagaggcagggaccctgagatgggcggaaagccccggagaaagaacccccaggaaggactgtataacgaactccagaaagacaagatggccgaagcctacagcgagatcggcatgaagggcgagcggagaagaggcaagggccacgatggcctgtaccagggcctgagcaccgccaccaaggacacctatgacgccctgcacatgcaggccctgcctccaagaagggccaagcgatctggatctggagcaacaaacttctcactactcaaacaagcaggtgacgtggaggagaatcccgggcctactagtatggactggatttggcgcatccttttccttgtcggcgctgctaccggcgcgcattccttcgaacaagttcagcttcaacagcctggcgctgagctggtcaaacctggcgcttctgtgaagatgagctgcaaagccagcggctacgccttcagcagctactggatcaactggatgaagcagaaacccggccagggactcgaatggatcggccaaatctatcccggcgacggcgacaccaactacaacggcaagttcaagggcagagccacactgaccgccgatacctctagcagcacagcctacatgcagctgagcagcctgaccagcgaagatagcgccgtgtacttctgtgcccggtccatcacaacagtcgtgggctgcgctatggactattggggccagggaacaagcgtgaccgtgtctagtacgcgtatccagaaccctgatcctgccgtgtaccagctgcgggatagcaagagcagcgacaagagcgtgtgtctgttcaccgacttcgacagccagaccaacgtgtcccagagcaaggactccgacgtgtacatcaccgataagaccgtgctggacatgcggagcatggacttcaagagcaactccgccgtggcctggtccaacaagtccgatttcgcctgcgccaacgccttcaacaacagcattatccccgaggacacattcttcccaagccccgagagcagctgcggtacccagagttttgggttgttggaccctaaattgtgctatctgttggacggaatcctgttcatttacggagtgatcctgaccgcattgttcctgcgggttaagttttccagatccgcagacgcacccgcttaccaacaagggcagaaccaactctacaatgaacttaatttggggcggagggaagagtacgacgttctggacaaaaggaggggacgagatcccgagatgggcggaaagcctcgaaggaagaatccgcaagaggggctttataacgaactccagaaagataaaatggcagaagcctatagtgagattgggatgaagggagaaaggaggaggggtaaaggtcacgatgggttgtaccaaggattgagcacagccactaaagatacctatgatgcgctccacatgcaggccctgccgccaagacgcgccaagagaagcggatctggcgtgaagcagaccctgaatttcgacctgctgaagctggctggcgacgtggaatccaacccaggcccttctagaatggccctgcctgtgacagctctgctgctgcctctggcactgctgctgcacgccgccagacctgcaagaagtgaagatcgctacaggaaccctaaggggtcagcctgcaaaggcggcggaggaagcgaacttcctacacagggcaccttcagcaacgtgtccaccaatgtgtccccagccaagcctaccaccaccgcctgcgcacgcagcgaggacaggtataggaaccccaaaggaagtgcgtgcaagggaggcggcggatctcctgctcctagacctcctacaccagctcctacaatcgccagccagcctctgtctctcagacccgaagcctgtagacctgctgctggcggagctgtgcataccagaggactggatttcgcctgcgacatctacatctgggctcctctggctggcacatgtggcgttctgctgctgagcctggtcatcaccctgtactgcaaccaccggaacaggcggagagtgtgcaagtgccctagacctgtggtttaa

SEQ ID NO: 4800 - DNA, 1962 bp, synthetic construct
  source 1..1962: mol_type = other DNA
atggccttaccagtgaccgccttgctcctgccgctggccttgctgctccacgccgccaggccggaggttcagctgcttgagacaggcggaggactggttcaacctggcggaagcagaggactgagctgtgaaggcagcggctttaccttcagcggcttctggatgagctgggtccgacagacacctggcaagaccctggaatggatcggcgacatcaatagcgacggcagcagcatcaactacgcccctagcatcaaggacaggttcaccatcttccgggacaacgacaagagcatcctgtacctccagatgaccaacgtgcggagcgaggacaccggcacctacttttgtgtgaccacctacggcgactactggggccagggaacaaccctgacagtgtctagtgcttctctcgaggacctgaagaacgtgttcccacctgaggtggccgtgttcgagcctagcgaggccgagatcagccacacccagaaagccaccctcgtgtgcctggctaccggcttctaccccgaccatgtggaactgtcttggtgggtcaacggcaaagaggtgcacagcggcgtgtgtaccgacccccagccactgaaagaacagcccgccctgaacgacagccggtactgcctgagcagcagactgagagtgtccgccaccttctggcagaacccccggaaccacttcagatgccaggtgcagttctacggcctgagcgagaacgacgagtggacccaggacagagccaagcccgtgacccagatcgtgtctgccgaagcctggggcagagccgattgcggctttaccagcgagagctaccagcagggcgtgctgagcgccaccatcctgtacgagatcctgctgggcaaggccaccctgtacgccgtgctggtgtctgccctggtgctgatggctatggtcaagcggaaggacagccggggaagggccaagcgatctggatctggagcaacaaacttctcactactcaaacaagcaggtgacgtggaggagaatcccgggcctactagtgccaccatggactggatttggcgcatccttttccttgtcggcgctgctaccggcgcccattccgggcccgccagaagcgaggacagatacagaaaccccaaaggatccggcggcggaggatctggcggaggcggatctgggggcggaggctctttcgaagatattgtgatgacccagagccagaaattcatgagcaccagcgtgggcgacagagtgtccgtgacatgtaaagccagccagaacgtgggctctcacgtcggctggtatcagcagaagtctggacagagccccaaggcactgatctacagcgccagcaatcggtacatcggcgtgcccgatagattcaccggctctggcagcggcaccgatttcaccctgaccatcagcaacgtgcagtccgaggacctggccgagtatttctgccagcagtaccacatctacccctacacctttggaggcggcacccggctggaaatcaagagaacagtggctgccacgcgtatccagaaccctgatcctgccgtgtaccagctgcgggatagcaagagcagcgacaagagcgtgtgtctgttcaccgacttcgacagccagaccaacgtgtcccagagcaaggactccgacgtgtacatcaccgataagtgcgtgctggacatgcggagcatggacttcaagagcaactccgccgtggcctggtccaacaagtccgatttcgcctgcgccaacgccttcaacaacagcattatccccgaggacacattcttcccaagccccgagagcagctgcgacgtgaagctggtggaaaagagcttcgagacagacaccaacctgaacttccagaacctgagcgtgatcggcttcagaatcctgctgctgaaagtggccggctttaacctgctgatgaccctgcggctgtggtccagctaa

SEQ ID NO: 4801 - DNA, 2523 bp, synthetic construct
  source 1..2523: mol_type = other DNA
atggccttaccagtgaccgccttgctcctgccgctggccttgctgctccacgccgccaggccgagctacgtgctgacacagcctccatccgtgtctgtggctccaggacagaccgccagaatcacatgcggcggcaacaacatcggcagcaagagcgtgcactggtatcagcagccacctggacaggctccagtggtggtggtgtacgacgacagcgatagacctagcggcatccccgagagattcagcggcagcaattccggcaataccgccacactgaccatcagcagagtggaagctggcgacgaggccgtgtactactgccaagtgtgggacagcagcagcgatcacgtggtgtttggcggcggaacaaagctgacagtgcttctcgaggctagaagcgaagatcggtatcggaaccccaaggaggacctgaagaacgtgttcccacctgaggtggccgtgttcgagcctagcgaggccgagatcagccacacccagaaagccaccctcgtgtgcctggctaccggcttctaccccgaccatgtggaactgtcttggtgggtcaacggcaaagaggtgcacagcggcgtgtctaccgacccccagccactgaaagaacagcccgccctgaacgacagccggtactgcctgagcagcagactgagagtgtccgccaccttctggcagaacccccggaaccacttcagatgccaggtgcagttctacggcctgagcgagaacgacgagtggacccaggacagagccaagcccgtgacccagatcgtgtctgccgaagcctggggcagagccgattgcggatcccagagcttcggcctgctggaccccaagctgtgctacctgctggatggcatcctgttcatctacggcgtgatcctgaccgccctgttcctgagagtgaagttcagcagaagcgccgacgcccctgcctaccagcagggacagaaccaactgtacaacgagctgaacctgggcagacgggaagagtacgacgtgctggacaagcggagaggcagggaccctgagatgggcggaaagccccggagaaagaacccccaggaaggactgtataacgaactccagaaagacaagatggccgaagcctacagcgagatcggcatgaagggcgagcggagaagaggcaagggccacgatggcctgtaccagggcctgagcaccgccaccaaggacacctatgacgccctgcacatgcaggccctgcctccaagaagggccaagcgatctggatctggagcaacaaacttctcactactcaaacaagcaggtgacgtggaggagaatcccgggcctactagtatggactggatttggcgcatccttttccttgtcggcgctgctaccggcgcgcattccttcgaacaactccagctgcaagagtctggccctggcctggtcaagcctagcgaaacactgagcctgacctgtaccgtgtctggcggctctatcagctccggcagctatttctggggctggatcagacaacctcctggcaaaggactggaatggatcggctccatctactacagcggcatcacctactacaaccccagcctgaagtccagagtgaccatctccgtggacaccagcaagaaccagttctccctgaagctgagcagcgtgacagccgccgataccgccgtgtattattgtgccagacatgacggcgctgtggccggcctgtttgattattggggacagggcaccctggtcaccgtgtcatctgctacgcgtgccagaagcgaggacagatacagaaaccccaaaatccagaaccctgatcctgccgtgtaccagctgcgggatagcaagagcagcgacaagagcgtgtgtctgttcaccgacttcgacagccagaccaacgtgtcccagagcaaggactccgacgtgtacatcaccgataagaccgtgctggacatgcggagcatggacttcaagagcaactccgccgtggcctggtccaacaagtccgatttcgcctgcgccaacgccttcaacaacagcattatccccgaggacacattcttcccaagccccgagagcagctgcggtacccagagttttgggttgttggaccctaaattgtgctatctgttggacggaatcctgttcatttacggagtgatcctgaccgcattgttcctgcgggttaagttttccagatccgcagacgcacccgcttaccaacaagggcagaaccaactctacaatgaacttaatttggggcggagggaagagtacgacgttctggacaaaaggaggggacgagatcccgagatgggcggaaagcctcgaaggaagaatccgcaagaggggctttataacgaactccagaaagataaaatggcagaagcctatagtgagattgggatgaagggagaaaggaggaggggtaaaggtcacgatgggttgtaccaaggattgagcacagccactaaagatacctatgatgcgctccacatgcaggccctgccgccaagataa

SEQ ID NO: 4802 - DNA, 1938 bp, synthetic construct
  source 1..1938: mol_type = other DNA
atggccttaccagtgaccgccttgctcctgccgctggccttgctgctccacgccgccaggccggacatccagatgacacagagccctagcagcctgtctgccagcgtgggagacagagtgaccatcacatgcaaggccagcgaccacatcaacaactggctggcctggtatcagcagaagcctggacaggcccctaagctgctgatctacggcgctaccacactggaaacaggcgtgcccagcagattttctggcagcggctctggcaccgactacaccctgacaatatccagcctccagcctgaggacttcgccacctactactgtcagcagagctggaacaccccttggacattcggccagggcaccaagctggaaatcaagagactcgaggctagaagcgaagatcggtatcggaaccccaaggaggacctgaagaacgtgttcccacctgaggtggccgtgttcgagcctagcgaggccgagatcagccacacccagaaagccaccctcgtgtgcctggctaccggcttctaccccgaccatgtggaactgtcttggtgggtcaacggcaaagaggtgcacagcggcgtgtgtaccgacccccagccactgaaagaacagcccgccctgaacgacagccggtactgcctgagcagcagactgagagtgtccgccaccttctggcagaacccccggaaccacttcagatgccaggtgcagttctacggcctgagcgagaacgacgagtggacccaggacagagccaagcccgtgacccagatcgtgtctgccgaagcctggggcagagccgattgcggctttaccagcgagagctaccagcagggcgtgctgagcgccaccatcctgtacgagatcctgctgggcaaggccaccctgtacgccgtgctggtgtctgccctggtgctgatggctatggtcaagcggaaggacagccggggaagggccaagcgatctggatctggagcaacaaacttctcactactcaaacaagcaggtgacgtggaggagaatcccgggcctactagtatggactggatttggcgcatccttttccttgtcggcgctgctaccggcgcgcattccttcgaacaagttcagcttcaacagcctggcgctgagctggtcaaacctggcgcttctgtgaagatgagctgcaaagccagcggctacgccttcagcagctactggatcaactggatgaagcagaaacccggccagggactcgaatggatcggccaaatctatcccggcgacggcgacaccaactacaacggcaagttcaagggcagagccacactgaccgccgatacctctagcagcacagcctacatgcagctgagcagcctgaccagcgaagatagcgccgtgtacttctgtgcccggtccatcacaacagtcgtgggctgcgctatggactattggggccagggaacaagcgtgaccgtgtctagtacgcgtgccagaagcgaggacagatacagaaaccccaaaatccagaaccctgatcctgccgtgtaccagctgcgggatagcaagagcagcgacaagagcgtgtgtctgttcaccgacttcgacagccagaccaacgtgtcccagagcaaggactccgacgtgtacatcaccgataagtgcgtgctggacatgcggagcatggacttcaagagcaactccgccgtggcctggtccaacaagtccgatttcgcctgcgccaacgccttcaacaacagcattatccccgaggacacattcttcccaagccccgagagcagctgcgacgtgaagctggtggaaaagagcttcgagacagacaccaacctgaacttccagaacctgagcgtgatcggcttcagaatcctgctgctgaaagtggccggctttaacctgctgatgaccctgcggctgtggtccagctaa

SEQ ID NO: 4803 - DNA, 3084 bp, synthetic construct
  source 1..3084: mol_type = other DNA
atggccttaccagtgaccgccttgctcctgccgctggccttgctgctccacgccgccaggccggcatgcgaagtgcagctgcttgaaagtggcggcggactgattcagcctggcggatctctgagactgagctgtgccgccagcggcttcaccttttctagccacgccatgacctgggtccgacaggcacctggaaaagggcttgaatgggtgtccgccatcagcggctctggcgattacacacactacgccgacagcgtgaagggcagattcaccatcagcagagacaacagcaagaacaccgtgtacctccagatgaacagcctgagagccgaggacagcgccgtgtattattgcgccaaggatgaggatggcggcagcctgcttggacacagaggacaaggcaccctggtcaccgtttcttccggtaccggcggaggcggatctggcggcggaggtagcggtggcggaggatctgaattcgacatccagatgacacagagccctagcagcctgtctgccagcgtgggagacagagtgaccatcacatgcaaggccagcgaccacatcaacaactggctggcctggtatcagcagaagcctggacaggcccctaagctgctgatctacggcgctaccacactggaaacaggcgtgcccagcagattttctggcagcggctctggcaccgactacaccctgacaatatccagcctccagcctgaggacttcgccacctactactgtcagcagagctggaacaccccttggacattcggccagggcaccaagctggaaatcaagagactcgaggacctgaagaacgtgttcccacctgaggtggccgtgttcgagcctagcgaggccgagatcagccacacccagaaagccaccctcgtgtgcctggctaccggcttctaccccgaccatgtggaactgtcttggtgggtcaacggcaaagaggtgcacagcggcgtgtgtaccgacccccagccactgaaagaacagcccgccctgaacgacagccggtactgcctgagcagcagactgagagtgtccgccaccttctggcagaacccccggaaccacttcagatgccaggtgcagttctacggcctgagcgagaacgacgagtggacccaggacagagccaagcccgtgacccagatcgtgtctgccgaagcctggggcagagccgattgcggctttaccagcgagagctaccagcagggcgtgctgagcgccaccatcctgtacgagatcctgctgggcaaggccaccctgtacgccgtgctggtgtctgccctggtgctgatggctatggtcaagcggaaggacagccggggaagggccaagcgatctggatctggagcaacaaacttctcactactcaaacaagcaggtgacgtggaggagaatcccgggcctactagtgccaccatggactggatttggcgcatccttttccttgtcggcgctgctaccggcgcccattccgggcccgccagaagcgaggacagatacagaaaccccaaaggatccggcggcggaggatctggcggaggcggatctgggggcggaggctctttcgaacaagttcagcttcaacagcctggcgctgagctggtcaaacctggcgcttctgtgaagatgagctgcaaagccagcggctacgccttcagcagctactggatcaactggatgaagcagaaacccggccagggactcgaatggatcggccaaatctatcccggcgacggcgacaccaactacaacggcaagttcaagggcagagccacactgaccgccgatacctctagcagcacagcctacatgcagctgagcagcctgaccagcgaagatagcgccgtgtacttctgtgcccggtccatcacaacagtcgtgggctgcgctatggactattggggccagggaacaagcgtgaccgtgtctagtacgcgtatccagaaccctgatcctgccgtgtaccagctgcgggatagcaagagcagcgacaagagcgtgtgtctgttcaccgacttcgacagccagaccaacgtgtcccagagcaaggactccgacgtgtacatcaccgataagtgcgtgctggacatgcggagcatggacttcaagagcaactccgccgtggcctggtccaacaagtccgatttcgcctgcgccaacgccttcaacaacagcattatccccgaggacacattcttcccaagccccgagagcagctgcgacgtgaagctggtggaaaagagcttcgagacagacaccaacctgaacttccagaacctgagcgtgatcggcttcagaatcctgctgctgaaagtggccggctttaacctgctgatgaccctgcggctgtggtccagccgcgccaagagaagcggatctggcgtgaagcagaccctgaatttcgacctgctgaagctggctggcgacgtggaatccaacccaggcccttctagaggccatatgaccgagtacaagcccacggtgcgcctcgccacccgcgacgacgtccccagggccgtacgcaccctcgccgccgcgttcgccgactaccccgccacgcgccacaccgtcgatccggaccgccacatcgagcgggtcaccgagctgcaagaactcttcctcacgcgcgtcgggctcgacatcggcaaggtgtgggtcgcggacgacggcgccgcggtggcggtctggaccacgccggagagcgtcgaagcgggggcggtgttcgccgagatcggcccgcgcatggccgagttgagcggttcccggctggccgcgcagcaacagatggaaggcctcctggcgccgcaccggcccaaggagcccgcgtggttcctggccaccgtcggcgtctcgcccgaccaccagggcaagggtctgggcagcgccgtcgtgctccccggagtggaggcggccgagcgcgccggggtgcccgccttcctggagacctccgcgccccgcaacctccccttctacgagcggctcggcttcaccgtcaccgccgacgtcgaggtgcccgaaggaccgcgcacctggtgcatgacccgcaagcccggtgcctga

SEQ ID NO: 4804 - DNA, 2796 bp, synthetic construct
  source 1..2796: mol_type = other DNA
atggccttaccagtgaccgccttgctcctgccgctggccttgctgctccacgccgccaggccggacatccagatgacacagagccctagcagcctgtctgccagcgtgggagacagagtgaccatcacatgcaaggccagcgaccacatcaacaactggctggcctggtatcagcagaagcctggacaggcccctaagctgctgatctacggcgctaccacactggaaacaggcgtgcccagcagattttctggcagcggctctggcaccgactacaccctgacaatatccagcctccagcctgaggacttcgccacctactactgtcagcagagctggaacaccccttggacattcggccagggcaccaagctggaaatcaagagactcgaggacctgaagaacgtgttcccacctgaggtggccgtgttcgagcctagcgaggccgagatcagccacacccagaaagccaccctcgtgtgcctggctaccggcttctaccccgaccatgtggaactgtcttggtgggtcaacggcaaagaggtgcacagcggcgtgtgtaccgacccccagccactgaaagaacagcccgccctgaacgacagccggtactgcctgagcagcagactgagagtgtccgccaccttctggcagaacccccggaaccacttcagatgccaggtgcagttctacggcctgagcgagaacgacgagtggacccaggacagagccaagcccgtgacccagatcgtgtctgccgaagcctggggcagagccgattgcggctttaccagcgagagctaccagcagggcgtgctgagcgccaccatcctgtacgagatcctgctgggcaaggccaccctgtacgccgtgctggtgtctgccctggtgctgatggctatggtcaagcggaaggacagccggggaagggccaagcgatctggatctggagcaacaaacttctcactactcaaacaagcaggtgacgtggaggagaatcccgggcctactagtgccaccatggccctgcctgtgacagctctgctgctgcctctggcactgctgctgcacgccgccagacctgcaagaagtgaagatcgctacaggaaccctaaggggtcagcctgcaaaggcggcggaggaagcgaacttcctacacagggcaccttcagcaacgtgtccaccaatgtgtccccagccaagcctaccaccaccgcctgcgcacgcagcgaggacaggtataggaaccccaaaggaagtgcgtgctctggatccggtccattgggtattgctgggattttcgaacaagttcagcttcaacagcctggcgctgagctggtcaaacctggcgcttctgtgaagatgagctgcaaagccagcggctacgccttcagcagctactggatcaactggatgaagcagaaacccggccagggactcgaatggatcggccaaatctatcccggcgacggcgacaccaactacaacggcaagttcaagggcagagccacactgaccgccgatacctctagcagcacagcctacatgcagctgagcagcctgaccagcgaagatagcgccgtgtacttctgtgcccggtccatcacaacagtcgtgggctgcgctatggactattggggccagggaacaagcgtgaccgtgtctagtacgcgtatccagaaccctgatcctgccgtgtaccagctgcgggatagcaagagcagcgacaagagcgtgtgtctgttcaccgacttcgacagccagaccaacgtgtcccagagcaaggactccgacgtgtacatcaccgataagtgcgtgctggacatgcggagcatggacttcaagagcaactccgccgtggcctggtccaacaagtccgatttcgcctgcgccaacgccttcaacaacagcattatccccgaggacacattcttcccaagccccgagagcagctgcgacgtgaagctggtggaaaagagcttcgagacagacaccaacctgaacttccagaacctgagcgtgatcggcttcagaatcctgctgctgaaagtggccggctttaacctgctgatgaccctgcggctgtggtccagccgcgccaagagaagcggatctggcgtgaagcagaccctgaatttcgacctgctgaagctggctggcgacgtggaatccaacccaggcccttctagaggccatatgaccgagtacaagcccacggtgcgcctcgccacccgcgacgacgtccccagggccgtacgcaccctcgccgccgcgttcgccgactaccccgccacgcgccacaccgtcgatccggaccgccacatcgagcgggtcaccgagctgcaagaactcttcctcacgcgcgtcgggctcgacatcggcaaggtgtgggtcgcggacgacggcgccgcggtggcggtctggaccacgccggagagcgtcgaagcgggggcggtgttcgccgagatcggcccgcgcatggccgagttgagcggttcccggctggccgcgcagcaacagatggaaggcctcctggcgccgcaccggcccaaggagcccgcgtggttcctggccaccgtcggcgtctcgcccgaccaccagggcaagggtctgggcagcgccgtcgtgctccccggagtggaggcggccgagcgcgccggggtgcccgccttcctggagacctccgcgccccgcaacctccccttctacgagcggctcggcttcaccgtcaccgccgacgtcgaggtgcccgaaggaccgcgcacctggtgcatgacccgcaagcccggtgcctga

SEQ ID NO: 4805 - DNA, 2664 bp, synthetic construct; identical to SEQ ID NO: 4761
  source 1..2664: mol_type = other DNA

SEQ ID NO: 4806 - DNA, 2997 bp, synthetic construct
  source 1..2997: mol_type = other DNA
atggccttaccagtgaccgccttgctcctgccgctggccttgctgctccacgccgccaggccggacatccagatgacacagagccctagcagcctgtctgccagcgtgggagacagagtgaccatcacatgcaaggccagcgaccacatcaacaactggctggcctggtatcagcagaagcctggacaggcccctaagctgctgatctacggcgctaccacactggaaacaggcgtgcccagcagattttctggcagcggctctggcaccgactacaccctgacaatatccagcctccagcctgaggacttcgccacctactactgtcagcagagctggaacaccccttggacattcggccagggcaccaagctggaaatcaagagactcgaggacctgaagaacgtgttcccacctgaggtggccgtgttcgagcctagcgaggccgagatcagccacacccagaaagccaccctcgtgtgcctggctaccggcttctaccccgaccatgtggaactgtcttggtgggtcaacggcaaagaggtgcacagcggcgtgtgtaccgacccccagccactgaaagaacagcccgccctgaacgacagccggtactgcctgagcagcagactgagagtgtccgccaccttctggcagaacccccggaaccacttcagatgccaggtgcagttctacggcctgagcgagaacgacgagtggacccaggacagagccaagcccgtgacccagatcgtgtctgccgaagcctggggcagagccgattgcggctttaccagcgagagctaccagcagggcgtgctgagcgccaccatcctgtacgagatcctgctgggcaaggccaccctgtacgccgtgctggtgtctgccctggtgctgatggctatggtcaagcggaaggacagccggggaagggccaagcgatctggatctggagcaacaaacttctcactactcaaacaagcaggtgacgtggaggagaatcccgggcctactagtgccaccatggactggatttggcgcatccttttccttgtcggcgctgctaccggcgcccattccgggccccaggttcagctgcaagagtctggccctggcctggtcaagcctagccaaacactgagcctgacctgtaccgtgtctggcggctctatcaccaccggcgagttctactggaactggttcagacagcctcctggcaaaggactggaatggatgggagccattgccgccagcggcagcacaacatacagccctagcttcgagagccggaccagcatcagcagagacaccagcaagaatcagttcagcctgaagctgagcagcgtgacagccgccgatacagccgtgtattactgcggcagatcctttggagtggccgccgtgacaaccggccagaatagaggacagggcaccctggtcacagtgtctagcggatccggcggcggaggatctggcggaggcggatctgggggcggaggctctttcgaacaagttcagcttcaacagcctggcgctgagctggtcaaacctggcgcttctgtgaagatgagctgcaaagccagcggctacgccttcagcagctactggatcaactggatgaagcagaaacccggccagggactcgaatggatcggccaaatctatcccggcgacggcgacaccaactacaacggcaagttcaagggcagagccacactgaccgccgatacctctagcagcacagcctacatgcagctgagcagcctgaccagcgaagatagcgccgtgtacttctgtgcccggtccatcacaacagtcgtgggctgcgctatggactattggggccagggaacaagcgtgaccgtgtctagtacgcgtatccagaaccctgatcctgccgtgtaccagctgcgggatagcaagagcagcgacaagagcgtgtgtctgttcaccgacttcgacagccagaccaacgtgtcccagagcaaggactccgacgtgtacatcaccgataagtgcgtgctggacatgcggagcatggacttcaagagcaactccgccgtggcctggtccaacaagtccgatttcgcctgcgccaacgccttcaacaacagcattatccccgaggacacattcttcccaagccccgagagcagctgcgacgtgaagctggtggaaaagagcttcgagacagacaccaacctgaacttccagaacctgagcgtgatcggcttcagaatcctgctgctgaaagtggccggctttaacctgctgatgaccctgcggctgtggtccagccgcgccaagagaagcggatctggcgtgaagcagaccctgaatttcgacctgctgaagctggctggcgacgtggaatccaacccaggcccttctagaggccatatgaccgagtacaagcccacggtgcgcctcgccacccgcgacgacgtccccagggccgtacgcaccctcgccgccgcgttcgccgactaccccgccacgcgccacaccgtcgatccggaccgccacatcgagcgggtcaccgagctgcaagaactcttcctcacgcgcgtcgggctcgacatcggcaaggtgtgggtcgcggacgacggcgccgcggtggcggtctggaccacgccggagagcgtcgaagcgggggcggtgttcgccgagatcggcccgcgcatggccgagttgagcggttcccggctggccgcgcagcaacagatggaaggcctcctggcgccgcaccggcccaaggagcccgcgtggttcctggccaccgtcggcgtctcgcccgaccaccagggcaagggtctgggcagcgccgtcgtgctccccggagtggaggcggccgagcgcgccggggtgcccgccttcctggagacctccgcgccccgcaacctccccttctacgagcggctcggcttcaccgtcaccgccgacgtcgaggtgcccgaaggaccgcgcacctggtgcatgacccgcaagcccggtgcctga

SEQ ID NO: 4807 - DNA, 2610 bp, synthetic construct
  source 1..2610: mol_type = other DNA
atggccttaccagtgaccgccttgctcctgccgctggccttgctgctccacgccgccaggccggacatccagatgacacagagccctagcagcctgtctgccagcgtgggagacagagtgaccatcacatgcaaggccagcgaccacatcaacaactggctggcctggtatcagcagaagcctggacaggcccctaagctgctgatctacggcgctaccacactggaaacaggcgtgcccagcagattttctggcagcggctctggcaccgactacaccctgacaatatccagcctccagcctgaggacttcgccacctactactgtcagcagagctggaacaccccttggacattcggccagggcaccaagctggaaatcaagagactcgaggacctgaagaacgtgttcccacctgaggtggccgtgttcgagcctagcgaggccgagatcagccacacccagaaagccaccctcgtgtgcctggctaccggcttctaccccgaccatgtggaactgtcttggtgggtcaacggcaaagaggtgcacagcggcgtgtctaccgacccccagccactgaaagaacagcccgccctgaacgacagccggtactgcctgagcagcagactgagagtgtccgccaccttctggcagaacccccggaaccacttcagatgccaggtgcagttctacggcctgagcgagaacgacgagtggacccaggacagagccaagcccgtgacccagatcgtgtctgccgaagcctggggcagagccgattgcggctttaccagcgagagctaccagcagggcgtgctgagcgcctactacatgtacttgttgctgctgctgaagtccgtggtgtacttcgccatcatcacatgctgcctgctgcggagaaccgccttctgctgcaacggcgagaagtctagggccaagcgatctggatctggagcaacaaacttctcactactcaaacaagcaggtgacgtggaggagaatcccgggcctactagtgccaccatggactggatttggcgcatccttttccttgtcggcgctgctaccggcgcccattccgccagaagcgaggacagatacagaaaccccaaattcgaacaagttcagcttcaacagcctggcgctgagctggtcaaacctggcgcttctgtgaagatgagctgcaaagccagcggctacgccttcagcagctactggatcaactggatgaagcagaaacccggccagggactcgaatggatcggccaaatctatcccggcgacggcgacaccaactacaacggcaagttcaagggcagagccacactgaccgccgatacctctagcagcacagcctacatgcagctgagcagcctgaccagcgaagatagcgccgtgtacttctgtgcccggtccatcacaacagtcgtgggctgcgctatggactattggggccagggaacaagcgtgaccgtgtctagtacgcgtatccagaaccctgatcctgccgtgtaccagctgcgggatagcaagagcagcgacaagagcgtgtgtctgttcaccgacttcgacagccagaccaacgtgtcccagagcaaggactccgacgtgtacatcaccgataagtgcgtgctggacatgcggagcatggacttcaagagcaactccgccgtggcctggtccaacaagtccgatttcgcctgcgccaacgccttcaacaacagcattatccccgaggacacattcttcccaagccccgagagcagctgcgacgtgaagctggtggaaaagagcttcgagacagacaccaacctgaacttccagaacctgagcgtgatcggcttcagaatcctgctgctgaaagtggccggctttaacctgctgatgaccctgcggctgtggtccagccgcgccaagagaagcggatctggcgtgaagcagaccctgaatttcgacctgctgaagctggctggcgacgtggaatccaacccaggcccttctagaggccatatgaccgagtacaagcccacggtgcgcctcgccacccgcgacgacgtccccagggccgtacgcaccctcgccgccgcgttcgccgactaccccgccacgcgccacaccgtcgatccggaccgccacatcgagcgggtcaccgagctgcaagaactcttcctcacgcgcgtcgggctcgacatcggcaaggtgtgggtcgcggacgacggcgccgcggtggcggtctggaccacgccggagagcgtcgaagcgggggcggtgttcgccgagatcggcccgcgcatggccgagttgagcggttcccggctggccgcgcagcaacagatggaaggcctcctggcgccgcaccggcccaaggagcccgcgtggttcctggccaccgtcggcgtctcgcccgaccaccagggcaagggtctgggcagcgccgtcgtgctccccggagtggaggcggccgagcgcgccggggtgcccgccttcctggagacctccgcgccccgcaacctccccttctacgagcggctcggcttcaccgtcaccgccgacgtcgaggtgcccgaaggaccgcgcacctggtgcatgacccgcaagcccggtgcctga

SEQ ID NO: 4808 - DNA, 2694 bp, synthetic construct
  source 1..2694: mol_type = other DNA
atggccttaccagtgaccgccttgctcctgccgctggccttgctgctccacgccgccaggccggacatccagatgacacagagccctagcagcctgtctgccagcgtgggagacagagtgaccatcacatgcaaggccagcgaccacatcaacaactggctggcctggtatcagcagaagcctggacaggcccctaagctgctgatctacggcgctaccacactggaaacaggcgtgcccagcagattttctggcagcggctctggcaccgactacaccctgacaatatccagcctccagcctgaggacttcgccacctactactgtcagcagagctggaacaccccttggacattcggccagggcaccaagctggaaatcaagagactcgagggacagcctaaggccaatcctaccgtgacactgttccctccaagcagcgaagaactccaggccaacaaggccacacttgtgtgcctgatctccgacttctaccctggggctgtgacagtggcttggaaggccgatggatctcctgtgaaagccggcgtggaaaccaccaagccatccaagcagagcaacaacaaatacgccgccagctcctacctgagcctgacacctgagcagtggaagtcccacagatcctacagctgccaagtgacccacgaaggcagcaccgtggaaaagacagtggcccctacagagtgcagcggatcccccatcaagaccgatgtgattacaatggaccccaaggacaactgctccaaggacgccaacgataccctgctgctccagctgaccaacaccagcgccaccatcctgtacgagatcctgctgggcaaggccaccctgtacgccgtgctggtgtctgccctggtgctgatggctatggtcaagcggaaggacagccggggaagggccaagcgatctggatctggagcaacaaacttctcactactcaaacaagcaggtgacgtggaggagaatcccgggcctactagtgccaccatggactggatttggcgcatccttttccttgtcggcgctgctaccggcgcccattccgccagaagcgaggacagatacagaaaccccaaattcgaacaagttcagcttcaacagcctggcgctgagctggtcaaacctggcgcttctgtgaagatgagctgcaaagccagcggctacgccttcagcagctactggatcaactggatgaagcagaaacccggccagggactcgaatggatcggccaaatctatcccggcgacggcgacaccaactacaacggcaagttcaagggcagagccacactgaccgccgatacctctagcagcacagcctacatgcagctgagcagcctgaccagcgaagatagcgccgtgtacttctgtgcccggtccatcacaacagtcgtgggctgcgctatggactattggggccagggaacaagcgtgaccgtgtctagtacgcgtgcctctacaaagggaccctccgtgtttcctctggctcccagcagcaagtctacaagcggaggaacagccgctctgggctgcctggtcaaggattactttcccgagcctgtgaccgtgtcctggaatagcggagcactgacaagcggcgtgcacacctttccagccgtgctgcaaagcagcggcctgtactctctgagcagcgtggtcacagtgcctagctctagcctgggcacccagacctacatctgcaatgtgaaccacaagcctagcaacaccaaggtggacaagagagtggaacccaagagctgtggtaccgaagtgaaaaccgactccaccgaccacgtgaagcccaaagagacagagaacaccaagcagcccagcaagagctgccacaagcccaaggccatcgtgcacaccgagaaagtgaacatgatgagcctgaccgtgctgggcttcagaatcctgctgctgaaagtggccggctttaacctgctgatgaccctgcggctgtggtccagccgcgccaagagaagcggatctggcgtgaagcagaccctgaatttcgacctgctgaagctggctggcgacgtggaatccaacccaggcccttctagaggccatatgaccgagtacaagcccacggtgcgcctcgccacccgcgacgacgtccccagggccgtacgcaccctcgccgccgcgttcgccgactaccccgccacgcgccacaccgtcgatccggaccgccacatcgagcgggtcaccgagctgcaagaactcttcctcacgcgcgtcgggctcgacatcggcaaggtgtgggtcgcggacgacggcgccgcggtggcggtctggaccacgccggagagcgtcgaagcgggggcggtgttcgccgagatcggcccgcgcatggccgagttgagcggttcccggctggccgcgcagcaacagatggaaggcctcctggcgccgcaccggcccaaggagcccgcgtggttcctggccaccgtcggcgtctcgcccgaccaccagggcaagggtctgggcagcgccgtcgtgctccccggagtggaggcggccgagcgcgccggggtgcccgccttcctggagacctccgcgccccgcaacctccccttctacgagcggctcggcttcaccgtcaccgccgacgtcgaggtgcccgaaggaccgcgcacctggtgcatgacccgcaagcccggtgcctga

SEQ ID NO: 4809 - DNA, 2667 bp, synthetic construct
  source 1..2667: mol_type = other DNA
atggccttaccagtgaccgccttgctcctgccgctggccttgctgctccacgccgccaggccggacatccagatgacacagagccctagcagcctgtctgccagcgtgggagacagagtgaccatcacatgcaaggccagcgaccacatcaacaactggctggcctggtatcagcagaagcctggacaggcccctaagctgctgatctacggcgctaccacactggaaacaggcgtgcccagcagattttctggcagcggctctggcaccgactacaccctgacaatatccagcctccagcctgaggacttcgccacctactactgtcagcagagctggaacaccccttggacattcggccagggcaccaagctggaaatcaagagactcgaggacctgaagaacgtgttcccacctgaggtggccgtgttcgagcctagcgaggccgagatcagccacacccagaaagccaccctcgtgtgcctggctaccggcttctaccccgaccatgtggaactgtcttggtgggtcaacggcaaagaggtgcacagcggcgtgtctaccgacccccagccactgaaagaacagcccgccctgaacgacagccggtactgcctgagcagcagactgagagtgtccgccaccttctggcagaacccccggaaccacttcagatgccaggtgcagttctacggcctgagcgagaacgacgagtggacccaggacagagccaagcccgtgacccagatcgtgtctgccgaagcctggggcagagccgattgcggctttaccagcgagagctaccagcagggcgtgctgagcgcctactacatgtacttgttgctgctgctgaagtccgtggtgtacttcgccatcatcacatgctgcctgctgcggagaaccgccttctgctgcaacggcgagaagtctagggccaagcgatctggatctggagcaacaaacttctcactactcaaacaagcaggtgacgtggaggagaatcccgggcctactagtgccaccatggactggatttggcgcatccttttccttgtcggcgctgctaccggcgcccattccgggcccgccagaagcgaggacagatacagaaaccccaaaggatccggcggcggaggatctggcggaggcggatctgggggcggaggctctttcgaacaagttcagcttcaacagcctggcgctgagctggtcaaacctggcgcttctgtgaagatgagctgcaaagccagcggctacgccttcagcagctactggatcaactggatgaagcagaaacccggccagggactcgaatggatcggccaaatctatcccggcgacggcgacaccaactacaacggcaagttcaagggcagagccacactgaccgccgatacctctagcagcacagcctacatgcagctgagcagcctgaccagcgaagatagcgccgtgtacttctgtgcccggtccatcacaacagtcgtgggctgcgctatggactattggggccagggaacaagcgtgaccgtgtctagtacgcgtatccagaaccctgatcctgccgtgtaccagctgcgggatagcaagagcagcgacaagagcgtgtgtctgttcaccgacttcgacagccagaccaacgtgtcccagagcaaggactccgacgtgtacatcaccgataagtgcgtgctggacatgcggagcatggacttcaagagcaactccgccgtggcctggtccaacaagtccgatttcgcctgcgccaacgccttcaacaacagcattatccccgaggacacattcttcccaagccccgagagcagctgcgacgtgaagctggtggaaaagagcttcgagacagacaccaacctgaacttccagaacctgagcgtgatcggcttcagaatcctgctgctgaaagtggccggctttaacctgctgatgaccctgcggctgtggtccagccgcgccaagagaagcggatctggcgtgaagcagaccctgaatttcgacctgctgaagctggctggcgacgtggaatccaacccaggcccttctagaggccatatgaccgagtacaagcccacggtgcgcctcgccacccgcgacgacgtccccagggccgtacgcaccctcgccgccgcgttcgccgactaccccgccacgcgccacaccgtcgatccggaccgccacatcgagcgggtcaccgagctgcaagaactcttcctcacgcgcgtcgggctcgacatcggcaaggtgtgggtcgcggacgacggcgccgcggtggcggtctggaccacgccggagagcgtcgaagcgggggcggtgttcgccgagatcggcccgcgcatggccgagttgagcggttcccggctggccgcgcagcaacagatggaaggcctcctggcgccgcaccggcccaaggagcccgcgtggttcctggccaccgtcggcgtctcgcccgaccaccagggcaagggtctgggcagcgccgtcgtgctccccggagtggaggcggccgagcgcgccggggtgcccgccttcctggagacctccgcgccccgcaacctccccttctacgagcggctcggcttcaccgtcaccgccgacgtcgaggtgcccgaaggaccgcgcacctggtgcatgacccgcaagcccggtgcctga

SEQ ID NO: 4810 - DNA, 2751 bp, synthetic construct
  source 1..2751: mol_type = other DNA
atggccttaccagtgaccgccttgctcctgccgctggccttgctgctccacgccgccaggccggacatccagatgacacagagccctagcagcctgtctgccagcgtgggagacagagtgaccatcacatgcaaggccagcgaccacatcaacaactggctggcctggtatcagcagaagcctggacaggcccctaagctgctgatctacggcgctaccacactggaaacaggcgtgcccagcagattttctggcagcggctctggcaccgactacaccctgacaatatccagcctccagcctgaggacttcgccacctactactgtcagcagagctggaacaccccttggacattcggccagggcaccaagctggaaatcaagagactcgagggacagcctaaggccaatcctaccgtgacactgttccctccaagcagcgaagaactccaggccaacaaggccacacttgtgtgcctgatctccgacttctaccctggggctgtgacagtggcttggaaggccgatggatctcctgtgaaagccggcgtggaaaccaccaagccatccaagcagagcaacaacaaatacgccgccagctcctacctgagcctgacacctgagcagtggaagtcccacagatcctacagctgccaagtgacccacgaaggcagcaccgtggaaaagacagtggcccctacagagtgcagcggatcccccatcaagaccgatgtgattacaatggaccccaaggacaactgctccaaggacgccaacgataccctgctgctccagctgaccaacaccagcgccaccatcctgtacgagatcctgctgggcaaggccaccctgtacgccgtgctggtgtctgccctggtgctgatggctatggtcaagcggaaggacagccggggaagggccaagcgatctggatctggagcaacaaacttctcactactcaaacaagcaggtgacgtggaggagaatcccgggcctactagtgccaccatggactggatttggcgcatccttttccttgtcggcgctgctaccggcgcccattccgggcccgccagaagcgaggacagatacagaaaccccaaaggatccggcggcggaggatctggcggaggcggatctgggggcggaggctctttcgaacaagttcagcttcaacagcctggcgctgagctggtcaaacctggcgcttctgtgaagatgagctgcaaagccagcggctacgccttcagcagctactggatcaactggatgaagcagaaacccggccagggactcgaatggatcggccaaatctatcccggcgacggcgacaccaactacaacggcaagttcaagggcagagccacactgaccgccgatacctctagcagcacagcctacatgcagctgagcagcctgaccagcgaagatagcgccgtgtacttctgtgcccggtccatcacaacagtcgtgggctgcgctatggactattggggccagggaacaagcgtgaccgtgtctagtacgcgtgcctctacaaagggaccctccgtgtttcctctggctcccagcagcaagtctacaagcggaggaacagccgctctgggctgcctggtcaaggattactttcccgagcctgtgaccgtgtcctggaatagcggagcactgacaagcggcgtgcacacctttccagccgtgctgcaaagcagcggcctgtactctctgagcagcgtggtcacagtgcctagctctagcctgggcacccagacctacatctgcaatgtgaaccacaagcctagcaacaccaaggtggacaagagagtggaacccaagagctgtggtaccgaagtgaaaaccgactccaccgaccacgtgaagcccaaagagacagagaacaccaagcagcccagcaagagctgccacaagcccaaggccatcgtgcacaccgagaaagtgaacatgatgagcctgaccgtgctgggcttcagaatcctgctgctgaaagtggccggctttaacctgctgatgaccctgcggctgtggtccagccgcgccaagagaagcggatctggcgtgaagcagaccctgaatttcgacctgctgaagctggctggcgacgtggaatccaacccaggcccttctagaggccatatgaccgagtacaagcccacggtgcgcctcgccacccgcgacgacgtccccagggccgtacgcaccctcgccgccgcgttcgccgactaccccgccacgcgccacaccgtcgatccggaccgccacatcgagcgggtcaccgagctgcaagaactcttcctcacgcgcgtcgggctcgacatcggcaaggtgtgggtcgcggacgacggcgccgcggtggcggtctggaccacgccggagagcgtcgaagcgggggcggtgttcgccgagatcggcccgcgcatggccgagttgagcggttcccggctggccgcgcagcaacagatggaaggcctcctggcgccgcaccggcccaaggagcccgcgtggttcctggccaccgtcggcgtctcgcccgaccaccagggcaagggtctgggcagcgccgtcgtgctccccggagtggaggcggccgagcgcgccggggtgcccgccttcctggagacctccgcgccccgcaacctccccttctacgagcggctcggcttcaccgtcaccgccgacgtcgaggtgcccgaaggaccgcgcacctggtgcatgacccgcaagcccggtgcctga

SEQ ID NO: 4811 - DNA, 2667 bp, synthetic construct; identical to SEQ ID NO: 4809
  source 1..2667: mol_type = other DNA

SEQ ID NO: 4812 - DNA, 2751 bp, synthetic construct; identical to SEQ ID NO: 4810
  source 1..2751: mol_type = other DNA

SEQ ID NO: 4813 - DNA, 2571 bp, synthetic construct
  source 1..2571: mol_type = other DNA
atggccttaccagtgaccgccttgctcctgccgctggccttgctgctccacgccgccaggccggacatccagatgacacagagccctagcagcctgtctgccagcgtgggagacagagtgaccatcacatgcaaggccagcgaccacatcaacaactggctggcctggtatcagcagaagcctggacaggcccctaagctgctgatctacggcgctaccacactggaaacaggcgtgcccagcagattttctggcagcggctctggcaccgactacaccctgacaatatccagcctccagcctgaggacttcgccacctactactgtcagcagagctggaacaccccttggacattcggccagggcaccaagctggaaatcaagagactcgaggacctgaagaacgtgttcccacctgaggtggccgtgttcgagcctagcgaggccgagatcagccacacccagaaagccaccctcgtgtgcctggctaccggcttctaccccgaccatgtggaactgtcttggtgggtcaacggcaaagaggtgcacagcggcgtgtctaccgacccccagccactgaaagaacagcccgccctgaacgacagccggtactgcctgagcagcagactgagagtgtccgccaccttctggcagaacccccggaaccacttcagatgccaggtgcagttctacggcctgagcgagaacgacgagtggacccaggacagagccaagcccgtgacccagatcgtgtctgccgaagcctggggcagagccgattgcggctttaccagcgagagctaccagcagggcgtgctgagcgcctactacatgtacttgttgctgctgctgaagtccgtggtgtacttcgccatcatcacatgctgcctgctgcggagaaccgccttctgctgcaacggcgagaagtctagggccaagcgatctggatctggagcaacaaacttctcactactcaaacaagcaggtgacgtggaggagaatcccgggcctactagtatggactggatttggcgcatccttttccttgtcggcgctgctaccggcgcgcattccttcgaacaagttcagcttcaacagcctggcgctgagctggtcaaacctggcgcttctgtgaagatgagctgcaaagccagcggctacgccttcagcagctactggatcaactggatgaagcagaaacccggccagggactcgaatggatcggccaaatctatcccggcgacggcgacaccaactacaacggcaagttcaagggcagagccacactgaccgccgatacctctagcagcacagcctacatgcagctgagcagcctgaccagcgaagatagcgccgtgtacttctgtgcccggtccatcacaacagtcgtgggctgcgctatggactattggggccagggaacaagcgtgaccgtgtctagtacgcgtatccagaaccctgatcctgccgtgtaccagctgcgggatagcaagagcagcgacaagagcgtgtgtctgttcaccgacttcgacagccagaccaacgtgtcccagagcaaggactccgacgtgtacatcaccgataagaccgtgctggacatgcggagcatggacttcaagagcaactccgccgtggcctggtccaacaagtccgatttcgcctgcgccaacgccttcaacaacagcattatccccgaggacacattcttcccaagccccgagagcagctgcgacgtgaagctggtggaaaagagcttcgagacagacaccaacctgaacttccagaacctgaccgtgctgggcctgcggatgctgttcgccaaaaccgtggccgtgaacttcctgctgaccgccaagctgttcttcctccgcgccaagagaagcggatctggcgtgaagcagaccctgaatttcgacctgctgaagctggctggcgacgtggaatccaacccaggcccttctagaggccatatgaccgagtacaagcccacggtgcgcctcgccacccgcgacgacgtccccagggccgtacgcaccctcgccgccgcgttcgccgactaccccgccacgcgccacaccgtcgatccggaccgccacatcgagcgggtcaccgagctgcaagaactcttcctcacgcgcgtcgggctcgacatcggcaaggtgtgggtcgcggacgacggcgccgcggtggcggtctggaccacgccggagagcgtcgaagcgggggcggtgttcgccgagatcggcccgcgcatggccgagttgagcggttcccggctggccgcgcagcaacagatggaaggcctcctggcgccgcaccggcccaaggagcccgcgtggttcctggccaccgtcggcgtctcgcccgaccaccagggcaagggtctgggcagcgccgtcgtgctccccggagtggaggcggccgagcgcgccggggtgcccgccttcctggagacctccgcgccccgcaacctccccttctacgagcggctcggcttcaccgtcaccgccgacgtcgaggtgcccgaaggaccgcgcacctggtgcatgacccgcaagcccggtgcctga

SEQ ID NO: 4814 - DNA, 2568 bp, synthetic construct
  source 1..2568: mol_type = other DNA
atggccttaccagtgaccgccttgctcctgccgctggccttgctgctccacgccgccaggccggacgacatccagttgacccagtcccccagctcactcagcgccagtgtgggggaccgggtgaccattacctgtaaagccagtcagagtgtggactatgagggggatagcttcctgaattggtatcagcagaagcctggcaaagccccaaagctgctgatctacgctgcatctaatctggagtcaggcgtgccttctaggttctccggtagtgggtctgggaccgatttcacattgaccatttcatccctccaacccgaggatttcgctacatattactgtcagcagtccaatgaggaccctctcacctttggccagggcaccaaagttgaaattaagagactcgagggacagcctaaggccaatcctaccgtgacactgttccctccaagcagcgaagaactccaggccaacaaggccacacttgtgtgcctgatctccgacttctaccctggggctgtgacagtggcttggaaggccgatggatctcctgtgaaagccggcgtggaaaccaccaagccatccaagcagagcaacaacaaatacgccgccagctcctacctgagcctgacacctgagcagtggaagtcccacagatcctacagctgccaagtgacccacgaaggcagcaccgtggaaaagacagtggcccctacagagtgcagccccatcaagaccgatgtgattacaatggaccccaaggacaactgctccaaggacgccaacgataccctgctgctccagctgaccaacaccagcgcctactacatgtacttgttgctgctgctgaagtccgtggtgtacttcgccatcatcacatgctgcctgctgcggagaaccgccttctgctgcaacggcgagaagtctagggccaagcgatctggatctggagcaacaaacttctcactactcaaacaagcaggtgacgtggaggagaatcccgggcctactagtatggactggatttggcgcatccttttccttgtcggcgctgctaccggcgcgcattccttcgaacaagttcagcttcaacagcctggcgctgagctggtcaaacctggcgcttctgtgaagatgagctgcaaagccagcggctacgccttcaacagctactggatcaactggatgaagcagaaacccggccagggactcgaatggatcggccaaatctatcccggcgacggcgacaccaactacaacggcaagttcaagggcagagccacactgaccgccgatacctctagcagcacagcctacatgcagctgagcagcctgaccagcgaagatagcgccgtgtacttctgtgcccggtccatcacaacagtcgtgggctgcgctatggactattggggccagggaacaagcgtgaccgtgtctagtacgcgtatccagaaccctgatcctgccgtgtaccagctgcgggatagcaagagcagcgacaagagcgtgtgtctgttcaccgacttcgacagccagaccaacgtgtcccagagcaaggactccgacgtgtacatcaccgataagtgcgtgctggacatgcggagcatggacttcaagagcaactccgccgtggcctggtccaacaagtccgatttcgcctgcgccaacgccttcaacaacagcattatccccgaggacacattcttcccaagccccgagagcagctgcgacgtgaagctggtggaaaagagcttcgagacagacaccaacctgaacttccagaacctgagcgtgatcggcttcagaatcctgctgctgaaagtggccggctttaacctgctgatgaccctgcggctgtggtccagccgcgccaagagaagcggatctggcgtgaagcagaccctgaatttcgacctgctgaagctggctggcgacgtggaatccaacccaggcccttctagaggccatatgaccgagtacaagcccacggtgcgcctcgccacccgcgacgacgtccccagggccgtacgcaccctcgccgccgcgttcgccgactaccccgccacgcgccacaccgtcgatccggaccgccacatcgagcgggtcaccgagctgcaagaactcttcctcacgcgcgtcgggctcgacatcggcaaggtgtgggtcgcggacgacggcgccgcggtggcggtctggaccacgccggagagcgtcgaagcgggggcggtgttcgccgagatcggcccgcgcatggccgagttgagcggttcccggctggccgcgcagcaacagatggaaggcctcctggcgccgcaccggcccaaggagcccgcgtggttcctggccaccgtcggcgtctcgcccgaccaccagggcaagggtctgggcagcgccgtcgtgctccccggagtggaggcggccgagcgcgccggggtgcccgccttcctggagacctccgcgccccgcaacctccccttctacgagcggctcggcttcaccgtcaccgccgacgtcgaggtgcccgaaggaccgcgcacctggtgcatgacccgcaagcccggtgcctga

SEQ ID NO: 4815 - DNA, 2574 bp, synthetic construct
  source 1..2574: mol_type = other DNA
atggccttaccagtgaccgccttgctcctgccgctggccttgctgctccacgccgccaggccgagctacgtgctgacacagcctccatccgtgtctgtggctccaggacagaccgccagaatcacatgcggcggcaacaacatcggcggcaagagcgtgcactggtatcagcagccacctggacaggctccagtggtggtggtgtacgacgacagcgatagacctagcggcatccccgagagattcagcggcagcaattccggcaataccgccacactgaccatcagcagagtggaagctggcgacgaggccgtgtactactgccaagtgtgggacagcagcagcgatcacgtggtgtttggcggcggaacaaagctgacagtgcttctcgaggacctgaagaacgtgttcccacctgaggtggccgtgttcgagcctagcgaggccgagatcagccacacccagaaagccaccctcgtgtgcctggctaccggcttctaccccgaccatgtggaactgtcttggtgggtcaacggcaaagaggtgcacagcggcgtgtgtaccgacccccagccactgaaagaacagcccgccctgaacgacagccggtactgcctgagcagcagactgagagtgtccgccaccttctggcagaacccccggaaccacttcagatgccaggtgcagttctacggcctgagcgagaacgacgagtggacccaggacagagccaagcccgtgacccagatcgtgtctgccgaagcctggggcagagccgattgcggctttaccagcgagagctaccagcagggcgtgctgagcgcctactacatgtacttgttgctgctgctgaagtccgtggtgtacttcgccatcatcacatgctgcctgctgcggagaaccgccttctgctgcaacggcgagaagtctagggccaagcgatctggatctggagcaacaaacttctcactactcaaacaagcaggtgacgtggaggagaatcccgggcctactagtatggactggatttggcgcatccttttccttgtcggcgctgctaccggcgcgcattccttcgaacaactccagctgcaagagtctggccctggcctggtcaagcctagcgaaacactgagcctgacctgtaccgtgtctggcggctctatcagctccagcagctatttctggggctggatcagacaacctcctggcaaaggactggaatggatcggctccatctactacagcggcatcacctactacaaccccagcctgaagtccagagtgaccatctccgtggacaccagcaagaaccagttctccctgaagctgagcagcgtgacagccgccgataccgccgtgtattattgtgccagacatgacggcgctgtggccggcctgtttgattattggggacagggcaccctggtcaccgtgtcatctgctacgcgtatccagaaccctgatcctgccgtgtaccagctgcgggatagcaagagcagcgacaagagcgtgtgtctgttcaccgacttcgacagccagaccaacgtgtcccagagcaaggactccgacgtgtacatcaccgataagtgcgtgctggacatgcggagcatggacttcaagagcaactccgccgtggcctggtccaacaagtccgatttcgcctgcgccaacgccttcaacaacagcattatccccgaggacacattcttcccaagccccgagagcagctgcgacgtgaagctggtggaaaagagcttcgagacagacaccaacctgaacttccagaacctgagcgtgatcggcttcagaatcctgctgctgaaagtggccggctttaacctgctgatgaccctgcggctgtggtccagccgcgccaagagaagcggatctggcgtgaagcagaccctgaatttcgacctgctgaagctggctggcgacgtggaatccaacccaggcccttctagaggccatatgaccgagtacaagcccacggtgcgcctcgccacccgcgacgacgtccccagggccgtacgcaccctcgccgccgcgttcgccgactaccccgccacgcgccacaccgtcgatccggaccgccacatcgagcgggtcaccgagctgcaagaactcttcctcacgcgcgtcgggctcgacatcggcaaggtgtgggtcgcggacgacggcgccgcggtggcggtctggaccacgccggagagcgtcgaagcgggggcggtgttcgccgagatcggcccgcgcatggccgagttgagcggttcccggctggccgcgcagcaacagatggaaggcctcctggcgccgcaccggcccaaggagcccgcgtggttcctggccaccgtcggcgtctcgcccgaccaccagggcaagggtctgggcagcgccgtcgtgctccccggagtggaggcggccgagcgcgccggggtgcccgccttcctggagacctccgcgccccgcaacctccccttctacgagcggctcggcttcaccgtcaccgccgacgtcgaggtgcccgaaggaccgcgcacctggtgcatgacccgcaagcccggtgcctga

SEQ ID NO: 4816 - DNA, 2574 bp, synthetic construct
  source 1..2574: mol_type = other DNA
atggccttaccagtgaccgccttgctcctgccgctggccttgctgctccacgccgccaggccgagctacgtgctgacacagcctccatccgtgtctgtggctccaggacagaccgccagaatcacatgcggcggcaacaacatcggcagcaagagcgtgcactggtatcagcagccacctggacaggctccagtggtggtggtgtacgacgacagcgatagacctagcggcatccccgagagattcagcggcagcaattccggcaataccgccacactgaccatcagcagagtggaagctggcgacgaggccgtgtactactgccaagtgtgggacagcagcagcgatcacgtggtgtttggcggcggaacaaagctgacagtgcttctcgaggacctgaagaacgtgttcccacctgaggtggccgtgttcgagcctagcgaggccgagatcagccacacccagaaagccaccctcgtgtgcctggctaccggcttctaccccgaccatgtggaactgtcttggtgggtcaacggcaaagaggtgcacagcggcgtgtgtaccgacccccagccactgaaagaacagcccgccctgaacgacagccggtactgcctgagcagcagactgagagtgtccgccaccttctggcagaacccccggaaccacttcagatgccaggtgcagttctacggcctgagcgagaacgacgagtggacccaggacagagccaagcccgtgacccagatcgtgtctgccgaagcctggggcagagccgattgcggctttaccagcgagagctaccagcagggcgtgctgagcgcctactacatgtacttgttgctgctgctgaagtccgtggtgtacttcgccatcatcacatgctgcctgctgcggagaaccgccttctgctgcaacggcgagaagtctagggccaagcgatctggatctggagcaacaaacttctcactactcaaacaagcaggtgacgtggaggagaatcccgggcctactagtatggactggatttggcgcatccttttccttgtcggcgctgctaccggcgcgcattccttcgaacaactccagctgcaagagtctggccctggcctggtcaagcctagcgaaacactgagcctgacctgtaccgtgtctggcggctctatcagctccggcagctatttctggggctggatcagacaacctcctggcaaaggactggaatggatcggctccatctactacagcggcatcacctactacaaccccagcctgaagtccagagtgaccatctccgtggacaccagcaagaaccagttctccctgaagctgagcagcgtgacagccgccgataccgccgtgtattattgtgccagacatgacggcgctgtggccggcctgtttgattattggggacagggcaccctggtcaccgtgtcatctgctacgcgtatccagaaccctgatcctgccgtgtaccagctgcgggatagcaagagcagcgacaagagcgtgtgtctgttcaccgacttcgacagccagaccaacgtgtcccagagcaaggactccgacgtgtacatcaccgataagtgcgtgctggacatgcggagcatggacttcaagagcaactccgccgtggcctggtccaacaagtccgatttcgcctgcgccaacgccttcaacaacagcattatccccgaggacacattcttcccaagccccgagagcagctgcgacgtgaagctggtggaaaagagcttcgagacagacaccaacctgaacttccagaacctgagcgtgatcggcttcagaatcctgctgctgaaagtggccggctttaacctgctgatgaccctgcggctgtggtccagccgcgccaagagaagcggatctggcgtgaagcagaccctgaatttcgacctgctgaagctggctggcgacgtggaatccaacccaggcccttctagaggccatatgaccgagtacaagcccacggtgcgcctcgccacccgcgacgacgtccccagggccgtacgcaccctcgccgccgcgttcgccgactaccccgccacgcgccacaccgtcgatccggaccgccacatcgagcgggtcaccgagctgcaagaactcttcctcacgcgcgtcgggctcgacatcggcaaggtgtgggtcgcggacgacggcgccgcggtggcggtctggaccacgccggagagcgtcgaagcgggggcggtgttcgccgagatcggcccgcgcatggccgagttgagcggttcccggctggccgcgcagcaacagatggaaggcctcctggcgccgcaccggcccaaggagcccgcgtggttcctggccaccgtcggcgtctcgcccgaccaccagggcaagggtctgggcagcgccgtcgtgctccccggagtggaggcggccgagcgcgccggggtgcccgccttcctggagacctccgcgccccgcaacctccccttctacgagcggctcggcttcaccgtcaccgccgacgtcgaggtgcccgaaggaccgcgcacctggtgcatgacccgcaagcccggtgcctga

SEQ ID NO: 4817 - DNA, 2553 bp, synthetic construct
  source 1..2553: mol_type = other DNA
atggccttaccagtgaccgccttgctcctgccgctggccttgctgctccacgccgccaggccgagctacgtgctgacacagcctccatccgtgtctgtggctccaggacagaccgccagaatcacatgcggcggcaacaacatcggcggcaagagcgtgcactggtatcagcagccacctggacaggctccagtggtggtggtgtacgacgacagcgatagacctagcggcatccccgagagattcagcggcagcaattccggcaataccgccacactgaccatcagcagagtggaagctggcgacgaggccgtgtactactgccaagtgtgggacagcagcagcgatcacgtggtgtttggcggcggaacaaagctgacagtgcttctcgaggacaagcagctggacgccgacgtgtcccccaagcctaccatcttcctgccctctatcgccgagacaaagctccagaaggccggcacctacctgtgcctgctggaaaagttcttcccagatgtgattaagatccactggcaggaaaagaagtccaacaccatcctgggcagccaggaaggcaacaccatgaagaccaacgacacctacatgaagttcagctggctgaccgtgcccgagaagtccctggacaaagaacacagatgcatcgtgcggcacgaaaacaacaagaacggcgtggaccaggaaatcatcttcccacccatcaagaccgatgtgattacaatggaccccaaggacaactgctccaaggacgccaacgataccctgctgctccagctgaccaacaccagcgcctactacatgtacgagatcctgctgggcaaggccaccctgtacgccgtgctggtgtctgccctggtgctgatggctatggtcaagcggaaggacagccggggaagggccaagcgatctggatctggagcaacaaacttctcactactcaaacaagcaggtgacgtggaggagaatcccgggcctactagtatggactggatttggcgcatccttttccttgtcggcgctgctaccggcgcgcattccttcgaacaactccagctgcaagagtctggccctggcctggtcaagcctagcgaaacactgagcctgacctgtaccgtgtctggcggctctatcagctccagcagctatttctggggctggatcagacaacctcctggcaaaggactggaatggatcggctccatctactacagcggcatcacctactacaaccccagcctgaagtccagagtgaccatctccgtggacaccagcaagaaccagttctccctgaagctgagcagcgtgacagccgccgataccgccgtgtattattgtgccagacatgacggcgctgtggccggcctgtttgattattggggacagggcaccctggtcaccgtgtcatctgctacgcgtatccagaaccctgatcctgccgtgtaccagctgcgggatagcaagagcagcgacaagagcgtgtgtctgttcaccgacttcgacagccagaccaacgtgtcccagagcaaggactccgacgtgtacatcaccgataagtgcgtgctggacatgcggagcatggacttcaagagcaactccgccgtggcctggtccaacaagtccgatttcgcctgcgccaacgccttcaacaacagcattatccccgaggacacattcttcccaagccccgagagcagctgcgacgtgaagctggtggaaaagagcttcgagacagacaccaacctgaacttccagaacctgagcgtgatcggcttcagaatcctgctgctgaaagtggccggctttaacctgctgatgaccctgcggctgtggtccagccgcgccaagagaagcggatctggcgtgaagcagaccctgaatttcgacctgctgaagctggctggcgacgtggaatccaacccaggcccttctagaggccatatgaccgagtacaagcccacggtgcgcctcgccacccgcgacgacgtccccagggccgtacgcaccctcgccgccgcgttcgccgactaccccgccacgcgccacaccgtcgatccggaccgccacatcgagcgggtcaccgagctgcaagaactcttcctcacgcgcgtcgggctcgacatcggcaaggtgtgggtcgcggacgacggcgccgcggtggcggtctggaccacgccggagagcgtcgaagcgggggcggtgttcgccgagatcggcccgcgcatggccgagttgagcggttcccggctggccgcgcagcaacagatggaaggcctcctggcgccgcaccggcccaaggagcccgcgtggttcctggccaccgtcggcgtctcgcccgaccaccagggcaagggtctgggcagcgccgtcgtgctccccggagtggaggcggccgagcgcgccggggtgcccgccttcctggagacctccgcgccccgcaacctccccttctacgagcggctcggcttcaccgtcaccgccgacgtcgaggtgcccgaaggaccgcgcacctggtgcatgacccgcaagcccggtgcctga

SEQ ID NO: 4818 - DNA, 2655 bp, synthetic construct
  source 1..2655: mol_type = other DNA
atggccttaccagtgaccgccttgctcctgccgctggccttgctgctccacgccgccaggccggacatccagatgacacagagccctagcagcctgtctgccagcgtgggagacagagtgaccatcacatgcaaggccagcgaccacatcaacaactggctggcctggtatcagcagaagcctggacaggcccctaagctgctgatctacggcgctaccacactggaaacaggcgtgcccagcagattttctggcagcggctctggcaccgactacaccctgacaatatccagcctccagcctgaggacttcgccacctactactgtcagcagagctggaacaccccttggacattcggccagggcaccaagctggaaatcaagagactcgaggacctgaagaacgtgttcccacctgaggtggccgtgttcgagcctagcgaggccgagatcagccacacccagaaagccaccctcgtgtgcctggctaccggcttctaccccgaccatgtggaactgtcttggtgggtcaacggcaaagaggtgcacagcggcgtgtgtaccgacccccagccactgaaagaacagcccgccctgaacgacagccggtactgcctgagcagcagactgagagtgtccgccaccttctggcagaacccccggaaccacttcagatgccaggtgcagttctacggcctgagcgagaacgacgagtggacccaggacagagccaagcccgtgacccagatcgtgtctgccgaagcctggggcagagccgattgcggctttaccagcgagagctaccagcagggcgtgctgagcgccaccatcctgtacgagatcctgctgggcaaggccaccctgtacgccgtgctggtgtctgccctggtgctgatggctatggtcaagcggaaggacagccggggaagggccaagcgatctggatctggagcaacaaacttctcactactcaaacaagcaggtgacgtggaggagaatcccgggcctactagtgccaccatggactggatttggcgcatccttttccttgtcggcgctgctaccggcgcccattccgggcccgccagaagcgaggacagatacagaggatccggcggcggaggatctggcggaggcggatctgggggcggaggctctttcgaacaagttcagcttcaacagcctggcgctgagctggtcaaacctggcgcttctgtgaagatgagctgcaaagccagcggctacgccttcagcagctactggatcaactggatgaagcagaaacccggccagggactcgaatggatcggccaaatctatcccggcgacggcgacaccaactacaacggcaagttcaagggcagagccacactgaccgccgatacctctagcagcacagcctacatgcagctgagcagcctgaccagcgaagatagcgccgtgtacttctgtgcccggtccatcacaacagtcgtgggctgcgctatggactattggggccagggaacaagcgtgaccgtgtctagtacgcgtatccagaaccctgatcctgccgtgtaccagctgcgggatagcaagagcagcgacaagagcgtgtgtctgttcaccgacttcgacagccagaccaacgtgtcccagagcaaggactccgacgtgtacatcaccgataagtgcgtgctggacatgcggagcatggacttcaagagcaactccgccgtggcctggtccaacaagtccgatttcgcctgcgccaacgccttcaacaacagcattatccccgaggacacattcttcccaagccccgagagcagctgcgacgtgaagctggtggaaaagagcttcgagacagacaccaacctgaacttccagaacctgagcgtgatcggcttcagaatcctgctgctgaaagtggccggctttaacctgctgatgaccctgcggctgtggtccagccgcgccaagagaagcggatctggcgtgaagcagaccctgaatttcgacctgctgaagctggctggcgacgtggaatccaacccaggcccttctagaggccatatgaccgagtacaagcccacggtgcgcctcgccacccgcgacgacgtccccagggccgtacgcaccctcgccgccgcgttcgccgactaccccgccacgcgccacaccgtcgatccggaccgccacatcgagcgggtcaccgagctgcaagaactcttcctcacgcgcgtcgggctcgacatcggcaaggtgtgggtcgcggacgacggcgccgcggtggcggtctggaccacgccggagagcgtcgaagcgggggcggtgttcgccgagatcggcccgcgcatggccgagttgagcggttcccggctggccgcgcagcaacagatggaaggcctcctggcgccgcaccggcccaaggagcccgcgtggttcctggccaccgtcggcgtctcgcccgaccaccagggcaagggtctgggcagcgccgtcgtgctccccggagtggaggcggccgagcgcgccggggtgcccgccttcctggagacctccgcgccccgcaacctccccttctacgagcggctcggcttcaccgtcaccgccgacgtcgaggtgcccgaaggaccgcgcacctggtgcatgacccgcaagcccggtgcctga

SEQ ID NO: 4819 - DNA, 2658 bp, synthetic construct
  source 1..2658: mol_type = other DNA
atggccttaccagtgaccgccttgctcctgccgctggccttgctgctccacgccgccaggccggacatccagatgacacagagccctagcagcctgtctgccagcgtgggagacagagtgaccatcacatgcaaggccagcgaccacatcaacaactggctggcctggtatcagcagaagcctggacaggcccctaagctgctgatctacggcgctaccacactggaaacaggcgtgcccagcagattttctggcagcggctctggcaccgactacaccctgacaatatccagcctccagcctgaggacttcgccacctactactgtcagcagagctggaacaccccttggacattcggccagggcaccaagctggaaatcaagagactcgaggacctgaagaacgtgttcccacctgaggtggccgtgttcgagcctagcgaggccgagatcagccacacccagaaagccaccctcgtgtgcctggctaccggcttctaccccgaccatgtggaactgtcttggtgggtcaacggcaaagaggtgcacagcggcgtgtgtaccgacccccagccactgaaagaacagcccgccctgaacgacagccggtactgcctgagcagcagactgagagtgtccgccaccttctggcagaacccccggaaccacttcagatgccaggtgcagttctacggcctgagcgagaacgacgagtggacccaggacagagccaagcccgtgacccagatcgtgtctgccgaagcctggggcagagccgattgcggctttaccagcgagagctaccagcagggcgtgctgagcgccaccatcctgtacgagatcctgctgggcaaggccaccctgtacgccgtgctggtgtctgccctggtgctgatggctatggtcaagcggaaggacagccggggaagggccaagcgatctggatctggagcaacaaacttctcactactcaaacaagcaggtgacgtggaggagaatcccgggcctactagtgccaccatggactggatttggcgcatccttttccttgtcggcgctgctaccggcgcccattccgggcccgccagaagcgaggacagatacagaaacggatccggcggcggaggatctggcggaggcggatctgggggcggaggctctttcgaacaagttcagcttcaacagcctggcgctgagctggtcaaacctggcgcttctgtgaagatgagctgcaaagccagcggctacgccttcagcagctactggatcaactggatgaagcagaaacccggccagggactcgaatggatcggccaaatctatcccggcgacggcgacaccaactacaacggcaagttcaagggcagagccacactgaccgccgatacctctagcagcacagcctacatgcagctgagcagcctgaccagcgaagatagcgccgtgtacttctgtgcccggtccatcacaacagtcgtgggctgcgctatggactattggggccagggaacaagcgtgaccgtgtctagtacgcgtatccagaaccctgatcctgccgtgtaccagctgcgggatagcaagagcagcgacaagagcgtgtgtctgttcaccgacttcgacagccagaccaacgtgtcccagagcaaggactccgacgtgtacatcaccgataagtgcgtgctggacatgcggagcatggacttcaagagcaactccgccgtggcctggtccaacaagtccgatttcgcctgcgccaacgccttcaacaacagcattatccccgaggacacattcttcccaagccccgagagcagctgcgacgtgaagctggtggaaaagagcttcgagacagacaccaacctgaacttccagaacctgagcgtgatcggcttcagaatcctgctgctgaaagtggccggctttaacctgctgatgaccctgcggctgtggtccagccgcgccaagagaagcggatctggcgtgaagcagaccctgaatttcgacctgctgaagctggctggcgacgtggaatccaacccaggcccttctagaggccatatgaccgagtacaagcccacggtgcgcctcgccacccgcgacgacgtccccagggccgtacgcaccctcgccgccgcgttcgccgactaccccgccacgcgccacaccgtcgatccggaccgccacatcgagcgggtcaccgagctgcaagaactcttcctcacgcgcgtcgggctcgacatcggcaaggtgtgggtcgcggacgacggcgccgcggtggcggtctggaccacgccggagagcgtcgaagcgggggcggtgttcgccgagatcggcccgcgcatggccgagttgagcggttcccggctggccgcgcagcaacagatggaaggcctcctggcgccgcaccggcccaaggagcccgcgtggttcctggccaccgtcggcgtctcgcccgaccaccagggcaagggtctgggcagcgccgtcgtgctccccggagtggaggcggccgagcgcgccggggtgcccgccttcctggagacctccgcgccccgcaacctccccttctacgagcggctcggcttcaccgtcaccgccgacgtcgaggtgcccgaaggaccgcgcacctggtgcatgacccgcaagcccggtgcctga

SEQ ID NO: 4820 - DNA, 2634 bp, synthetic construct
  source 1..2634: mol_type = other DNA
atggccttaccagtgaccgccttgctcctgccgctggccttgctgctccacgccgccaggccggacatccagatgacacagagccctagcagcctgtctgccagcgtgggagacagagtgaccatcacatgcaaggccagcgaccacatcaacaactggctggcctggtatcagcagaagcctggacaggcccctaagctgctgatctacggcgctaccacactggaaacaggcgtgcccagcagattttctggcagcggctctggcaccgactacaccctgacaatatccagcctccagcctgaggacttcgccacctactactgtcagcagagctggaacaccccttggacattcggccagggcaccaagctggaaatcaagagactcgaggacctgaagaacgtgttcccacctgaggtggccgtgttcgagcctagcgaggccgagatcagccacacccagaaagccaccctcgtgtgcctggctaccggcttctaccccgaccatgtggaactgtcttggtgggtcaacggcaaagaggtgcacagcggcgtgtgtaccgacccccagccactgaaagaacagcccgccctgaacgacagccggtactgcctgagcagcagactgagagtgtccgccaccttctggcagaacccccggaaccacttcagatgccaggtgcagttctacggcctgagcgagaacgacgagtggacccaggacagagccaagcccgtgacccagatcgtgtctgccgaagcctggggcagagccgattgcggctttaccagcgagagctaccagcagggcgtgctgagcgccaccatcctgtacgagatcctgctgggcaaggccaccctgtacgccgtgctggtgtctgccctggtgctgatggctatggtcaagcggaaggacagccggggaagggccaagcgatctggatctggagcaacaaacttctcactactcaaacaagcaggtgacgtggaggagaatcccgggcctactagtgccaccatggactggatttggcgcatccttttccttgtcggcgctgctaccggcgcccattccgggcccgccagaagcgaggacagatacagaaaccacgctggatctgggggcggaggctctttcgaacaagttcagcttcaacagcctggcgctgagctggtcaaacctggcgcttctgtgaagatgagctgcaaagccagcggctacgccttcagcagctactggatcaactggatgaagcagaaacccggccagggactcgaatggatcggccaaatctatcccggcgacggcgacaccaactacaacggcaagttcaagggcagagccacactgaccgccgatacctctagcagcacagcctacatgcagctgagcagcctgaccagcgaagatagcgccgtgtacttctgtgcccggtccatcacaacagtcgtgggctgcgctatggactattggggccagggaacaagcgtgaccgtgtctagtacgcgtatccagaaccctgatcctgccgtgtaccagctgcgggatagcaagagcagcgacaagagcgtgtgtctgttcaccgacttcgacagccagaccaacgtgtcccagagcaaggactccgacgtgtacatcaccgataagtgcgtgctggacatgcggagcatggacttcaagagcaactccgccgtggcctggtccaacaagtccgatttcgcctgcgccaacgccttcaacaacagcattatccccgaggacacattcttcccaagccccgagagcagctgcgacgtgaagctggtggaaaagagcttcgagacagacaccaacctgaacttccagaacctgagcgtgatcggcttcagaatcctgctgctgaaagtggccggctttaacctgctgatgaccctgcggctgtggtccagccgcgccaagagaagcggatctggcgtgaagcagaccctgaatttcgacctgctgaagctggctggcgacgtggaatccaacccaggcccttctagaggccatatgaccgagtacaagcccacggtgcgcctcgccacccgcgacgacgtccccagggccgtacgcaccctcgccgccgcgttcgccgactaccccgccacgcgccacaccgtcgatccggaccgccacatcgagcgggtcaccgagctgcaagaactcttcctcacgcgcgtcgggctcgacatcggcaaggtgtgggtcgcggacgacggcgccgcggtggcggtctggaccacgccggagagcgtcgaagcgggggcggtgttcgccgagatcggcccgcgcatggccgagttgagcggttcccggctggccgcgcagcaacagatggaaggcctcctggcgccgcaccggcccaaggagcccgcgtggttcctggccaccgtcggcgtctcgcccgaccaccagggcaagggtctgggcagcgccgtcgtgctccccggagtggaggcggccgagcgcgccggggtgcccgccttcctggagacctccgcgccccgcaacctccccttctacgagcggctcggcttcaccgtcaccgccgacgtcgaggtgcccgaaggaccgcgcacctggtgcatgacccgcaagcccggtgcctga

SEQ ID NO: 4821 - DNA, 2664 bp, synthetic construct
  source 1..2664: mol_type = other DNA
atggccttaccagtgaccgccttgctcctgccgctggccttgctgctccacgccgccaggccggacatccagatgacacagagccctagcagcctgtctgccagcgtgggagacagagtgaccatcacatgcaaggccagcgaccacatcaacaactggctggcctggtatcagcagaagcctggacaggcccctaagctgctgatctacggcgctaccacactggaaacaggcgtgcccagcagattttctggcagcggctctggcaccgactacaccctgacaatatccagcctccagcctgaggacttcgccacctactactgtcagcagagctggaacaccccttggacattcggccagggcaccaagctggaaatcaagagactcgaggacctgaagaacgtgttcccacctgaggtggccgtgttcgagcctagcgaggccgagatcagccacacccagaaagccaccctcgtgtgcctggctaccggcttctaccccgaccatgtggaactgtcttggtgggtcaacggcaaagaggtgcacagcggcgtgtgtaccgacccccagccactgaaagaacagcccgccctgaacgacagccggtactgcctgagcagcagactgagagtgtccgccaccttctggcagaacccccggaaccacttcagatgccaggtgcagttctacggcctgagcgagaacgacgagtggacccaggacagagccaagcccgtgacccagatcgtgtctgccgaagcctggggcagagccgattgcggctttaccagcgagagctaccagcagggcgtgctgagcgccaccatcctgtacgagatcctgctgggcaaggccaccctgtacgccgtgctggtgtctgccctggtgctgatggctatggtcaagcggaaggacagccggggaagggccaagcgatctggatctggagcaacaaacttctcactactcaaacaagcaggtgacgtggaggagaatcccgggcctactagtgccaccatggactggatttggcgcatccttttccttgtcggcgctgctaccggcgcccattccgggcccgccagaagcgaggacagatacagaaaccctcgaggatccggcggcggaggatctggcggaggcggatctgggggcggaggctctttcgaacaagttcagcttcaacagcctggcgctgagctggtcaaacctggcgcttctgtgaagatgagctgcaaagccagcggctacgccttcagcagctactggatcaactggatgaagcagaaacccggccagggactcgaatggatcggccaaatctatcccggcgacggcgacaccaactacaacggcaagttcaagggcagagccacactgaccgccgatacctctagcagcacagcctacatgcagctgagcagcctgaccagcgaagatagcgccgtgtacttctgtgcccggtccatcacaacagtcgtgggctgcgctatggactattggggccagggaacaagcgtgaccgtgtctagtacgcgtatccagaaccctgatcctgccgtgtaccagctgcgggatagcaagagcagcgacaagagcgtgtgtctgttcaccgacttcgacagccagaccaacgtgtcccagagcaaggactccgacgtgtacatcaccgataagtgcgtgctggacatgcggagcatggacttcaagagcaactccgccgtggcctggtccaacaagtccgatttcgcctgcgccaacgccttcaacaacagcattatccccgaggacacattcttcccaagccccgagagcagctgcgacgtgaagctggtggaaaagagcttcgagacagacaccaacctgaacttccagaacctgagcgtgatcggcttcagaatcctgctgctgaaagtggccggctttaacctgctgatgaccctgcggctgtggtccagccgcgccaagagaagcggatctggcgtgaagcagaccctgaatttcgacctgctgaagctggctggcgacgtggaatccaacccaggcccttctagaggccatatgaccgagtacaagcccacggtgcgcctcgccacccgcgacgacgtccccagggccgtacgcaccctcgccgccgcgttcgccgactaccccgccacgcgccacaccgtcgatccggaccgccacatcgagcgggtcaccgagctgcaagaactcttcctcacgcgcgtcgggctcgacatcggcaaggtgtgggtcgcggacgacggcgccgcggtggcggtctggaccacgccggagagcgtcgaagcgggggcggtgttcgccgagatcggcccgcgcatggccgagttgagcggttcccggctggccgcgcagcaacagatggaaggcctcctggcgccgcaccggcccaaggagcccgcgtggttcctggccaccgtcggcgtctcgcccgaccaccagggcaagggtctgggcagcgccgtcgtgctccccggagtggaggcggccgagcgcgccggggtgcccgccttcctggagacctccgcgccccgcaacctccccttctacgagcggctcggcttcaccgtcaccgccgacgtcgaggtgcccgaaggaccgcgcacctggtgcatgacccgcaagcccggtgcctga

SEQ ID NO: 4822 - DNA, 2664 bp, synthetic construct
  source 1..2664: mol_type = other DNA
atggccttaccagtgaccgccttgctcctgccgctggccttgctgctccacgccgccaggccggacatccagatgacacagagccctagcagcctgtctgccagcgtgggagacagagtgaccatcacatgcaaggccagcgaccacatcaacaactggctggcctggtatcagcagaagcctggacaggcccctaagctgctgatctacggcgctaccacactggaaacaggcgtgcccagcagattttctggcagcggctctggcaccgactacaccctgacaatatccagcctccagcctgaggacttcgccacctactactgtcagcagagctggaacaccccttggacattcggccagggcaccaagctggaaatcaagagactcgaggacctgaagaacgtgttcccacctgaggtggccgtgttcgagcctagcgaggccgagatcagccacacccagaaagccaccctcgtgtgcctggctaccggcttctaccccgaccatgtggaactgtcttggtgggtcaacggcaaagaggtgcacagcggcgtgtgtaccgacccccagccactgaaagaacagcccgccctgaacgacagccggtactgcctgagcagcagactgagagtgtccgccaccttctggcagaacccccggaaccacttcagatgccaggtgcagttctacggcctgagcgagaacgacgagtggacccaggacagagccaagcccgtgacccagatcgtgtctgccgaagcctggggcagagccgattgcggctttaccagcgagagctaccagcagggcgtgctgagcgccaccatcctgtacgagatcctgctgggcaaggccaccctgtacgccgtgctggtgtctgccctggtgctgatggctatggtcaagcggaaggacagccggggaagggccaagcgatctggatctggagcaacaaacttctcactactcaaacaagcaggtgacgtggaggagaatcccgggcctactagtgccaccatggactggatttggcgcatccttttccttgtcggcgctgctaccggcgcccattccgggcccgccagaagcgaggacagatacagaaacctttcaggatccggcggcggaggatctggcggaggcggatctgggggcggaggctctttcgaacaagttcagcttcaacagcctggcgctgagctggtcaaacctggcgcttctgtgaagatgagctgcaaagccagcggctacgccttcagcagctactggatcaactggatgaagcagaaacccggccagggactcgaatggatcggccaaatctatcccggcgacggcgacaccaactacaacggcaagttcaagggcagagccacactgaccgccgatacctctagcagcacagcctacatgcagctgagcagcctgaccagcgaagatagcgccgtgtacttctgtgcccggtccatcacaacagtcgtgggctgcgctatggactattggggccagggaacaagcgtgaccgtgtctagtacgcgtatccagaaccctgatcctgccgtgtaccagctgcgggatagcaagagcagcgacaagagcgtgtgtctgttcaccgacttcgacagccagaccaacgtgtcccagagcaaggactccgacgtgtacatcaccgataagtgcgtgctggacatgcggagcatggacttcaagagcaactccgccgtggcctggtccaacaagtccgatttcgcctgcgccaacgccttcaacaacagcattatccccgaggacacattcttcccaagccccgagagcagctgcgacgtgaagctggtggaaaagagcttcgagacagacaccaacctgaacttccagaacctgagcgtgatcggcttcagaatcctgctgctgaaagtggccggctttaacctgctgatgaccctgcggctgtggtccagccgcgccaagagaagcggatctggcgtgaagcagaccctgaatttcgacctgctgaagctggctggcgacgtggaatccaacccaggcccttctagaggccatatgaccgagtacaagcccacggtgcgcctcgccacccgcgacgacgtccccagggccgtacgcaccctcgccgccgcgttcgccgactaccccgccacgcgccacaccgtcgatccggaccgccacatcgagcgggtcaccgagctgcaagaactcttcctcacgcgcgtcgggctcgacatcggcaaggtgtgggtcgcggacgacggcgccgcggtggcggtctggaccacgccggagagcgtcgaagcgggggcggtgttcgccgagatcggcccgcgcatggccgagttgagcggttcccggctggccgcgcagcaacagatggaaggcctcctggcgccgcaccggcccaaggagcccgcgtggttcctggccaccgtcggcgtctcgcccgaccaccagggcaagggtctgggcagcgccgtcgtgctccccggagtggaggcggccgagcgcgccggggtgcccgccttcctggagacctccgcgccccgcaacctccccttctacgagcggctcggcttcaccgtcaccgccgacgtcgaggtgcccgaaggaccgcgcacctggtgcatgacccgcaagcccggtgcctga

SEQ ID NO: 4823 - DNA, 2664 bp, synthetic construct
  source 1..2664: mol_type = other DNA
atggccttaccagtgaccgccttgctcctgccgctggccttgctgctccacgccgccaggccggacatccagatgacacagagccctagcagcctgtctgccagcgtgggagacagagtgaccatcacatgcaaggccagcgaccacatcaacaactggctggcctggtatcagcagaagcctggacaggcccctaagctgctgatctacggcgctaccacactggaaacaggcgtgcccagcagattttctggcagcggctctggcaccgactacaccctgacaatatccagcctccagcctgaggacttcgccacctactactgtcagcagagctggaacaccccttggacattcggccagggcaccaagctggaaatcaagagactcgaggacctgaagaacgtgttcccacctgaggtggccgtgttcgagcctagcgaggccgagatcagccacacccagaaagccaccctcgtgtgcctggctaccggcttctaccccgaccatgtggaactgtcttggtgggtcaacggcaaagaggtgcacagcggcgtgtgtaccgacccccagccactgaaagaacagcccgccctgaacgacagccggtactgcctgagcagcagactgagagtgtccgccaccttctggcagaacccccggaaccacttcagatgccaggtgcagttctacggcctgagcgagaacgacgagtggacccaggacagagccaagcccgtgacccagatcgtgtctgccgaagcctggggcagagccgattgcggctttaccagcgagagctaccagcagggcgtgctgagcgccaccatcctgtacgagatcctgctgggcaaggccaccctgtacgccgtgctggtgtctgccctggtgctgatggctatggtcaagcggaaggacagccggggaagggccaagcgatctggatctggagcaacaaacttctcactactcaaacaagcaggtgacgtggaggagaatcccgggcctactagtgccaccatggactggatttggcgcatccttttccttgtcggcgctgctaccggcgcccattccgggcccgccagaagcgaggacagatacagaaacctaataggatccggcggcggaggatctggcggaggcggatctgggggcggaggctctttcgaacaagttcagcttcaacagcctggcgctgagctggtcaaacctggcgcttctgtgaagatgagctgcaaagccagcggctacgccttcagcagctactggatcaactggatgaagcagaaacccggccagggactcgaatggatcggccaaatctatcccggcgacggcgacaccaactacaacggcaagttcaagggcagagccacactgaccgccgatacctctagcagcacagcctacatgcagctgagcagcctgaccagcgaagatagcgccgtgtacttctgtgcccggtccatcacaacagtcgtgggctgcgctatggactattggggccagggaacaagcgtgaccgtgtctagtacgcgtatccagaaccctgatcctgccgtgtaccagctgcgggatagcaagagcagcgacaagagcgtgtgtctgttcaccgacttcgacagccagaccaacgtgtcccagagcaaggactccgacgtgtacatcaccgataagtgcgtgctggacatgcggagcatggacttcaagagcaactccgccgtggcctggtccaacaagtccgatttcgcctgcgccaacgccttcaacaacagcattatccccgaggacacattcttcccaagccccgagagcagctgcgacgtgaagctggtggaaaagagcttcgagacagacaccaacctgaacttccagaacctgagcgtgatcggcttcagaatcctgctgctgaaagtggccggctttaacctgctgatgaccctgcggctgtggtccagccgcgccaagagaagcggatctggcgtgaagcagaccctgaatttcgacctgctgaagctggctggcgacgtggaatccaacccaggcccttctagaggccatatgaccgagtacaagcccacggtgcgcctcgccacccgcgacgacgtccccagggccgtacgcaccctcgccgccgcgttcgccgactaccccgccacgcgccacaccgtcgatccggaccgccacatcgagcgggtcaccgagctgcaagaactcttcctcacgcgcgtcgggctcgacatcggcaaggtgtgggtcgcggacgacggcgccgcggtggcggtctggaccacgccggagagcgtcgaagcgggggcggtgttcgccgagatcggcccgcgcatggccgagttgagcggttcccggctggccgcgcagcaacagatggaaggcctcctggcgccgcaccggcccaaggagcccgcgtggttcctggccaccgtcggcgtctcgcccgaccaccagggcaagggtctgggcagcgccgtcgtgctccccggagtggaggcggccgagcgcgccggggtgcccgccttcctggagacctccgcgccccgcaacctccccttctacgagcggctcggcttcaccgtcaccgccgacgtcgaggtgcccgaaggaccgcgcacctggtgcatgacccgcaagcccggtgcctga

SEQ ID NO: 4824 - DNA, 2664 bp, synthetic construct
  source 1..2664: mol_type = other DNA
atggccttaccagtgaccgccttgctcctgccgctggccttgctgctccacgccgccaggccggacatccagatgacacagagccctagcagcctgtctgccagcgtgggagacagagtgaccatcacatgcaaggccagcgaccacatcaacaactggctggcctggtatcagcagaagcctggacaggcccctaagctgctgatctacggcgctaccacactggaaacaggcgtgcccagcagattttctggcagcggctctggcaccgactacaccctgacaatatccagcctccagcctgaggacttcgccacctactactgtcagcagagctggaacaccccttggacattcggccagggcaccaagctggaaatcaagagactcgaggacctgaagaacgtgttcccacctgaggtggccgtgttcgagcctagcgaggccgagatcagccacacccagaaagccaccctcgtgtgcctggctaccggcttctaccccgaccatgtggaactgtcttggtgggtcaacggcaaagaggtgcacagcggcgtgtgtaccgacccccagccactgaaagaacagcccgccctgaacgacagccggtactgcctgagcagcagactgagagtgtccgccaccttctggcagaacccccggaaccacttcagatgccaggtgcagttctacggcctgagcgagaacgacgagtggacccaggacagagccaagcccgtgacccagatcgtgtctgccgaagcctggggcagagccgattgcggctttaccagcgagagctaccagcagggcgtgctgagcgccaccatcctgtacgagatcctgctgggcaaggccaccctgtacgccgtgctggtgtctgccctggtgctgatggctatggtcaagcggaaggacagccggggaagggccaagcgatctggatctggagcaacaaacttctcactactcaaacaagcaggtgacgtggaggagaatcccgggcctactagtgccaccatggactggatttggcgcatccttttccttgtcggcgctgctaccggcgcccattccgggcccgccagaagcgaggacagatacagaaacctcagcggatccggcggcggaggatctggcggaggcggatctgggggcggaggctctttcgaacaagttcagcttcaacagcctggcgctgagctggtcaaacctggcgcttctgtgaagatgagctgcaaagccagcggctacgccttcagcagctactggatcaactggatgaagcagaaacccggccagggactcgaatggatcggccaaatctatcccggcgacggcgacaccaactacaacggcaagttcaagggcagagccacactgaccgccgatacctctagcagcacagcctacatgcagctgagcagcctgaccagcgaagatagcgccgtgtacttctgtgcccggtccatcacaacagtcgtgggctgcgctatggactattggggccagggaacaagcgtgaccgtgtctagtacgcgtatccagaaccctgatcctgccgtgtaccagctgcgggatagcaagagcagcgacaagagcgtgtgtctgttcaccgacttcgacagccagaccaacgtgtcccagagcaaggactccgacgtgtacatcaccgataagtgcgtgctggacatgcggagcatggacttcaagagcaactccgccgtggcctggtccaacaagtccgatttcgcctgcgccaacgccttcaacaacagcattatccccgaggacacattcttcccaagccccgagagcagctgcgacgtgaagctggtggaaaagagcttcgagacagacaccaacctgaacttccagaacctgagcgtgatcggcttcagaatcctgctgctgaaagtggccggctttaacctgctgatgaccctgcggctgtggtccagccgcgccaagagaagcggatctggcgtgaagcagaccctgaatttcgacctgctgaagctggctggcgacgtggaatccaacccaggcccttctagaggccatatgaccgagtacaagcccacggtgcgcctcgccacccgcgacgacgtccccagggccgtacgcaccctcgccgccgcgttcgccgactaccccgccacgcgccacaccgtcgatccggaccgccacatcgagcgggtcaccgagctgcaagaactcttcctcacgcgcgtcgggctcgacatcggcaaggtgtgggtcgcggacgacggcgccgcggtggcggtctggaccacgccggagagcgtcgaagcgggggcggtgttcgccgagatcggcccgcgcatggccgagttgagcggttcccggctggccgcgcagcaacagatggaaggcctcctggcgccgcaccggcccaaggagcccgcgtggttcctggccaccgtcggcgtctcgcccgaccaccagggcaagggtctgggcagcgccgtcgtgctccccggagtggaggcggccgagcgcgccggggtgcccgccttcctggagacctccgcgccccgcaacctccccttctacgagcggctcggcttcaccgtcaccgccgacgtcgaggtgcccgaaggaccgcgcacctggtgcatgacccgcaagcccggtgcctga

SEQ ID NO: 4825 - DNA, 2664 bp, synthetic construct
  source 1..2664: mol_type = other DNA
atggccttaccagtgaccgccttgctcctgccgctggccttgctgctccacgccgccaggccggacatccagatgacacagagccctagcagcctgtctgccagcgtgggagacagagtgaccatcacatgcaaggccagcgaccacatcaacaactggctggcctggtatcagcagaagcctggacaggcccctaagctgctgatctacggcgctaccacactggaaacaggcgtgcccagcagattttctggcagcggctctggcaccgactacaccctgacaatatccagcctccagcctgaggacttcgccacctactactgtcagcagagctggaacaccccttggacattcggccagggcaccaagctggaaatcaagagactcgaggacctgaagaacgtgttcccacctgaggtggccgtgttcgagcctagcgaggccgagatcagccacacccagaaagccaccctcgtgtgcctggctaccggcttctaccccgaccatgtggaactgtcttggtgggtcaacggcaaagaggtgcacagcggcgtgtgtaccgacccccagccactgaaagaacagcccgccctgaacgacagccggtactgcctgagcagcagactgagagtgtccgccaccttctggcagaacccccggaaccacttcagatgccaggtgcagttctacggcctgagcgagaacgacgagtggacccaggacagagccaagcccgtgacccagatcgtgtctgccgaagcctggggcagagccgattgcggctttaccagcgagagctaccagcagggcgtgctgagcgccaccatcctgtacgagatcctgctgggcaaggccaccctgtacgccgtgctggtgtctgccctggtgctgatggctatggtcaagcggaaggacagccggggaagggccaagcgatctggatctggagcaacaaacttctcactactcaaacaagcaggtgacgtggaggagaatcccgggcctactagtgccaccatggactggatttggcgcatccttttccttgtcggcgctgctaccggcgcccattccgggcccgccagaagcgaggacagatacagaaaccttataggatccggcggcggaggatctggcggaggcggatctgggggcggaggctctttcgaacaagttcagcttcaacagcctggcgctgagctggtcaaacctggcgcttctgtgaagatgagctgcaaagccagcggctacgccttcagcagctactggatcaactggatgaagcagaaacccggccagggactcgaatggatcggccaaatctatcccggcgacggcgacaccaactacaacggcaagttcaagggcagagccacactgaccgccgatacctctagcagcacagcctacatgcagctgagcagcctgaccagcgaagatagcgccgtgtacttctgtgcccggtccatcacaacagtcgtgggctgcgctatggactattggggccagggaacaagcgtgaccgtgtctagtacgcgtatccagaaccctgatcctgccgtgtaccagctgcgggatagcaagagcagcgacaagagcgtgtgtctgttcaccgacttcgacagccagaccaacgtgtcccagagcaaggactccgacgtgtacatcaccgataagtgcgtgctggacatgcggagcatggacttcaagagcaactccgccgtggcctggtccaacaagtccgatttcgcctgcgccaacgccttcaacaacagcattatccccgaggacacattcttcccaagccccgagagcagctgcgacgtgaagctggtggaaaagagcttcgagacagacaccaacctgaacttccagaacctgagcgtgatcggcttcagaatcctgctgctgaaagtggccggctttaacctgctgatgaccctgcggctgtggtccagccgcgccaagagaagcggatctggcgtgaagcagaccctgaatttcgacctgctgaagctggctggcgacgtggaatccaacccaggcccttctagaggccatatgaccgagtacaagcccacggtgcgcctcgccacccgcgacgacgtccccagggccgtacgcaccctcgccgccgcgttcgccgactaccccgccacgcgccacaccgtcgatccggaccgccacatcgagcgggtcaccgagctgcaagaactcttcctcacgcgcgtcgggctcgacatcggcaaggtgtgggtcgcggacgacggcgccgcggtggcggtctggaccacgccggagagcgtcgaagcgggggcggtgttcgccgagatcggcccgcgcatggccgagttgagcggttcccggctggccgcgcagcaacagatggaaggcctcctggcgccgcaccggcccaaggagcccgcgtggttcctggccaccgtcggcgtctcgcccgaccaccagggcaagggtctgggcagcgccgtcgtgctccccggagtggaggcggccgagcgcgccggggtgcccgccttcctggagacctccgcgccccgcaacctccccttctacgagcggctcggcttcaccgtcaccgccgacgtcgaggtgcccgaaggaccgcgcacctggtgcatgacccgcaagcccggtgcctga

SEQ ID NO: 4826 - DNA, 1803 bp, synthetic construct
  source 1..1803: mol_type = other DNA
atggccttaccagtgaccgccttgctcctgccgctggccttgctgctccacgccgccaggccggacatccagatgacacagagccctagcagcctgtctgccagcgtgggagacagagtgaccatcacatgcaaggccagcgaccacatcaacaactggctggcctggtatcagcagaagcctggacaggcccctaagctgctgatctacggcgctaccacactggaaacaggcgtgcccagcagattttctggcagcggctctggcaccgactacaccctgacaatatccagcctccagcctgaggacttcgccacctactactgtcagcagagctggaacaccccttggacattcggccagggcaccaagctggaaatcaagagactcgaggacctgaagaacgtgttcccacctgaggtggccgtgttcgagcctagcgaggccgagatcagccacacccagaaagccaccctcgtgtgcctggctaccggcttctaccccgaccatgtggaactgtcttggtgggtcaacggcaaagaggtgcacagcggcgtgtgtaccgacccccagccactgaaagaacagcccgccctgaacgacagccggtactgcctgagcagcagactgagagtgtccgccaccttctggcagaacccccggaaccacttcagatgccaggtgcagttctacggcctgagcgagaacgacgagtggacccaggacagagccaagcccgtgacccagatcgtgtctgccgaagcctggggcagagccgattgcggctttaccagcgagagctaccagcagggcgtgctgagcgccaccatcctgtacgagatcctgctgggcaaggccaccctgtacgccgtgctggtgtctgccctggtgctgatggctatggtcaagcggaaggacagccggggaagggccaagcgatctggatctggagcaacaaacttctcactactcaaacaagcaggtgacgtggaggagaatcccgggcctactagtgccaccatggactggatttggcgcatccttttccttgtcggcgctgctaccggcgcccattccgggcccgccagaagcgaggacagatacagaaaccatgttggatctggcgtgaagcagaccctgaatttcgacctgctgaagctggctggcgacgtggaatccaacccaggcccttctagaggccatatgaccgagtacaagcccacggtgcgcctcgccacccgcgacgacgtccccagggccgtacgcaccctcgccgccgcgttcgccgactaccccgccacgcgccacaccgtcgatccggaccgccacatcgagcgggtcaccgagctgcaagaactcttcctcacgcgcgtcgggctcgacatcggcaaggtgtgggtcgcggacgacggcgccgcggtggcggtctggaccacgccggagagcgtcgaagcgggggcggtgttcgccgagatcggcccgcgcatggccgagttgagcggttcccggctggccgcgcagcaacagatggaaggcctcctggcgccgcaccggcccaaggagcccgcgtggttcctggccaccgtcggcgtctcgcccgaccaccagggcaagggtctgggcagcgccgtcgtgctccccggagtggaggcggccgagcgcgccggggtgcccgccttcctggagacctccgcgccccgcaacctccccttctacgagcggctcggcttcaccgtcaccgccgacgtcgaggtgcccgaaggaccgcgcacctggtgcatgacccgcaagcccggtgcctga

SEQ ID NO: 4827 - DNA, 1803 bp, synthetic construct
  source 1..1803: mol_type = other DNA
atggccttaccagtgaccgccttgctcctgccgctggccttgctgctccacgccgccaggccggacatccagatgacacagagccctagcagcctgtctgccagcgtgggagacagagtgaccatcacatgcaaggccagcgaccacatcaacaactggctggcctggtatcagcagaagcctggacaggcccctaagctgctgatctacggcgctaccacactggaaacaggcgtgcccagcagattttctggcagcggctctggcaccgactacaccctgacaatatccagcctccagcctgaggacttcgccacctactactgtcagcagagctggaacaccccttggacattcggccagggcaccaagctggaaatcaagagactcgaggacctgaagaacgtgttcccacctgaggtggccgtgttcgagcctagcgaggccgagatcagccacacccagaaagccaccctcgtgtgcctggctaccggcttctaccccgaccatgtggaactgtcttggtgggtcaacggcaaagaggtgcacagcggcgtgtgtaccgacccccagccactgaaagaacagcccgccctgaacgacagccggtactgcctgagcagcagactgagagtgtccgccaccttctggcagaacccccggaaccacttcagatgccaggtgcagttctacggcctgagcgagaacgacgagtggacccaggacagagccaagcccgtgacccagatcgtgtctgccgaagcctggggcagagccgattgcggctttaccagcgagagctaccagcagggcgtgctgagcgccaccatcctgtacgagatcctgctgggcaaggccaccctgtacgccgtgctggtgtctgccctggtgctgatggctatggtcaagcggaaggacagccggggaagggccaagcgatctggatctggagcaacaaacttctcactactcaaacaagcaggtgacgtggaggagaatcccgggcctactagtgccaccatggactggatttggcgcatccttttccttgtcggcgctgctaccggcgcccattccgggcccgccagaagcgaggacagatacagaaaccacgacggatctggcgtgaagcagaccctgaatttcgacctgctgaagctggctggcgacgtggaatccaacccaggcccttctagaggccatatgaccgagtacaagcccacggtgcgcctcgccacccgcgacgacgtccccagggccgtacgcaccctcgccgccgcgttcgccgactaccccgccacgcgccacaccgtcgatccggaccgccacatcgagcgggtcaccgagctgcaagaactcttcctcacgcgcgtcgggctcgacatcggcaaggtgtgggtcgcggacgacggcgccgcggtggcggtctggaccacgccggagagcgtcgaagcgggggcggtgttcgccgagatcggcccgcgcatggccgagttgagcggttcccggctggccgcgcagcaacagatggaaggcctcctggcgccgcaccggcccaaggagcccgcgtggttcctggccaccgtcggcgtctcgcccgaccaccagggcaagggtctgggcagcgccgtcgtgctccccggagtggaggcggccgagcgcgccggggtgcccgccttcctggagacctccgcgccccgcaacctccccttctacgagcggctcggcttcaccgtcaccgccgacgtcgaggtgcccgaaggaccgcgcacctggtgcatgacccgcaagcccggtgcctga

SEQ ID NO: 4828 - DNA, 2268 bp, synthetic construct
  source 1..2268: mol_type = other DNA
atggccttaccagtgaccgccttgctcctgccgctggccttgctgctccacgccgccaggccggacatccagttgacccagtcccccagctcactcagcgccagtgtgggggaccgggtgaccattacctgtaaagccagtcagagtgtggactatgacggggatagcttcctgaattggtatcagcagaagcctggcaaagccccaaagctgctgatctacgctgcatctaatctggagtcaggcgtgccttccaggttctccggtagtgggtctgggaccgatttcacattgaccatttcatccctccaacccgaggatttcgctacatattactgtcagcagtccaatgaggaccctctcacctttggccagggcaccaaagttgaaattaagagactcgaggacctgaagaacgtgttcccacctgaggtggccgtgttcgagcctagcgaggccgagatcagccacacccagaaagccaccctcgtgtgcctggctaccggcttctaccccgaccatgtggaactgtcttggtgggtcaacggcaaagaggtgcacagcggcgtgtctaccgacccccagccactgaaagaacagcccgccctgaacgacagccggtactgcctgagcagcagactgagagtgtccgccaccttctggcagaacccccggaaccacttcagatgccaggtgcagttctacggcctgagcgagaacgacgagtggacccaggacagagccaagcccgtgacccagatcgtgtctgccgaagcctggggcagagccgattgcggatcccagagcttcggcctgctggaccccaagctgtgctacctgctggatggcatcctgttcatctacggcgtgatcctgaccgccctgttcctgagagtgaagttcagcagaagcgccgacgcccctgcctaccagcagggacagaaccaactgtacaacgagctgaacctgggcagacgggaagagtacgacgtgctggacaagcggagaggcagggaccctgagatgggcggaaagccccggagaaagaacccccaggaaggactgtataacgaactccagaaagacaagatggccgaagcctacagcgagatcggcatgaagggcgagcggagaagaggcaagggccacgatggcctgtaccagggcctgagcaccgccaccaaggacacctatgacgccctgcacatgcaggccctgcctccaagaagggccaagcgatctggatctggagcaacaaacttctcactactcaaacaagcaggtgacgtggaggagaatcccgggcctactagtatggactggatttggcgcatccttttccttgtcggcgctgctaccggcgcgcattccttcgaagaagtccaacttgtggagtctggagggggcctggtgcagcccggcggctctctcagactgtcttgtgcggcaagcggctacaccttcacctcttactggatagaatgggtgaggcaggcacctggaaagggactggagtggattggagagattctgccaggagggggagatacaaattacaatgaaatcttcaaggggcgggccaccttttcagcggataccagcaagaatacagcttacctgcagatgaatagcctccgggcagaagataccgctgtttattattgcacgagacgggtgccaataagactggactattgggggcaagggactcttgtcaccgtcagttcaacgcgtatccagaaccctgatcctgccgtgtaccagctgcgggatagcaagagcagcgacaagagcgtgtgtctgttcaccgacttcgacagccagaccaacgtgtcccagagcaaggactccgacgtgtacatcaccgataagaccgtgctggacatgcggagcatggacttcaagagcaactccgccgtggcctggtccaacaagtccgatttcgcctgcgccaacgccttcaacaacagcattatccccgaggacacattcttcccaagccccgagagcagctgcggtaccatcactcaaggtttggcagtgtcaaccatctcatcattctttccacctggctaccaagtgtccttctgcctggtcatggtgctgctgttcgccgtggataccggcctgtacttcagcgtcaggagcaagcggtcacggctgctccacagcgattacatgaatatgacaccacgaagaccgggtcctactcgcaaacactaccaaccctacgcacctccccgcgactttgcagcgtaccgatcttaa

SEQ ID NO: 4829 - DNA, 2346 bp, synthetic construct
  source 1..2346: mol_type = other DNA
atggccttaccagtgaccgccttgctcctgccgctggccttgctgctccacgccgccaggccggacatccagttgacccagtcccccagctcactcagcgccagtgtgggggaccgggtgaccattacctgtaaagccagtcagagtgtggactatgacggggatagcttcctgaattggtatcagcagaagcctggcaaagccccaaagctgctgatctacgctgcatctaatctggagtcaggcgtgccttccaggttctccggtagtgggtctgggaccgatttcacattgaccatttcatccctccaacccgaggatttcgctacatattactgtcagcagtccaatgaggaccctctcacctttggccagggcaccaaagttgaaattaagagactcgaggacctgaagaacgtgttcccacctgaggtggccgtgttcgagcctagcgaggccgagatcagccacacccagaaagccaccctcgtgtgcctggctaccggcttctaccccgaccatgtggaactgtcttggtgggtcaacggcaaagaggtgcacagcggcgtgtctaccgacccccagccactgaaagaacagcccgccctgaacgacagccggtactgcctgagcagcagactgagagtgtccgccaccttctggcagaacccccggaaccacttcagatgccaggtgcagttctacggcctgagcgagaacgacgagtggacccaggacagagccaagcccgtgacccagatcgtgtctgccgaagcctggggcagagccgattgcggatcccagagcttcggcctgctggaccccaagctgtgctacctgctggatggcatcctgttcatctacggcgtgatcctgaccgccctgttcctgagagtgaagttcagcagaagcgccgacgcccctgcctaccagcagggacagaaccaactgtacaacgagctgaacctgggcagacgggaagagtacgacgtgctggacaagcggagaggcagggaccctgagatgggcggaaagccccggagaaagaacccccaggaaggactgtataacgaactccagaaagacaagatggccgaagcctacagcgagatcggcatgaagggcgagcggagaagaggcaagggccacgatggcctgtaccagggcctgagcaccgccaccaaggacacctatgacgccctgcacatgcaggccctgcctccaagaagggccaagcgatctggatctggagcaacaaacttctcactactcaaacaagcaggtgacgtggaggagaatcccgggcctactagtatggactggatttggcgcatccttttccttgtcggcgctgctaccggcgcgcattccttcgaagaagtccaacttgtggagtctggagggggcctggtgcagcccggcggctctctcagactgtcttgtgcggcaagcggctacaccttcacctcttactggatagaatgggtgaggcaggcacctggaaagggactggagtggattggagagattctgccaggagggggagatacaaattacaatgaaatcttcaaggggcgggccaccttttcagcggataccagcaagaatacagcttacctgcagatgaatagcctccgggcagaagataccgctgtttattattgcacgagacgggtgccaataagactggactattgggggcaagggactcttgtcaccgtcagttcaacgcgtatccagaaccctgatcctgccgtgtaccagctgcgggatagcaagagcagcgacaagagcgtgtgtctgttcaccgacttcgacagccagaccaacgtgtcccagagcaaggactccgacgtgtacatcaccgataagaccgtgctggacatgcggagcatggacttcaagagcaactccgccgtggcctggtccaacaagtccgatttcgcctgcgccaacgccttcaacaacagcattatccccgaggacacattcttcccaagccccgagagcagctgcggtaccatcactcaaggtttggcagtgtcaaccatctcatcattctttccacctggctaccaagtgtccttctgcctggtcatggtgctgctgttcgccgtggataccggcctgtacttcagcgtcaagaccaacatccggtccagcaccagagactggaaggaccacaagttcaagtggcggaaggaccctcaggacaagaagagaggccggaagaagctgctgtacatcttcaagcagcctttcatgcggcccgtgcagaccacccaggaagaggacggctgctcctgccggttccccgaggaagaagaaggcggctgcgagctgtaa

SEQ ID NO: 4830 - DNA, 1872 bp, synthetic construct; identical to SEQ ID NO: 4722
  source 1..1872: mol_type = other DNA

SEQ ID NO: 4831 - DNA, 1869 bp, synthetic construct
  source 1..1869: mol_type = other DNA
atggccttaccagtgaccgccttgctcctgccgctggccttgctgctccacgccgccaggccggacatccagttgacccagtcccccagctcactcagcgccagtgtgggggaccgggtgaccattacctgtaaagccagtcagagtgtggactatgacggggatagcttcctgaattggtatcagcagaagcctggcaaagccccaaagctgctgatctacgctgcatctaatctggagtcaggcgtgccttccaggttctccggtagtgggtctgggaccgatttcacattgaccatttcatccctccaacccgaggatttcgctacatattactgtcagcagtccaatgaggaccctctcacctttggccagggcaccaaagttgaaattaagagactcgaggacctgaagaacgtgttcccacctgaggtggccgtgttcgagcctagcgaggccgagatcagccacacccagaaagccaccctcgtgtgcctggctaccggcttctaccccgaccatgtggaactgtcttggtgggtcaacggcaaagaggtgcacagcggcgtgtgtaccgacccccagccactgaaagaacagcccgccctgaacgacagccggtactgcctgagcagcagactgagagtgtccgccaccttctggcagaacccccggaaccacttcagatgccaggtgcagttctacggcctgagcgagaacgacgagtggacccaggacagagccaagcccgtgacccagatcgtgtctgccgaagcctggggcagagccgattgcggctttaccagcgagagctaccagcagggcgtgctgagcgccaccatcctgtacgagatcctgctgggcaaggccaccctgtacgccgtgctggtgtctgccctggtgctgatggctatggtcaagcggaaggacagccggggaagggccaagcgatctggatctggagcaacaaacttctcactactcaaacaagcaggtgacgtggaggagaatcccgggcctactagtatggactggatttggcgcatccttttccttgtcggcgctgctaccggcgcgcattccttcgaagaagtccaacttgtggagtctggagggggcctggtgcagcccggcggctctctcagactgtcttgtgcggcaagcggctacaccttcacctcttactggatagaatgggtgaggcaggcacctggaaagggactggagtggattggagagattctgccaggagggggagatacaaattacaatgaaatcttcaaggggcgggccaccttttcagcggataccagcaagaatacagcttacctgcagatgaatagcctccgggcagaagataccgctgtttattattgcacgagacgggtgccaataagactggactattgggggcaagggactcttgtcaccgtcagttcaacgcgtatccagaaccctgatcctgccgtgtaccagctgcgggatagcaagagcagcgacaagagcgtgtgtctgttcaccgacttcgacagccagaccaacgtgtcccagagcaaggactccgacgtgtacatcaccgataagtgcgtgctggacatgcggagcatggacttcaagagcaactccgccgtggcctggtccaacaagtccgatttcgcctgcgccaacgccttcaacaacagcattatccccgaggacacattcttcccaagccccgagagcagctgcgacgtgaagctggtggaaaagagcttcgagacagacaccaacctgaacttccagaacctgagcgtgatcggcttcagaatcctgctgctgaaagtggccggctttaacctgctgatgaccctgcggctgtggtccagctaa

SEQ ID NO: 4832 - DNA, 2001 bp, synthetic construct
  source 1..2001: mol_type = other DNA
atggccttaccagtgaccgccttgctcctgccgctggccttgctgctccacgccgccaggccgcaggttcagctccagcagtctggacctggcctggtcaagcctagccagacactgtctctgacctgtgccatcagcggcgatagcgtgtcctctaatagagccgcctggaactggatcagacagagccctagcagaggactccagtggctgggcagaacctactaccgcagcaagtggtacaacgactacgccgtgtctctgcggagccggatcaccatcaatcccgtgaccagcaagaaccaggtggccctgcacatgaacagcgtgacccctgaagataccgccgtgtactactgtgccagagccggaattgtggtggtgcccggacctgagacattctactactacgaccacggcctggacgtgtggggccagggaacaacagtgactgtctcttctctcgaggacctgaagaacgtgttcccacctgaggtggccgtgttcgagcctagcgaggccgagatcagccacacccagaaagccaccctcgtgtgcctggctaccggcttctaccccgaccatgtggaactgtcttggtgggtcaacggcaaagaggtgcacagcggcgtgtgtaccgacccccagccactgaaagaacagcccgccctgaacgacagccggtactgcctgagcagcagactgagagtgtccgccaccttctggcagaacccccggaaccacttcagatgccaggtgcagttctacggcctgagcgagaacgacgagtggacccaggacagagccaagcccgtgacccagatcgtgtctgccgaagcctggggcagagccgattgcggctttaccagcgagagctaccagcagggcgtgctgagcgccaccatcctgtacgagatcctgctgggcaaggccaccctgtacgccgtgctggtgtctgccctggtgctgatggctatggtcaagcggaaggacagccggggaagggccaagcgatctggatctggagcaacaaacttctcactactcaaacaagcaggtgacgtggaggagaatcccgggcctactagtgccaccatggactggatttggcgcatccttttccttgtcggcgctgctaccggcgcccattccgggcccgccagaagcgaggacagatacagaaaccccaaaggatccggcggcggaggatctggcggaggcggatctgggggcggaggctctttcgaagacatccagatgacacagagcccctctagcctgtctgccagcgtgggagacagagtgaccatcacctgtagagccagccagagcatcagaaactacctgaactggtatcagcaaaagcccggcaaggcccctgagctgctgattcatgctgcaagcagcctccagagcggcgtgccaagcagattttctggcagcggcagcggaaccgacttcaccctgacaatatctagcctccagcctgaggacttcgccagctactactgccagcagagctacagcgcccctcctatcacctttggacagggcaccagactggaaatcaagacgcgtatccagaaccctgatcctgccgtgtaccagctgcgggatagcaagagcagcgacaagagcgtgtgtctgttcaccgacttcgacagccagaccaacgtgtcccagagcaaggactccgacgtgtacatcaccgataagtgcgtgctggacatgcggagcatggacttcaagagcaactccgccgtggcctggtccaacaagtccgatttcgcctgcgccaacgccttcaacaacagcattatccccgaggacacattcttcccaagccccgagagcagctgcgacgtgaagctggtggaaaagagcttcgagacagacaccaacctgaacttccagaacctgagcgtgatcggcttcagaatcctgctgctgaaagtggccggctttaacctgctgatgaccctgcggctgtggtccagctaa

SEQ ID NO: 4833 - DNA, 2274 bp, synthetic construct
  source 1..2274: mol_type = other DNA
atggccttaccagtgaccgccttgctcctgccgctggccttgctgctccacgccgccaggccggaagtgcagctggttgaatctggcggaggactggttcagcctggcggatctctgagactgtcttgtgccgcctctggcttcgccagcgactactatatcatcggctggttcagacaggcccctggcaaagagagagagggcgtcagctgtatcagcagcagatacgccaacaccaactacgccgacagcgtgaagggcagattcaccatcagccgggacaacgccaagaacaccgtgtacctccagatgaacagcctgaagcctgaggacaccgccgtgtactactgtgccgccgacaccagaagatacacctgtcctgacattgccaccatgcaccggaacttcgattcttggggccagggcacactggtcaccgtttcttctggtaccgacatccagatgacacagagccctagcagcctgtctgccagcgtgggagacagagtgaccatcacctgtagagccagccaggacgtgaacacagccgtggcttggtatcagcagaagcctggcaaggcccctaagctgctgatctacagcgccagctttctgtacagcggcgtgcccagcagattcagcggaagcagaagcggcaccgacttcaccctgacaatatccagcctccagcctgaggacttcgccacctactactgccagcagcactacaccacacctccaacattcggccagggcaccaaggtggaaatcaagagaacactcgagatccagaaccctgatcctgccgtgtaccagctgcgggatagcaagagcagcgacaagagcgtgtgtctgttcaccgacttcgacagccagaccaacgtgtcccagagcaaggactccgacgtgtacatcaccgataagtgcgtgctggacatgcggagcatggacttcaagagcaactccgccgtggcctggtccaacaagtccgatttcgcctgcgccaacgccttcaacaacagcattatccccgaggacacattcttcccaagccccgagagcagctgcgacgtgaagctggtggaaaagagcttcgagacagacaccaacctgaacttccagaacctgagcgtgatcggcttcagaatcctgctgctgaaagtggccggctttaacctgctgatgaccctgcggctgtggtccagctctagtcgcgccaagagaagcggatctggcgtgaagcagaccctgaatttcgacctgctgaagctggctggcgacgtggaatccaacccaggccctactagtatggactggatttggcgcatccttttccttgtcggcgctgctaccggcgcgcattccttcgaagtgcagctggttgaatcaggtggcggcctggttcaacctggcggatctctgagactgagctgtgccgccagcggcttcaacatcaaggacacctacatccactgggtccgacaggcccctggcaaaggacttgaatgggtcgccagaatctaccccaccaacggctacaccagatacgccgactctgtgaagggcagattcaccatcagcgccgacaccagcaagaacaccgcctacctccagatgaactccctgagagccgaggacaccgccgtgtactactgtagcagatggggcggagccggagcctacgctatggatgtttggggccagggaaccctggtcaccgtgtcatctacgcgtgaggacctgaagaacgtgttcccacctgaggtggccgtgttcgagcctagcgaggccgagatcagccacacccagaaagccaccctcgtgtgcctggctaccggcttctaccccgaccatgtggaactgtcttggtgggtcaacggcaaagaggtgcacagcggcgtgtgtaccgacccccagccactgaaagaacagcccgccctgaacgacagccggtactgcctgagcagcagactgagagtgtccgccaccttctggcagaacccccggaaccacttcagatgccaggtgcagttctacggcctgagcgagaacgacgagtggacccaggacagagccaagcccgtgacccagatcgtgtctgccgaagcctggggcagagccgattgcggctttaccagcgagagctaccagcagggcgtgctgagcgccaccatcctgtacgagatcctgctgggcaaggccaccctgtacgccgtgctggtgtctgccctggtgctgatggctatggtcaagcggaaggacagccggggataa

SEQ ID NO: 4834 - DNA, 2013 bp, synthetic construct
  source 1..2013: mol_type = other DNA
atggccttaccagtgaccgccttgctcctgccgctggccttgctgctccacgccgccaggccggcatgccgcgcacgcagcgaggacaggtataggaaccccaaaggaagtgcgggtaccggcggaggcggatctggcggcggaggtagcggtggcggaggatctgaattcgacatccagatgacacagagccctagcagcctgtctgccagcgtgggagacagagtgaccatcacatgcaaggccagcgaccacatcaacaactggctggcctggtatcagcagaagcctggacaggcccctaagctgctgatctacggcgctaccacactggaaacaggcgtgcccagcagattttctggcagcggctctggcaccgactacaccctgacaatatccagcctccagcctgaggacttcgccacctactactgtcagcagagctggaacaccccttggacattcggccagggcaccaagctggaaatcaagagactcgaggacctgaagaacgtgttcccacctgaggtggccgtgttcgagcctagcgaggccgagatcagccacacccagaaagccaccctcgtgtgcctggctaccggcttctaccccgaccatgtggaactgtcttggtgggtcaacggcaaagaggtgcacagcggcgtgtgtaccgacccccagccactgaaagaacagcccgccctgaacgacagccggtactgcctgagcagcagactgagagtgtccgccaccttctggcagaacccccggaaccacttcagatgccaggtgcagttctacggcctgagcgagaacgacgagtggacccaggacagagccaagcccgtgacccagatcgtgtctgccgaagcctggggcagagccgattgcggctttaccagcgagagctaccagcagggcgtgctgagcgccaccatcctgtacgagatcctgctgggcaaggccaccctgtacgccgtgctggtgtctgccctggtgctgatggctatggtcaagcggaaggacagccggggaagggccaagcgatctggatctggagcaacaaacttctcactactcaaacaagcaggtgacgtggaggagaatcccgggcctactagtgccaccatggactggatttggcgcatccttttccttgtcggcgctgctaccggcgcccattccgccagaagcgaggacagatacagaaaccccaaattcgaagttcagctggttgaatctggcggcggactggttcaacctggcggatctctgagactgagctgtgccgcctctggctacgcctttagcaactactgggtcaactgggttcgacaggcccctggcaaaggactggaatgggtcgcccaaatctatcccggcgacggcgacaccaactacaacggcaagttcaagggcagattcaccatcagccgggacaacagcaagaacaccctgtacctccagatgaactccctgagagccgaggacaccgccgtgtactattgtgccagatccatcaccaccgtcgtgggctgcgctatggattattggggccagggaaccctggtcaccgtgtcctctacgcgtatccagaaccctgatcctgccgtgtaccagctgcgggatagcaagagcagcgacaagagcgtgtgtctgttcaccgacttcgacagccagaccaacgtgtcccagagcaaggactccgacgtgtacatcaccgataagtgcgtgctggacatgcggagcatggacttcaagagcaactccgccgtggcctggtccaacaagtccgatttcgcctgcgccaacgccttcaacaacagcattatccccgaggacacattcttcccaagccccgagagcagctgcgacgtgaagctggtggaaaagagcttcgagacagacaccaacctgaacttccagaacctgagcgtgatcggcttcagaatcctgctgctgaaagtggccggctttaacctgctgatgaccctgcggctgtggtccagctaa

SEQ ID NO: 4835 - DNA, 1992 bp, synthetic construct
  source 1..1992: mol_type = other DNA
atggccttaccagtgaccgccttgctcctgccgctggccttgctgctccacgccgccaggccggacatcgtgatgacacagagccctgatagcctggccgtgtctctgggagagagagccaccatcaactgcaagagcagccagagcctgctgaacagcggcaaccagaagaactacctggcctggtatcagcagaagcccggccagcctcctaagctgctgatctactggggcagcaccagatccacaggcgtgcccgatagattttctggctctggcagcggcaccgacttcaccctgacaatttctagcctgcaagccgaggacgtggccgtgtactactgccagaacgactacacataccccttcaccttcggccagggcaccaagctggaaatcaaactcgagatccagaaccctgatcctgccgtgtaccagctgcgggatagcaagagcagcgacaagagcgtgtgtctgttcaccgacttcgacagccagaccaacgtgtcccagagcaaggactccgacgtgtacatcaccgataagtgcgtgctggacatgcggagcatggacttcaagagcaactccgccgtggcctggtccaacaagtccgatttcgcctgcgccaacgccttcaacaacagcattatccccgaggacacattcttcccaagccccgagagcagctgcgacgtgaagctggtggaaaagagcttcgagacagacaccaacctgaacttccagaacctgagcgtgatcggcttcagaatcctgctgctgaaagtggccggctttaacctgctgatgaccctgcggctgtggtccagctctagtcgcgccaagagaagcggatctggcgtgaagcagaccctgaatttcgacctgctgaagctggctggcgacgtggaatccaacccaggccctactagtgccaccatggactggatttggcgcatccttttccttgtcggcgctgctaccggcgcccattccgggcccgccagaagcgaggacagatacagaaaccccaaaggatccggcggcggaggatctggcggaggcggatctgggggcggaggctctttcgaacaagttcagctggttcagagcggagccgaagtgaagaaacctggggcctctgtgaaggtgtcctgcaaggcttccggctataccttcaccagcttttggctgaactgggtccgacaggcccctggacaaggactggaatggatgggcaacatctaccccagcgacagctacaccgtgtacaaccagaaattcaaggaccgcgtgaccatgaccagggacaccagcacaagcacagtgtacatggaactgagcagcctgcggagcgaggataccgccgtgtattattgcgccagaacctggcggggcaacagcttcgattattggggccagggaaccaccgtgaccgtgtcatctacgcgtgaggacctgaagaacgtgttcccacctgaggtggccgtgttcgagcctagcgaggccgagatcagccacacccagaaagccaccctcgtgtgcctggctaccggcttctaccccgaccatgtggaactgtcttggtgggtcaacggcaaagaggtgcacagcggcgtgtgtaccgacccccagccactgaaagaacagcccgccctgaacgacagccggtactgcctgagcagcagactgagagtgtccgccaccttctggcagaacccccggaaccacttcagatgccaggtgcagttctacggcctgagcgagaacgacgagtggacccaggacagagccaagcccgtgacccagatcgtgtctgccgaagcctggggcagagccgattgcggctttaccagcgagagctaccagcagggcgtgctgagcgcctactacatgtacttgttgctgctgctgaagtccgtggtgtacttcgccatcatcacatgctgcctgctgcggagaaccgccttctgctgcaacggcgagaagtcttaa

SEQ ID NO: 4836 - DNA, 1992 bp, synthetic construct; identical to SEQ ID NO: 4835
  source 1..1992: mol_type = other DNA

SEQ ID NO: 4837 - DNA, 1989 bp, synthetic construct
  source 1..1989: mol_type = other DNA
atggccttaccagtgaccgccttgctcctgccgctggccttgctgctccacgccgccaggccggacatcgtgatgacacagagccctgatagcctggccgtgtctctgggagagagagccaccatcaactgcaagagcagccagagcctgctgaacagcggcaacaacaagaactacgtgacatggtatcagcagaagcccggccagcctcctaagctgctgatctactggggcagcaccagatccacaggcgtgcccgatagattttctggctctggcagcggcaccgacttcaccctgacaatttctagcctgcaagccgaggacgtggccgtgtactactgccagaacgactacacataccccttcaccttcggccagggcaccaagctggaaatcaaactcgagatccagaaccctgatcctgccgtgtaccagctgcgggatagcaagagcagcgacaagagcgtgtgtctgttcaccgacttcgacagccagaccaacgtgtcccagagcaaggactccgacgtgtacatcaccgataagtgcgtgctggacatgcggagcatggacttcaagagcaactccgccgtggcctggtccaacaagtccgatttcgcctgcgccaacgccttcaacaacagcattatccccgaggacacattcttcccaagccccgagagcagctgcgacgtgaagctggtggaaaagagcttcgagacagacaccaacctgaacttccagaacctgagcgtgatcggcttcagaatcctgctgctgaaagtggccggctttaacctgctgatgaccctgcggctgtggtccagctctagtcgcgccaagagaagcggatctggcgtgaagcagaccctgaatttcgacctgctgaagctggctggcgacgtggaatccaacccaggccctactagtgccaccatggactggatttggcgcatccttttccttgtcggcgctgctaccggcgcccattccgggcccgccagaagcgaggacagatacagaaaccccaaaggatccggcggcggaggatctggcggaggcggatctgggggcggaggctctttcgaacaagttcagctggttcagagcggagccgaagtgaagaaacctggggcctctgtgaaggtgtcctgcaaggcttccggctataccttcaccagcttttggctgaactgggtccgacaggcccctggacaaggactggaatggatgggcaacatctaccccagcgacagctacaccgtgtacaaccagaaattcaaggaccgcgtgaccatgaccagggacaccagcacaagcacagtgtacatggaactgagcagcctgcggagcgaggataccgccgtgtattattgcgccagaacctggcggggcaacagcttcgattattggggccagggaaccaccgtgaccgtgtcatctacgcgtgaggacctgaagaacgtgttcccacctgaggtggccgtgttcgagcctagcgaggccgagatcagccacacccagaaagccaccctcgtgtgcctggctaccggcttctaccccgaccatgtggaactgtcttggtgggtcaacggcaaagaggtgcacagcggcgtgtgtaccgacccccagccactgaaagaacagcccgccctgaacgacagccggtactgcctgagcagcagactgagagtgtccgccaccttctggcagaacccccggaaccacttcagatgccaggtgcagttctacggcctgagcgagaacgacgagtggacccaggacagagccaagcccgtgacccagatcgtgtctgccgaagcctggggcagagccgattgcggctttaccagcgagagctaccagcagggcgtgctgagcgccaccatcctgtacgagatcctgctgggcaaggccaccctgtacgccgtgctggtgtctgccctggtgctgatggctatggtcaagcggaaggacagccggggataa

SEQ ID NO: 4838 - DNA, 2046 bp, synthetic construct
  source 1..2046: mol_type = other DNA
atggccttaccagtgaccgccttgctcctgccgctggccttgctgctccacgccgccaggccggcatgcgctagaagcgaagatcggtatcggaaccccaagggtacccaggttcagctccagcagtctggacctggcctggtcaagcctagccagacactgtctctgacctgtgccatcagcggcgatagcgtgtcctctaatagagccgcctggaactggatcagacagagccctagcagaggactccagtggctgggcagaacctactaccgcagcaagtggtacaacgactacgccgtgtctctgcggagccggatcaccatcaatcccgtgaccagcaagaaccaggtggccctgcacatgaacagcgtgacccctgaagataccgccgtgtactactgtgccagagccggaattgtggtggtgcccggacctgagacattctactactacgaccacggcctggacgtgtggggccagggaacaacagtgactgtctcttctctcgaggacctgaagaacgtgttcccacctgaggtggccgtgttcgagcctagcgaggccgagatcagccacacccagaaagccaccctcgtgtgcctggctaccggcttctaccccgaccatgtggaactgtcttggtgggtcaacggcaaagaggtgcacagcggcgtgtgtaccgacccccagccactgaaagaacagcccgccctgaacgacagccggtactgcctgagcagcagactgagagtgtccgccaccttctggcagaacccccggaaccacttcagatgccaggtgcagttctacggcctgagcgagaacgacgagtggacccaggacagagccaagcccgtgacccagatcgtgtctgccgaagcctggggcagagccgattgcggctttaccagcgagagctaccagcagggcgtgctgagcgccaccatcctgtacgagatcctgctgggcaaggccaccctgtacgccgtgctggtgtctgccctggtgctgatggctatggtcaagcggaaggacagccggggaagggccaagcgatctggatctggagcaacaaacttctcactactcaaacaagcaggtgacgtggaggagaatcccgggcctactagtgccaccatggactggatttggcgcatccttttccttgtcggcgctgctaccggcgcccattccgggcccgccagaagcgaggacagatacagaaaccccaaaggatccggcggcggaggatctggcggaggcggatctgggggcggaggctctttcgaagacatccagatgacacagagcccctctagcctgtctgccagcgtgggagacagagtgaccatcacctgtagagccagccagagcatcagaaactacctgaactggtatcagcaaaagcccggcaaggcccctgagctgctgattcatgctgcaagcagcctccagagcggcgtgccaagcagattttctggcagcggcagcggaaccgacttcaccctgacaatatctagcctccagcctgaggacttcgccagctactactgccagcagagctacagcgcccctcctatcacctttggacagggcaccagactggaaatcaagacgcgtatccagaaccctgatcctgccgtgtaccagctgcgggatagcaagagcagcgacaagagcgtgtgtctgttcaccgacttcgacagccagaccaacgtgtcccagagcaaggactccgacgtgtacatcaccgataagtgcgtgctggacatgcggagcatggacttcaagagcaactccgccgtggcctggtccaacaagtccgatttcgcctgcgccaacgccttcaacaacagcattatccccgaggacacattcttcccaagccccgagagcagctgcgacgtgaagctggtggaaaagagcttcgagacagacaccaacctgaacttccagaacctgagcgtgatcggcttcagaatcctgctgctgaaagtggccggctttaacctgctgatgaccctgcggctgtggtccagctaa

SEQ ID NO: 4839 - DNA, 2028 bp, synthetic construct
  source 1..2028: mol_type = other DNA
atggccttaccagtgaccgccttgctcctgccgctggccttgctgctccacgccgccaggccggcatgccgcgcacgcagcgaggacaggtataggaaccccaaaggaagtgcgggtaccgacatcgtgatgacacagagccctgatagcctggccgtgtctctgggagagagagccaccatcaactgcaagagcagccagagcctgctgaacagcggcaaccagaagaactacctggcctggtatcagcagaagcccggccagcctcctaagctgctgatctactggggcagcaccagatccacaggcgtgcccgatagattttctggctctggcagcggcaccgacttcaccctgacaatttctagcctgcaagccgaggacgtggccgtgtactactgccagaacgactacacataccccttcaccttcggccagggcaccaagctggaaatcaaactcgaggacctgaagaacgtgttcccacctgaggtggccgtgttcgagcctagcgaggccgagatcagccacacccagaaagccaccctcgtgtgcctggctaccggcttctaccccgaccatgtggaactgtcttggtgggtcaacggcaaagaggtgcacagcggcgtgtgtaccgacccccagccactgaaagaacagcccgccctgaacgacagccggtactgcctgagcagcagactgagagtgtccgccaccttctggcagaacccccggaaccacttcagatgccaggtgcagttctacggcctgagcgagaacgacgagtggacccaggacagagccaagcccgtgacccagatcgtgtctgccgaagcctggggcagagccgattgcggctttaccagcgagagctaccagcagggcgtgctgagcgccaccatcctgtacgagatcctgctgggcaaggccaccctgtacgccgtgctggtgtctgccctggtgctgatggctatggtcaagcggaaggacagccggggaagggccaagcgatctggatctggagcaacaaacttctcactactcaaacaagcaggtgacgtggaggagaatcccgggcctactagtgccaccatggactggatttggcgcatccttttccttgtcggcgctgctaccggcgcccattccgggcccgccagaagcgaggacagatacagaaaccccaaaggatccggcggcggaggatctggcggaggcggatctgggggcggaggctctttcgaacaagttcagctggttcagagcggagccgaagtgaagaaacctggggcctctgtgaaggtgtcctgcaaggcttccggctataccttcaccagcttttggctgaactgggtccgacaggcccctggacaaggactggaatggatgggcaacatctaccccagcgacagctacaccgtgtacaaccagaaattcaaggaccgcgtgaccatgaccagggacaccagcacaagcacagtgtacatggaactgagcagcctgcggagcgaggataccgccgtgtattattgcgccagaacctggcggggcaacagcttcgattattggggccagggaaccaccgtgaccgtgtcatctacgcgtatccagaaccctgatcctgccgtgtaccagctgcgggatagcaagagcagcgacaagagcgtgtgtctgttcaccgacttcgacagccagaccaacgtgtcccagagcaaggactccgacgtgtacatcaccgataagtgcgtgctggacatgcggagcatggacttcaagagcaactccgccgtggcctggtccaacaagtccgatttcgcctgcgccaacgccttcaacaacagcattatccccgaggacacattcttcccaagccccgagagcagctgcgacgtgaagctggtggaaaagagcttcgagacagacaccaacctgaacttccagaacctgagcgtgatcggcttcagaatcctgctgctgaaagtggccggctttaacctgctgatgaccctgcggctgtggtccagctaa

SEQ ID NO: 4840 - DNA, 2010 bp, synthetic construct
  source 1..2010: mol_type = other DNA
atggccttaccagtgaccgccttgctcctgccgctggccttgctgctccacgccgccaggccggcatgcgctagaagcgaagatcggtatcggaaccccaagggtacccagatcgtgctgacacagagccccgccatcatgtctgttagccctggcgagaaagtgaccatgacctgtagcgccagcagcagcgtgaactacatgcactggttccagcagaagcccggcacaagccctaagctgtgggtgtacagcaccagcaatctggcctctggcgtgccagccagattttctggctctggcagcggcaccagctacagcctgacaatcagcagcatggaagccgaggatgccgccacctactattgtcagcagcggagcatctacccaccttggacatttggcggaggcaccaagctggaaatcaaactcgagatccagaaccctgatcctgccgtgtaccagctgcgggatagcaagagcagcgacaagagcgtgtgtctgttcaccgacttcgacagccagaccaacgtgtcccagagcaaggactccgacgtgtacatcaccgataagtgcgtgctggacatgcggagcatggacttcaagagcaactccgccgtggcctggtccaacaagtccgatttcgcctgcgccaacgccttcaacaacagcattatccccgaggacacattcttcccaagccccgagagcagctgcgacgtgaagctggtggaaaagagcttcgagacagacaccaacctgaacttccagaacctgagcgtgatcggcttcagaatcctgctgctgaaagtggccggctttaacctgctgatgaccctgcggctgtggtccagctctagtcgcgccaagagaagcggatctggcgtgaagcagaccctgaatttcgacctgctgaagctggctggcgacgtggaatccaacccaggccctactagtgccaccatggactggatttggcgcatccttttccttgtcggcgctgctaccggcgcccattccgggcccgccagaagcgaggacagatacagaaaccccaaaggatccggcggcggaggatctggcggaggcggatctgggggcggaggctctttcgaagttcagctccagcagagcggccctgagcttgtgaaacctggcgcttccgtgaagatcagctgcaaggccagcggctacagcttcaccggctacaccatgaactgggtcaagcagtcccacggcaagaacctggaatggatcggcctgattaacccctacaacggcggcacctcctacaaccagaagttcaaggccaaggccacactgaccgtggacaagagcagcagcacagcctacatgcagctgaagtccctgaccagcgaggacagcgccgtgtactactgcgccagagattacggctacgtgctggactattggggccagggcacaagcgtgacagtgtctagtacgcgtgaggacctgaagaacgtgttcccacctgaggtggccgtgttcgagcctagcgaggccgagatcagccacacccagaaagccaccctcgtgtgcctggctaccggcttctaccccgaccatgtggaactgtcttggtgggtcaacggcaaagaggtgcacagcggcgtgtgtaccgacccccagccactgaaagaacagcccgccctgaacgacagccggtactgcctgagcagcagactgagagtgtccgccaccttctggcagaacccccggaaccacttcagatgccaggtgcagttctacggcctgagcgagaacgacgagtggacccaggacagagccaagcccgtgacccagatcgtgtctgccgaagcctggggcagagccgattgcggctttaccagcgagagctaccagcagggcgtgctgagcgccaccatcctgtacgagatcctgctgggcaaggccaccctgtacgccgtgctggtgtctgccctggtgctgatggctatggtcaagcggaaggacagccggggataa

SEQ ID NO: 4841 - DNA, 1857 bp, synthetic construct
  source 1..1857: mol_type = other DNA
atggccttaccagtgaccgccttgctcctgccgctggccttgctgctccacgccgccaggccggacatccagatgacacagagccctagcagcctgtctgccagcgtgggagacagagtgaccatcacatgcaaggccagccagagcgtgtccaacgacgtgacctggtatcagcagaagcctggacaggcccctaagctgctgatctacagcgccagcaacagatacagcggagtgcccgccagattttccggctctggctacggcaccgagttcacctttaccatcagcagcgtgcagagcgaggacttcgccgtgtacttctgccagcaagactacagcagcttcggccagggcaccaagctggaaatcaagagactcgaggacctgaagaacgtgttcccacctgaggtggccgtgttcgagcctagcgaggccgagatcagccacacccagaaagccaccctcgtgtgcctggctaccggcttctaccccgaccatgtggaactgtcttggtgggtcaacggcaaagaggtgcacagcggcgtgtgtaccgacccccagccactgaaagaacagcccgccctgaacgacagccggtactgcctgagcagcagactgagagtgtccgccaccttctggcagaacccccggaaccacttcagatgccaggtgcagttctacggcctgagcgagaacgacgagtggacccaggacagagccaagcccgtgacccagatcgtgtctgccgaagcctggggcagagccgattgcggctttaccagcgagagctaccagcagggcgtgctgagcgcctactacatgtacttgttgctgctgctgaagtccgtggtgtacttcgccatcatcacatgctgcctgctgcggagaaccgccttctgctgcaacggcgagaagtctagggccaagcgatctggatctggagcaacaaacttctcactactcaaacaagcaggtgacgtggaggagaatcccgggcctactagtatggactggatttggcgcatccttttccttgtcggcgctgctaccggcgcgcattccttcgaacaggtgcagctggtggaatctggacctggcgtggtgcagcctggcagaagcctgagaatcagctgtgccgtgtccggcttcagcgtgaccaactacggcgtgcactgggtgcgccagccacctggaaaaggactggaatggctgggcgtgatctgggctggcggcatcaccaactacaacagcgccttcatgtcccggctgaccatctccaaggacaacagcaagaacaccgtgtacctccagatgaacagcctgcgggccgaggacaccgccatgtactactgtgcttccagaggcggccactacggctacgccctggattattggggccagggaaccctcgtgaccgtgtcctctacgcgtatccagaaccctgatcctgccgtgtaccagctgcgggatagcaagagcagcgacaagagcgtgtgtctgttcaccgacttcgacagccagaccaacgtgtcccagagcaaggactccgacgtgtacatcaccgataagtgcgtgctggacatgcggagcatggacttcaagagcaactccgccgtggcctggtccaacaagtccgatttcgcctgcgccaacgccttcaacaacagcattatccccgaggacacattcttcccaagccccgagagcagctgcgacgtgaagctggtggaaaagagcttcgagacagacaccaacctgaacttccagaacctgagcgtgatcggcttcagaatcctgctgctgaaagtggccggctttaacctgctgatgaccctgcggctgtggtccagctaa

SEQ ID NO: 4842 - DNA, 1836 bp, synthetic construct
  source 1..1836: mol_type = other DNA
atggccttaccagtgaccgccttgctcctgccgctggccttgctgctccacgccgccaggccggacatccagctgacacagagccctagcacactgagcgccagcatgggcgacagagtgaccatcacatgtagcgcctctagcagcgtgcggttcatccactggtatcagcagaagcctggcaaggcccctaagcggctgatctacgataccagcaaactggcctctggcgtgcccagcagattttctggctctggcagcggcaccgacttcaccctgacaatatctagcctccagcctgaggacttcgccacctactactgtcagcagtggggcagcagccctttcacctttggacagggcaccaaggtggaaatcaagctcgaggacctgaagaacgtgttcccacctgaggtggccgtgttcgagcctagcgaggccgagatcagccacacccagaaagccaccctcgtgtgcctggctaccggcttctaccccgaccatgtggaactgtcttggtgggtcaacggcaaagaggtgcacagcggcgtgtgtaccgacccccagccactgaaagaacagcccgccctgaacgacagccggtactgcctgagcagcagactgagagtgtccgccaccttctggcagaacccccggaaccacttcagatgccaggtgcagttctacggcctgagcgagaacgacgagtggacccaggacagagccaagcccgtgacccagatcgtgtctgccgaagcctggggcagagccgattgcggctttaccagcgagagctaccagcagggcgtgctgagcgcctactacatgtacttgttgctgctgctgaagtccgtggtgtacttcgccatcatcacatgctgcctgctgcggagaaccgccttctgctgcaacggcgagaagtctagggccaagcgatctggatctggagcaacaaacttctcactactcaaacaagcaggtgacgtggaggagaatcccgggcctactagtatggactggatttggcgcatccttttccttgtcggcgctgctaccggcgcgcattccttcgaagtgcagctggttgagtacggtggcggactggttcaacctggcggtagcctgagactgtcttgtgccgccagcggcttcaacatcaaggactactatatccactgggtccgacaggccccaggcaaaggacttgaatgggttgcctggatcgaccccgagaacggcgataccgagttcgtgcccaagtttcagggcagagccaccatgagcgccgacacctctaagaacacagcctacctccagatgaacagcctgagagccgaggacaccgccgtgtactactgtaaaaccggcggcttttggggccagggcacactggtcacagtcagctctacgcgtatccagaaccctgatcctgccgtgtaccagctgcgggatagcaagagcagcgacaagagcgtgtgtctgttcaccgacttcgacagccagaccaacgtgtcccagagcaaggactccgacgtgtacatcaccgataagtgcgtgctggacatgcggagcatggacttcaagagcaactccgccgtggcctggtccaacaagtccgatttcgcctgcgccaacgccttcaacaacagcattatccccgaggacacattcttcccaagccccgagagcagctgcgacgtgaagctggtggaaaagagcttcgagacagacaccaacctgaacttccagaacctgagcgtgatcggcttcagaatcctgctgctgaaagtggccggctttaacctgctgatgaccctgcggctgtggtccagctaa

SEQ ID NO: 4843 - DNA, 1851 bp, synthetic construct
  source 1..1851: mol_type = other DNA
atggccttaccagtgaccgccttgctcctgccgctggccttgctgctccacgccgccaggccggacatccagatgacacagagccctagcagcctgtctgccagcgtgggagacagagtgaccatcacatgcaaggccagccaggatgtgggcacagccgtggattggtatcagcagaagcctggcaaggcccctaagctgctgatctactgggccagcacaagacacacaggcgtgcccagcagattttctggcagcggctctggcaccgacttcaccctgacaatatccagcctccagcctgaggacttcgccacctactactgccagcagtacaacagctaccctctgaccttcggccagggcaccaaggtggaaatcaaaagactcgaggacctgaagaacgtgttcccacctgaggtggccgtgttcgagcctagcgaggccgagatcagccacacccagaaagccaccctcgtgtgcctggctaccggcttctaccccgaccatgtggaactgtcttggtgggtcaacggcaaagaggtgcacagcggcgtgtgtaccgacccccagccactgaaagaacagcccgccctgaacgacagccggtactgcctgagcagcagactgagagtgtccgccaccttctggcagaacccccggaaccacttcagatgccaggtgcagttctacggcctgagcgagaacgacgagtggacccaggacagagccaagcccgtgacccagatcgtgtctgccgaagcctggggcagagccgattgcggctttaccagcgagagctaccagcagggcgtgctgagcgcctactacatgtacttgttgctgctgctgaagtccgtggtgtacttcgccatcatcacatgctgcctgctgcggagaaccgccttctgctgcaacggcgagaagtctagggccaagcgatctggatctggagcaacaaacttctcactactcaaacaagcaggtgacgtggaggagaatcccgggcctactagtatggactggatttggcgcatccttttccttgtcggcgctgctaccggcgcgcattccttcgaagtgcagctggttgaatcaggtggcggcctggttcaacctggcggatctctgagactgagctgtgccgccagcggctacacctttaccgagtacacaatccactgggtccgacaggcccctggcaaaggacttgagtgggtcgccaacatcaaccccaacaatggcggcaccacctacaaccagaagttcgaggacagattcaccatcagccgggacaacagcaagaacaccctgtacctccagatgaactccctgagagccgaggacaccgccgtgtactattgtgccagaggctggaacttcgactactggggccagggaacactggtcaccgttagctctacgcgtatccagaaccctgatcctgccgtgtaccagctgcgggatagcaagagcagcgacaagagcgtgtgtctgttcaccgacttcgacagccagaccaacgtgtcccagagcaaggactccgacgtgtacatcaccgataagtgcgtgctggacatgcggagcatggacttcaagagcaactccgccgtggcctggtccaacaagtccgatttcgcctgcgccaacgccttcaacaacagcattatccccgaggacacattcttcccaagccccgagagcagctgcgacgtgaagctggtggaaaagagcttcgagacagacaccaacctgaacttccagaacctgagcgtgatcggcttcagaatcctgctgctgaaagtggccggctttaacctgctgatgaccctgcggctgtggtccagctaa

SEQ ID NO: 4844 - DNA, 1953 bp, synthetic construct
  source 1..1953: mol_type = other DNA
atggccttaccagtgaccgccttgctcctgccgctggccttgctgctccacgccgccaggccggcatgcgctagaagcgaagatcggtatcggaaccccaagggtacccaggttcagctccagcagtctggacctggcctggtcaagcctagccagacactgtctctgacctgtgccatcagcggcgatagcgtgtcctctaatagagccgcctggaactggatcagacagagccctagcagaggactccagtggctgggcagaacctactaccgcagcaagtggtacaacgactacgccgtgtctctgcggagccggatcaccatcaatcccgtgaccagcaagaaccaggtggccctgcacatgaacagcgtgacccctgaagataccgccgtgtactactgtgccagagccggaattgtggtggtgcccggacctgagacattctactactacgaccacggcctggacgtgtggggccagggaacaacagtgactgtctcttctctcgaggacctgaagaacgtgttcccacctgaggtggccgtgttcgagcctagcgaggccgagatcagccacacccagaaagccaccctcgtgtgcctggctaccggcttctaccccgaccatgtggaactgtcttggtgggtcaacggcaaagaggtgcacagcggcgtgtgtaccgacccccagccactgaaagaacagcccgccctgaacgacagccggtactgcctgagcagcagactgagagtgtccgccaccttctggcagaacccccggaaccacttcagatgccaggtgcagttctacggcctgagcgagaacgacgagtggacccaggacagagccaagcccgtgacccagatcgtgtctgccgaagcctggggcagagccgattgcggctttaccagcgagagctaccagcagggcgtgctgagcgcctactacatgtacttgttgctgctgctgaagtccgtggtgtacttcgccatcatcacatgctgcctgctgcggagaaccgccttctgctgcaacggcgagaagtctagggccaagcgatctggatctggagcaacaaacttctcactactcaaacaagcaggtgacgtggaggagaatcccgggcctactagtatggactggatttggcgcatccttttccttgtcggcgctgctaccggcgcgcattccttcgaagacatccagatgacacagagcccctctagcctgtctgccagcgtgggagacagagtgaccatcacctgtagagccagccagagcatcagaaactacctgaactggtatcagcaaaagcccggcaaggcccctgagctgctgattcatgctgcaagcagcctccagagcggcgtgccaagcagattttctggcagcggcagcggaaccgacttcaccctgacaatatctagcctccagcctgaggacttcgccagctactactgccagcagagctacagcgcccctcctatcacctttggacagggcaccagactggaaatcaagacgcgtatccagaaccctgatcctgccgtgtaccagctgcgggatagcaagagcagcgacaagagcgtgtgtctgttcaccgacttcgacagccagaccaacgtgtcccagagcaaggactccgacgtgtacatcaccgataagtgcgtgctggacatgcggagcatggacttcaagagcaactccgccgtggcctggtccaacaagtccgatttcgcctgcgccaacgccttcaacaacagcattatccccgaggacacattcttcccaagccccgagagcagctgcgacgtgaagctggtggaaaagagcttcgagacagacaccaacctgaacttccagaacctgagcgtgatcggcttcagaatcctgctgctgaaagtggccggctttaacctgctgatgaccctgcggctgtggtccagctaa

SEQ ID NO: 4845 - DNA, 1935 bp, synthetic construct
  source 1..1935: mol_type = other DNA
atggccttaccagtgaccgccttgctcctgccgctggccttgctgctccacgccgccaggccggcatgccgcgcacgcagcgaggacaggtataggaaccccaaaggaagtgcgggtaccgacatcgtgatgacacagagccctgatagcctggccgtgtctctgggagagagagccaccatcaactgcaagagcagccagagcctgctgaacagcggcaaccagaagaactacctggcctggtatcagcagaagcccggccagcctcctaagctgctgatctactggggcagcaccagatccacaggcgtgcccgatagattttctggctctggcagcggcaccgacttcaccctgacaatttctagcctgcaagccgaggacgtggccgtgtactactgccagaacgactacacataccccttcaccttcggccagggcaccaagctggaaatcaaactcgaggacctgaagaacgtgttcccacctgaggtggccgtgttcgagcctagcgaggccgagatcagccacacccagaaagccaccctcgtgtgcctggctaccggcttctaccccgaccatgtggaactgtcttggtgggtcaacggcaaagaggtgcacagcggcgtgtgtaccgacccccagccactgaaagaacagcccgccctgaacgacagccggtactgcctgagcagcagactgagagtgtccgccaccttctggcagaacccccggaaccacttcagatgccaggtgcagttctacggcctgagcgagaacgacgagtggacccaggacagagccaagcccgtgacccagatcgtgtctgccgaagcctggggcagagccgattgcggctttaccagcgagagctaccagcagggcgtgctgagcgcctactacatgtacttgttgctgctgctgaagtccgtggtgtacttcgccatcatcacatgctgcctgctgcggagaaccgccttctgctgcaacggcgagaagtctagggccaagcgatctggatctggagcaacaaacttctcactactcaaacaagcaggtgacgtggaggagaatcccgggcctactagtatggactggatttggcgcatccttttccttgtcggcgctgctaccggcgcgcattccttcgaacaagttcagctggttcagagcggagccgaagtgaagaaacctggggcctctgtgaaggtgtcctgcaaggcttccggctataccttcaccagcttttggctgaactgggtccgacaggcccctggacaaggactggaatggatgggcaacatctaccccagcgacagctacaccgtgtacaaccagaaattcaaggaccgcgtgaccatgaccagggacaccagcacaagcacagtgtacatggaactgagcagcctgcggagcgaggataccgccgtgtattattgcgccagaacctggcggggcaacagcttcgattattggggccagggaaccaccgtgaccgtgtcatctacgcgtatccagaaccctgatcctgccgtgtaccagctgcgggatagcaagagcagcgacaagagcgtgtgtctgttcaccgacttcgacagccagaccaacgtgtcccagagcaaggactccgacgtgtacatcaccgataagtgcgtgctggacatgcggagcatggacttcaagagcaactccgccgtggcctggtccaacaagtccgatttcgcctgcgccaacgccttcaacaacagcattatccccgaggacacattcttcccaagccccgagagcagctgcgacgtgaagctggtggaaaagagcttcgagacagacaccaacctgaacttccagaacctgagcgtgatcggcttcagaatcctgctgctgaaagtggccggctttaacctgctgatgaccctgcggctgtggtccagctaa

SEQ ID NO: 4846 - DNA, 1923 bp, synthetic construct
  source 1..1923: mol_type = other DNA
atggccttaccagtgaccgccttgctcctgccgctggccttgctgctccacgccgccaggccggcatgcgctagaagcgaagatcggtatcggaaccccaagggtaccgacatcgtgatgacacagagccctgatagcctggccgtgtctctgggagagagagccaccatcaactgcaagagcagccagagcctgctgaacagcggcaaccagaagaactacctggcctggtatcagcagaagcccggccagcctcctaagctgctgatctactggggcagcaccagatccacaggcgtgcccgatagattttctggctctggcagcggcaccgacttcaccctgacaatttctagcctgcaagccgaggacgtggccgtgtactactgccagaacgactacacataccccttcaccttcggccagggcaccaagctggaaatcaaactcgaggacctgaagaacgtgttcccacctgaggtggccgtgttcgagcctagcgaggccgagatcagccacacccagaaagccaccctcgtgtgcctggctaccggcttctaccccgaccatgtggaactgtcttggtgggtcaacggcaaagaggtgcacagcggcgtgtgtaccgacccccagccactgaaagaacagcccgccctgaacgacagccggtactgcctgagcagcagactgagagtgtccgccaccttctggcagaacccccggaaccacttcagatgccaggtgcagttctacggcctgagcgagaacgacgagtggacccaggacagagccaagcccgtgacccagatcgtgtctgccgaagcctggggcagagccgattgcggctttaccagcgagagctaccagcagggcgtgctgagcgcctactacatgtacttgttgctgctgctgaagtccgtggtgtacttcgccatcatcacatgctgcctgctgcggagaaccgccttctgctgcaacggcgagaagtctagggccaagcgatctggatctggagcaacaaacttctcactactcaaacaagcaggtgacgtggaggagaatcccgggcctactagtatggactggatttggcgcatccttttccttgtcggcgctgctaccggcgcgcattccttcgaacaagttcagctggttcagagcggagccgaagtgaagaaacctggggcctctgtgaaggtgtcctgcaaggcttccggctataccttcaccagcttttggctgaactgggtccgacaggcccctggacaaggactggaatggatgggcaacatctaccccagcgacagctacaccgtgtacaaccagaaattcaaggaccgcgtgaccatgaccagggacaccagcacaagcacagtgtacatggaactgagcagcctgcggagcgaggataccgccgtgtattattgcgccagaacctggcggggcaacagcttcgattattggggccagggaaccaccgtgaccgtgtcatctacgcgtatccagaaccctgatcctgccgtgtaccagctgcgggatagcaagagcagcgacaagagcgtgtgtctgttcaccgacttcgacagccagaccaacgtgtcccagagcaaggactccgacgtgtacatcaccgataagtgcgtgctggacatgcggagcatggacttcaagagcaactccgccgtggcctggtccaacaagtccgatttcgcctgcgccaacgccttcaacaacagcattatccccgaggacacattcttcccaagccccgagagcagctgcgacgtgaagctggtggaaaagagcttcgagacagacaccaacctgaacttccagaacctgagcgtgatcggcttcagaatcctgctgctgaaagtggccggctttaacctgctgatgaccctgcggctgtggtccagctaa

SEQ ID NO: 4847 - DNA, 1869 bp, synthetic construct
  source 1..1869: mol_type = other DNA
atggccttaccagtgaccgccttgctcctgccgctggccttgctgctccacgccgccaggccggacatccagatgacacagagccctagcagcctgtctgccagcgtgggagacagagtgaccatcacatgcaaggccagcgaccacatcaacaactggctggcctggtatcagcagaagcctggacaggcccctaagctgctgatctacggcgctaccacactggaaacaggcgtgcccagcagattttctggcagcggctctggcaccgactacaccctgacaatatccagcctccagcctgaggacttcgccacctactactgtcagcagagctggaacaccccttggacattcggccagggcaccaagctggaaatcaagagactcgaggacctgaagaacgtgttcccacctgaggtggccgtgttcgagcctagcgaggccgagatcagccacacccagaaagccaccctcgtgtgcctggctaccggcttctaccccgaccatgtggaactgtcttggtgggtcaacggcaaagaggtgcacagcggcgtgtgtaccgacccccagccactgaaagaacagcccgccctgaacgacagccggtactgcctgagcagcagactgagagtgtccgccaccttctggcagaacccccggaaccacttcagatgccaggtgcagttctacggcctgagcgagaacgacgagtggacccaggacagagccaagcccgtgacccagatcgtgtctgccgaagcctggggcagagccgattgcgacgtgaagctggtggaaaagagcttcgagacagacaccaacctgaacttccagaacctgagcgtgatcggcttcagaatcctgctgctgaaagtggccggctttaacctgctgatgaccctgcggctgtggtccagcagggccaagcgatctggatctggagcaacaaacttctcactactcaaacaagcaggtgacgtggaggagaatcccgggcctactagtatggactggatttggcgcatccttttccttgtcggcgctgctaccggcgcgcattccttcgaacaagttcagcttcaacagcctggcgctgagctggtcaaacctggcgcttctgtgaagatgagctgcaaagccagcggctacgccttcagcagctactggatcaactggatgaagcagaaacccggccagggactcgaatggatcggccaaatctatcccggcgacggcgacaccaactacaacggcaagttcaagggcagagccacactgaccgccgatacctctagcagcacagcctacatgcagctgagcagcctgaccagcgaagatagcgccgtgtacttctgtgcccggtccatcacaacagtcgtgggctgcgctatggactattggggccagggaacaagcgtgaccgtgtctagtacgcgtatccagaaccctgatcctgccgtgtaccagctgcgggatagcaagagcagcgacaagagcgtgtgtctgttcaccgacttcgacagccagaccaacgtgtcccagagcaaggactccgacgtgtacatcaccgataagtgcgtgctggacatgcggagcatggacttcaagagcaactccgccgtggcctggtccaacaagtccgatttcgcctgcgccaacgccttcaacaacagcattatccccgaggacacattcttcccaagccccgagagcagctgcggctttaccagcgagagctaccagcagggcgtgctgagcgccaccatcctgtacgagatcctgctgggcaaggccaccctgtacgccgtgctggtgtctgccctggtgctgatggctatggtcaagcggaaggacagccggggataa

SEQ ID NO: 4848 - DNA, 1977 bp, synthetic construct
  source 1..1977: mol_type = other DNA
atggccttaccagtgaccgccttgctcctgccgctggccttgctgctccacgccgccaggccggctagaagcgaagatcggtatcggaaccccaaggaattccaggttcagctccagcagtctggacctggcctggtcaagcctagccagacactgtctctgacctgtgccatcagcggcgatagcgtgtcctctaatagagccgcctggaactggatcagacagagccctagcagaggactccagtggctgggcagaacctactaccgcagcaagtggtacaacgactacgccgtgtctctgcggagccggatcaccatcaatcccgtgaccagcaagaaccaggtggccctgcacatgaacagcgtgacccctgaagataccgccgtgtactactgtgccagagccggaattgtggtggtgcccggacctgagacattctactactacgaccacggcctggacgtgtggggccagggaacaacagtgactgtctcttctctcgaggacctgaagaacgtgttcccacctgaggtggccgtgttcgagcctagcgaggccgagatcagccacacccagaaagccaccctcgtgtgcctggctaccggcttctaccccgaccatgtggaactgtcttggtgggtcaacggcaaagaggtgcacagcggcgtgtgtaccgacccccagccactgaaagaacagcccgccctgaacgacagccggtactgcctgagcagcagactgagagtgtccgccaccttctggcagaacccccggaaccacttcagatgccaggtgcagttctacggcctgagcgagaacgacgagtggacccaggacagagccaagcccgtgacccagatcgtgtctgccgaagcctggggcagagccgattgcggctttaccagcgagagctaccagcagggcgtgctgagcgccaccatcctgtacgagatcctgctgggcaaggccaccctgtacgccgtgctggtgtctgccctggtgctgatggctatggtcaagcggaaggacagccggggaagggccaagcgatctggatctggagcaacaaacttctcactactcaaacaagcaggtgacgtggaggagaatcccgggcctactagtatggactggatttggcgcatccttttccttgtcggcgctgctaccggcgcgcattccttcgaagacatccagatgacacagagcccctctagcctgtctgccagcgtgggagacagagtgaccatcacctgtagagccagccagagcatcagaaactacctgaactggtatcagcaaaagcccggcaaggcccctgagctgctgattcatgctgcaagcagcctccagagcggcgtgccaagcagattttctggcagcggcagcggaaccgacttcaccctgacaatatctagcctccagcctgaggacttcgccagctactactgccagcagagctacagcgcccctcctatcacctttggacagggcaccagactggaaatcaagacgcgtgccagaagcgaggacagatacagaaaccccaaaatccagaaccctgatcctgccgtgtaccagctgcgggatagcaagagcagcgacaagagcgtgtgtctgttcaccgacttcgacagccagaccaacgtgtcccagagcaaggactccgacgtgtacatcaccgataagtgcgtgctggacatgcggagcatggacttcaagagcaactccgccgtggcctggtccaacaagtccgatttcgcctgcgccaacgccttcaacaacagcattatccccgaggacacattcttcccaagccccgagagcagctgcgacgtgaagctggtggaaaagagcttcgagacagacaccaacctgaacttccagaacctgagcgtgatcggcttcagaatcctgctgctgaaagtggccggctttaacctgctgatgaccctgcggctgtggtccagctaa

SEQ ID NO: 4849 - DNA, 1926 bp, synthetic construct
  source 1..1926: mol_type = other DNA
atggccttaccagtgaccgccttgctcctgccgctggccttgctgctccacgccgccaggccggctagaagcgaagatcggtatcggaaccccaaggaattcgacatccagatgacacagagccctagcagcctgtctgccagcgtgggagacagagtgaccatcacctgtagagccagccaggacatcagcaactacctgaactggtatcagcagaagcccggcaaggcccctaagctgctgatctactacaccagcagactgcacagcggcgtgcccagcagattttctggctctggcagcggcaccgacttcaccctgacaatatctagcctccagcctgaggacttcgccacctactattgccagcagggcaacaccctgccttacacatttggacagggcaccaaggtggaaatcaagagactcgaggacctgaagaacgtgttcccacctgaggtggccgtgttcgagcctagcgaggccgagatcagccacacccagaaagccaccctcgtgtgcctggctaccggcttctaccccgaccatgtggaactgtcttggtgggtcaacggcaaagaggtgcacagcggcgtgtgtaccgacccccagccactgaaagaacagcccgccctgaacgacagccggtactgcctgagcagcagactgagagtgtccgccaccttctggcagaacccccggaaccacttcagatgccaggtgcagttctacggcctgagcgagaacgacgagtggacccaggacagagccaagcccgtgacccagatcgtgtctgccgaagcctggggcagagccgattgcggctttaccagcgagagctaccagcagggcgtgctgagcgccaccatcctgtacgagatcctgctgggcaaggccaccctgtacgccgtgctggtgtctgccctggtgctgatggctatggtcaagcggaaggacagccggggaagggccaagcgatctggatctggagcaacaaacttctcactactcaaacaagcaggtgacgtggaggagaatcccgggcctactagtatggactggatttggcgcatccttttccttgtcggcgctgctaccggcgcgcattccttcgaagtgcagctggttgaatcaggtggcggcctggttcaacctggcggatctctgagactgagctgtgccgccagcggcttcaccttcagcgactactttatgagctgggtccgacaggcccctggcaaaggacttgaatgggtcgccaccatcagcaatggcggcacctacacttactaccccgacagcgtgaagggcagattcaccatctccagagacaacagcaagaacaccctgtacctccagatgaactccctgagagccgaggacaccgccgtgtactactgcgccagattcgacggctacatcttcgactattggggccagggcaccctggtcacagtctcttctacgcgtgccagaagcgaggacagatacagaaaccccaaaatccagaaccctgatcctgccgtgtaccagctgcgggatagcaagagcagcgacaagagcgtgtgtctgttcaccgacttcgacagccagaccaacgtgtcccagagcaaggactccgacgtgtacatcaccgataagtgcgtgctggacatgcggagcatggacttcaagagcaactccgccgtggcctggtccaacaagtccgatttcgcctgcgccaacgccttcaacaacagcattatccccgaggacacattcttcccaagccccgagagcagctgcgacgtgaagctggtggaaaagagcttcgagacagacaccaacctgaacttccagaacctgagcgtgatcggcttcagaatcctgctgctgaaagtggccggctttaacctgctgatgaccctgcggctgtggtccagctaa

SEQ ID NO: 4850 - DNA, 1974 bp, synthetic construct
  source 1..1974: mol_type = other DNA
atggccttaccagtgaccgccttgctcctgccgctggccttgctgctccacgccgccaggccgagctacgtgctgacacagcctccatccgtgtctgtggctccaggacagaccgccagaatcacatgcggcggcaacaacatcggcagcaagagcgtgcactggtatcagcagccacctggacaggctccagtggtggtggtgtacgacgacagcgatagacctagcggcatccccgagagattcagcggcagcaattccggcaataccgccacactgaccatcagcagagtggaagctggcgacgaggccgtgtactactgccaagtgtgggacagcagcagcgatcacgtggtgtttggcggcggaacaaagctgacagtgcttctcgaggctagaagcgaagatcggtatcggaaccccaaggaggacctgaagaacgtgttcccacctgaggtggccgtgttcgagcctagcgaggccgagatcagccacacccagaaagccaccctcgtgtgcctggctaccggcttctaccccgaccatgtggaactgtcttggtgggtcaacggcaaagaggtgcacagcggcgtgtgtaccgacccccagccactgaaagaacagcccgccctgaacgacagccggtactgcctgagcagcagactgagagtgtccgccaccttctggcagaacccccggaaccacttcagatgccaggtgcagttctacggcctgagcgagaacgacgagtggacccaggacagagccaagcccgtgacccagatcgtgtctgccgaagcctggggcagagccgattgcggctttaccagcgagagctaccagcagggcgtgctgagcgccaccatcctgtacgagatcctgctgggcaaggccaccctgtacgccgtgctggtgtctgccctggtgctgatggctatggtcaagcggaaggacagccggggaagggccaagcgatctggatctggagcaacaaacttctcactactcaaacaagcaggtgacgtggaggagaatcccgggcctactagtatggactggatttggcgcatccttttccttgtcggcgctgctaccggcgcccattccgccagaagcgaggacagatacagaaaccccaaattcgaacaactccagctgcaagagtctggccctggcctggtcaagcctagcgaaacactgagcctgacctgtaccgtgtctggcggctctatcagctccggcagctatttctggggctggatcagacaacctcctggcaaaggactggaatggatcggctccatctactacagcggcatcacctactacaaccccagcctgaagtccagagtgaccatctccgtggacaccagcaagaaccagttctccctgaagctgagcagcgtgacagccgccgataccgccgtgtattattgtgccagacatgacggcgctgtggccggcctgtttgattattggggacagggcaccctggtcaccgtgtcatctgctacgcgtgccagaagcgaggacagatacagaaaccccaaaatccagaaccctgatcctgccgtgtaccagctgcgggatagcaagagcagcgacaagagcgtgtgtctgttcaccgacttcgacagccagaccaacgtgtcccagagcaaggactccgacgtgtacatcaccgataagtgcgtgctggacatgcggagcatggacttcaagagcaactccgccgtggcctggtccaacaagtccgatttcgcctgcgccaacgccttcaacaacagcattatccccgaggacacattcttcccaagccccgagagcagctgcgacgtgaagctggtggaaaagagcttcgagacagacaccaacctgaacttccagaacctgagcgtgatcggcttcagaatcctgctgctgaaagtggccggctttaacctgctgatgaccctgcggctgtggtccagctaa

SEQ ID NO: 4851 - DNA, 1962 bp, synthetic construct
  source 1..1962: mol_type = other DNA
atggccttaccagtgaccgccttgctcctgccgctggccttgctgctccacgccgccaggccggcatgccgcgcacgcagcgaggacaggtataggaaccccaaaggaagtgcgggtacccaggttcagctccagcagtctggacctggcctggtcaagcctagccagacactgtctctgacctgtgccatcagcggcgatagcgtgtcctctaatagagccgcctggaactggatcagacagagccctagcagaggactccagtggctgggcagaacctactaccgcagcaagtggtacaacgactacgccgtgtctctgcggagccggatcaccatcaatcccgtgaccagcaagaaccaggtggccctgcacatgaacagcgtgacccctgaagataccgccgtgtactactgtgccagagccggaattgtggtggtgcccggacctgagacattctactactacgaccacggcctggacgtgtggggccagggaacaacagtgactgtctcttctctcgaggacctgaagaacgtgttcccacctgaggtggccgtgttcgagcctagcgaggccgagatcagccacacccagaaagccaccctcgtgtgcctggctaccggcttctaccccgaccatgtggaactgtcttggtgggtcaacggcaaagaggtgcacagcggcgtgtgtaccgacccccagccactgaaagaacagcccgccctgaacgacagccggtactgcctgagcagcagactgagagtgtccgccaccttctggcagaacccccggaaccacttcagatgccaggtgcagttctacggcctgagcgagaacgacgagtggacccaggacagagccaagcccgtgacccagatcgtgtctgccgaagcctggggcagagccgattgcggctttaccagcgagagctaccagcagggcgtgctgagcgccaccatcctgtacgagatcctgctgggcaaggccaccctgtacgccgtgctggtgtctgccctggtgctgatggctatggtcaagcggaaggacagccggggaagggccaagcgatgtggatctggagcaacaaacttctcactactcaaacaagcaggtgacgtggaggagaatcccgggcctactagtatggactggatttggcgcatccttttccttgtcggcgctgctaccggcgcgcattccttcgaagacatccagatgacacagagcccctctagcctgtctgccagcgtgggagacagagtgaccatcacctgtagagccagccagagcatcagaaactacctgaactggtatcagcaaaagcccggcaaggcccctgagctgctgattcatgctgcaagcagcctccagagcggcgtgccaagcagattttctggcagcggcagcggaaccgacttcaccctgacaatatctagcctccagcctgaggacttcgccagctactactgccagcagagctacagcgcccctcctatcacctttggacagggcaccagactggaaatcaagacgcgtatccagaaccctgatcctgccgtgtaccagctgcgggatagcaagagcagcgacaagagcgtgtgtctgttcaccgacttcgacagccagaccaacgtgtcccagagcaaggactccgacgtgtacatcaccgataagtgcgtgctggacatgcggagcatggacttcaagagcaactccgccgtggcctggtccaacaagtccgatttcgcctgcgccaacgccttcaacaacagcattatccccgaggacacattcttcccaagccccgagagcagctgcgacgtgaagctggtggaaaagagcttcgagacagacaccaacctgaacttccagaacctgagcgtgatcggcttcagaatcctgctgctgaaagtggccggctttaacctgctgatgaccctgcggctgtggtccagctaa

SEQ ID NO: 4852 - DNA, 1950 bp, synthetic construct
  source 1..1950: mol_type = other DNA
atggccttaccagtgaccgccttgctcctgccgctggccttgctgctccacgccgccaggccggcatgcgctagaagcgaagatcggtatcggaaccccaagggtacccaggttcagctccagcagtctggacctggcctggtcaagcctagccagacactgtctctgacctgtgccatcagcggcgatagcgtgtcctctaatagagccgcctggaactggatcagacagagccctagcagaggactccagtggctgggcagaacctactaccgcagcaagtggtacaacgactacgccgtgtctctgcggagccggatcaccatcaatcccgtgaccagcaagaaccaggtggccctgcacatgaacagcgtgacccctgaagataccgccgtgtactactgtgccagagccggaattgtggtggtgcccggacctgagacattctactactacgaccacggcctggacgtgtggggccagggaacaacagtgactgtctcttctctcgaggacctgaagaacgtgttcccacctgaggtggccgtgttcgagcctagcgaggccgagatcagccacacccagaaagccaccctcgtgtgcctggctaccggcttctaccccgaccatgtggaactgtcttggtgggtcaacggcaaagaggtgcacagcggcgtgtgtaccgacccccagccactgaaagaacagcccgccctgaacgacagccggtactgcctgagcagcagactgagagtgtccgccaccttctggcagaacccccggaaccacttcagatgccaggtgcagttctacggcctgagcgagaacgacgagtggacccaggacagagccaagcccgtgacccagatcgtgtctgccgaagcctggggcagagccgattgcggctttaccagcgagagctaccagcagggcgtgctgagcgccaccatcctgtacgagatcctgctgggcaaggccaccctgtacgccgtgctggtgtctgccctggtgctgatggctatggtcaagcggaaggacagccggggaagggccaagcgatctggatctggagcaacaaacttctcactactcaaacaagcaggtgacgtggaggagaatcccgggcctactagtatggactggatttggcgcatccttttccttgtcggcgctgctaccggcgcgcattccttcgaagacatccagatgacacagagcccctctagcctgtctgccagcgtgggagacagagtgaccatcacctgtagagccagccagagcatcagaaactacctgaactggtatcagcaaaagcccggcaaggcccctgagctgctgattcatgctgcaagcagcctccagagcggcgtgccaagcagattttctggcagcggcagcggaaccgacttcaccctgacaatatctagcctccagcctgaggacttcgccagctactactgccagcagagctacagcgcccctcctatcacctttggacagggcaccagactggaaatcaagacgcgtatccagaaccctgatcctgccgtgtaccagctgcgggatagcaagagcagcgacaagagcgtgtgtctgttcaccgacttcgacagccagaccaacgtgtcccagagcaaggactccgacgtgtacatcaccgataagtgcgtgctggacatgcggagcatggacttcaagagcaactccgccgtggcctggtccaacaagtccgatttcgcctgcgccaacgccttcaacaacagcattatccccgaggacacattcttcccaagccccgagagcagctgcgacgtgaagctggtggaaaagagcttcgagacagacaccaacctgaacttccagaacctgagcgtgatcggcttcagaatcctgctgctgaaagtggccggctttaacctgctgatgaccctgcggctgtggtccagctaa

SEQ ID NO: 4853 - DNA, 1932 bp, synthetic construct
  source 1..1932: mol_type = other DNA
atggccttaccagtgaccgccttgctcctgccgctggccttgctgctccacgccgccaggccggcatgccgcgcacgcagcgaggacaggtataggaaccccaaaggaagtgcgggtaccgacatcgtgatgacacagagccctgatagcctggccgtgtctctgggagagagagccaccatcaactgcaagagcagccagagcctgctgaacagcggcaaccagaagaactacctggcctggtatcagcagaagcccggccagcctcctaagctgctgatctactggggcagcaccagatccacaggcgtgcccgatagattttctggctctggcagcggcaccgacttcaccctgacaatttctagcctgcaagccgaggacgtggccgtgtactactgccagaacgactacacataccccttcaccttcggccagggcaccaagctggaaatcaaactcgaggacctgaagaacgtgttcccacctgaggtggccgtgttcgagcctagcgaggccgagatcagccacacccagaaagccaccctcgtgtgcctggctaccggcttctaccccgaccatgtggaactgtcttggtgggtcaacggcaaagaggtgcacagcggcgtgtgtaccgacccccagccactgaaagaacagcccgccctgaacgacagccggtactgcctgagcagcagactgagagtgtccgccaccttctggcagaacccccggaaccacttcagatgccaggtgcagttctacggcctgagcgagaacgacgagtggacccaggacagagccaagcccgtgacccagatcgtgtctgccgaagcctggggcagagccgattgcggctttaccagcgagagctaccagcagggcgtgctgagcgccaccatcctgtacgagatcctgctgggcaaggccaccctgtacgccgtgctggtgtctgccctggtgctgatggctatggtcaagcggaaggacagccggggaagggccaagcgatctggatctggagcaacaaacttctcactactcaaacaagcaggtgacgtggaggagaatcccgggcctactagtatggactggatttggcgcatccttttccttgtcggcgctgctaccggcgcgcattccttcgaacaagttcagctggttcagagcggagccgaagtgaagaaacctggggcctctgtgaaggtgtcctgcaaggcttccggctataccttcaccagcttttggctgaactgggtccgacaggcccctggacaaggactggaatggatgggcaacatctaccccagcgacagctacaccgtgtacaaccagaaattcaaggaccgcgtgaccatgaccagggacaccagcacaagcacagtgtacatggaactgagcagcctgcggagcgaggataccgccgtgtattattgcgccagaacctggcggggcaacagcttcgattattggggccagggaaccaccgtgaccgtgtcatctacgcgtatccagaaccctgatcctgccgtgtaccagctgcgggatagcaagagcagcgacaagagcgtgtgtctgttcaccgacttcgacagccagaccaacgtgtcccagagcaaggactccgacgtgtacatcaccgataagtgcgtgctggacatgcggagcatggacttcaagagcaactccgccgtggcctggtccaacaagtccgatttcgcctgcgccaacgccttcaacaacagcattatccccgaggacacattcttcccaagccccgagagcagctgcgacgtgaagctggtggaaaagagcttcgagacagacaccaacctgaacttccagaacctgagcgtgatcggcttcagaatcctgctgctgaaagtggccggctttaacctgctgatgaccctgcggctgtggtccagctaa

SEQ ID NO: 4854 - DNA, 1920 bp, synthetic construct
  source 1..1920: mol_type = other DNA
atggccttaccagtgaccgccttgctcctgccgctggccttgctgctccacgccgccaggccggcatgcgctagaagcgaagatcggtatcggaaccccaagggtaccgacatcgtgatgacacagagccctgatagcctggccgtgtctctgggagagagagccaccatcaactgcaagagcagccagagcctgctgaacagcggcaaccagaagaactacctggcctggtatcagcagaagcccggccagcctcctaagctgctgatctactggggcagcaccagatccacaggcgtgcccgatagattttctggctctggcagcggcaccgacttcaccctgacaatttctagcctgcaagccgaggacgtggccgtgtactactgccagaacgactacacataccccttcaccttcggccagggcaccaagctggaaatcaaactcgaggacctgaagaacgtgttcccacctgaggtggccgtgttcgagcctagcgaggccgagatcagccacacccagaaagccaccctcgtgtgcctggctaccggcttctaccccgaccatgtggaactgtcttggtgggtcaacggcaaagaggtgcacagcggcgtgtgtaccgacccccagccactgaaagaacagcccgccctgaacgacagccggtactgcctgagcagcagactgagagtgtccgccaccttctggcagaacccccggaaccacttcagatgccaggtgcagttctacggcctgagcgagaacgacgagtggacccaggacagagccaagcccgtgacccagatcgtgtctgccgaagcctggggcagagccgattgcggctttaccagcgagagctaccagcagggcgtgctgagcgccaccatcctgtacgagatcctgctgggcaaggccaccctgtacgccgtgctggtgtctgccctggtgctgatggctatggtcaagcggaaggacagccggggaagggccaagcgatctggatctggagcaacaaacttctcactactcaaacaagcaggtgacgtggaggagaatcccgggcctactagtatggactggatttggcgcatccttttccttgtcggcgctgctaccggcgcgcattccttcgaacaagttcagctggttcagagcggagccgaagtgaagaaacctggggcctctgtgaaggtgtcctgcaaggcttccggctataccttcaccagcttttggctgaactgggtccgacaggcccctggacaaggactggaatggatgggcaacatctaccccagcgacagctacaccgtgtacaaccagaaattcaaggaccgcgtgaccatgaccagggacaccagcacaagcacagtgtacatggaactgagcagcctgcggagcgaggataccgccgtgtattattgcgccagaacctggcggggcaacagcttcgattattggggccagggaaccaccgtgaccgtgtcatctacgcgtatccagaaccctgatcctgccgtgtaccagctgcgggatagcaagagcagcgacaagagcgtgtgtctgttcaccgacttcgacagccagaccaacgtgtcccagagcaaggactccgacgtgtacatcaccgataagtgcgtgctggacatgcggagcatggacttcaagagcaactccgccgtggcctggtccaacaagtccgatttcgcctgcgccaacgccttcaacaacagcattatccccgaggacacattcttcccaagccccgagagcagctgcgacgtgaagctggtggaaaagagcttcgagacagacaccaacctgaacttccagaacctgagcgtgatcggcttcagaatcctgctgctgaaagtggccggctttaacctgctgatgaccctgcggctgtggtccagctaa

SEQ ID NO: 4855 - DNA, 2793 bp, synthetic construct
  source 1..2793: mol_type = other DNA
atggccttaccagtgaccgccttgctcctgccgctggccttgctgctccacgccgccaggccggacatccagatgacacagagccctagcagcctgtctgccagcgtgggagacagagtgaccatcacatgcaaggccagcgaccacatcaacaactggctggcctggtatcagcagaagcctggacaggcccctaagctgctgatctacggcgctaccacactggaaacaggcgtgcccagcagattttctggcagcggctctggcaccgactacaccctgacaatatccagcctccagcctgaggacttcgccacctactactgtcagcagagctggaacaccccttggacattcggccagggcaccaagctggaaatcaagagactcgaggacctgaagaacgtgttcccacctgaggtggccgtgttcgagcctagcgaggccgagatcagccacacccagaaagccaccctcgtgtgcctggctaccggcttctaccccgaccatgtggaactgtcttggtgggtcaacggcaaagaggtgcacagcggcgtgtgtaccgacccccagccactgaaagaacagcccgccctgaacgacagccggtactgcctgagcagcagactgagagtgtccgccaccttctggcagaacccccggaaccacttcagatgccaggtgcagttctacggcctgagcgagaacgacgagtggacccaggacagagccaagcccgtgacccagatcgtgtctgccgaagcctggggcagagccgattgcggctttaccagcgagagctaccagcagggcgtgctgagcgccaccatcctgtacgagatcctgctgggcaaggccaccctgtacgccgtgctggtgtctgccctggtgctgatggctatggtcaagcggaaggacagccggggaagggccaagcgatctggatctggagcaacaaacttctcactactcaaacaagcaggtgacgtggaggagaatcccgggcctactagtgccaccatggccctgcctgtgacagctctgctgctgcctctggcactgctgctgcacgccgccagacctgcaagaagtgaagatcgctacaggaaccctaaggggtcaggaggaagcgaacttcctacacagggcaccttcagcaacgtgtccaccaatgtgtccccagccaagcctaccaccaccgcctgcgcacgcagcgaggacaggtataggaaccccaaaggaagtggatccggcggcggaggatctggcggaggcggatctgggggcggaggctctttcgaacaagttcagcttcaacagcctggcgctgagctggtcaaacctggcgcttctgtgaagatgagctgcaaagccagcggctacgccttcagcagctactggatcaactggatgaagcagaaacccggccagggactcgaatggatcggccaaatctatcccggcgacggcgacaccaactacaacggcaagttcaagggcagagccacactgaccgccgatacctctagcagcacagcctacatgcagctgagcagcctgaccagcgaagatagcgccgtgtacttctgtgcccggtccatcacaacagtcgtgggctgcgctatggactattggggccagggaacaagcgtgaccgtgtctagtacgcgtatccagaaccctgatcctgccgtgtaccagctgcgggatagcaagagcagcgacaagagcgtgtgtctgttcaccgacttcgacagccagaccaacgtgtcccagagcaaggactccgacgtgtacatcaccgataagtgcgtgctggacatgcggagcatggacttcaagagcaactccgccgtggcctggtccaacaagtccgatttcgcctgcgccaacgccttcaacaacagcattatccccgaggacacattcttcccaagccccgagagcagctgcgacgtgaagctggtggaaaagagcttcgagacagacaccaacctgaacttccagaacctgagcgtgatcggcttcagaatcctgctgctgaaagtggccggctttaacctgctgatgaccctgcggctgtggtccagccgcgccaagagaagcggatctggcgtgaagcagaccctgaatttcgacctgctgaagctggctggcgacgtggaatccaacccaggcccttctagaggccatatgaccgagtacaagcccacggtgcgcctcgccacccgcgacgacgtccccagggccgtacgcaccctcgccgccgcgttcgccgactaccccgccacgcgccacaccgtcgatccggaccgccacatcgagcgggtcaccgagctgcaagaactcttcctcacgcgcgtcgggctcgacatcggcaaggtgtgggtcgcggacgacggcgccgcggtggcggtctggaccacgccggagagcgtcgaagcgggggcggtgttcgccgagatcggcccgcgcatggccgagttgagcggttcccggctggccgcgcagcaacagatggaaggcctcctggcgccgcaccggcccaaggagcccgcgtggttcctggccaccgtcggcgtctcgcccgaccaccagggcaagggtctgggcagcgccgtcgtgctccccggagtggaggcggccgagcgcgccggggtgcccgccttcctggagacctccgcgccccgcaacctccccttctacgagcggctcggcttcaccgtcaccgccgacgtcgaggtgcccgaaggaccgcgcacctggtgcatgacccgcaagcccggtgcctga

SEQ ID NO: 4856 - DNA, 1926 bp, synthetic construct
  source 1..1926: mol_type = other DNA
atggccttaccagtgaccgccttgctcctgccgctggccttgctgctccacgccgccaggccggacatccagttgacccagtcccccagctcactcagcgccagtgtgggggaccgggtgaccattacctgtaaagccagtcagagtgtggactatgacggggatagcttcctgaattggtatcagcagaagcctggcaaagccccaaagctgctgatctacgctgcatctaatctggagtcaggcgtgccttccaggttctccggtagtgggtctgggaccgatttcacattgaccatttcatccctccaacccgaggatttcgctacatattactgtcagcagtccaatgaggaccctctcacctttggccagggcaccaaagttgaaattaagagactcgagggacagcctaaggccaatcctaccgtgacactgttccctccaagcagcgaagaactccaggccaacaaggccacacttgtgtgcctgatctccgacttctaccctggggctgtgacagtggcttggaaggccgatggatctcctgtgaaagccggcgtggaaaccaccaagccatccaagcagagcaacaacaaatacgccgccagctcctacctgagcctgacacctgagcagtggaagtcccacagatcctacagctgccaagtgacccacgaaggcagcaccgtggaaaagacagtggcccctacagagtgcagcggatccctgggagagcctcagctgtgctatatcctggacgccatcctgtttctgtacggcatcgtgctgaccctgctgtactgccggctgaagatccaagtgcggaaggccgccatcaccagctacgagaaatccgacggcgtgtacaccggcctgagcaccagaaatcaagagacatacgagacactgaagcacgaaaagcctccacaaagggccaagcgatctggatctggagcaacaaacttctcactactcaaacaagcaggtgacgtggaggagaatcccgggcctactagtatggactggatttggcgcatccttttccttgtcggcgctgctaccggcgcgcattccttcgaagaagtccaacttgtggagtctggagggggcctggtgcagcccggcggctctctcagactgtcttgtgcggcaagcggctacaccttcacctcttactggatagaatgggtgaggcaggcacctggaaagggactggagtggattggagagattctgccaggagggggagatacaaattacaatgaaatcttcaaggggcgggccaccttttcagcggataccagcaagaatacagcttacctgcagatgaatagcctccgggcagaagataccgctgtttattattgcacgagacgggtgccaataagactggactattgggggcaagggactcttgtcaccgtcagttcaacgcgtatccagaaccctgatcctgccgtgtaccagctgcgggatagcaagagcagcgacaagagcgtgtgtctgttcaccgacttcgacagccagaccaacgtgtcccagagcaaggactccgacgtgtacatcaccgataagaccgtgctggacatgcggagcatggacttcaagagcaactccgccgtggcctggtccaacaagtccgatttcgcctgcgccaacgccttcaacaacagcattatccccgaggacacattcttcccaagccccgagagcagctgcggtaccatcactcaaggtttggcagtgtcaaccatctcatcattctttccacctggctaccaagtgtccttctgcctggtcatggtgctgctgttcgccgtggataccggcctgtacttcagcgtcaagaccaacatccggtccagcaccagagactggaaggaccacaagttcaagtggcggaaggaccctcaggacaagtaa

SEQ ID NO: 4857 - DNA, 1869 bp, synthetic construct; identical to SEQ ID NO: 4723
  source 1..1869: mol_type = other DNA

SEQ ID NO: 4858 - DNA, 2226 bp, synthetic construct
  source 1..2226: mol_type = other DNA
atggccttaccagtgaccgccttgctcctgccgctggccttgctgctccacgccgccaggccggacatccagatgacacagagccctagcagcctgtctgccagcgtgggagacagagtgaccatcacatgcaaggccagccaggatgtgggcacagccgtggattggtatcagcagaagcctggcaaggcccctaagctgctgatctactgggccagcacaagacacacaggcgtgcccagcagattttctggcagcggctctggcaccgacttcaccctgacaatatccagcctccagcctgaggacttcgccacctactactgccagcagtacaacagctaccctctgaccttcggccagggcaccaaggtggaaatcaaaagactcgaggacctgaagaacgtgttcccacctgaggtggccgtgttcgagcctagcgaggccgagatcagccacacccagaaagccaccctcgtgtgcctggctaccggcttctaccccgaccatgtggaactgtcttggtgggtcaacggcaaagaggtgcacagcggcgtgtctaccgacccccagccactgaaagaacagcccgccctgaacgacagccggtactgcctgagcagcagactgagagtgtccgccaccttctggcagaacccccggaaccacttcagatgccaggtgcagttctacggcctgagcgagaacgacgagtggacccaggacagagccaagcccgtgacccagatcgtgtctgccgaagcctggggcagagccgattgcggatcccagagcttcggcctgctggaccccaagctgtgctacctgctggatggcatcctgttcatctacggcgtgatcctgaccgccctgttcctgagagtgaagttcagcagaagcgccgacgcccctgcctaccagcagggacagaaccaactgtacaacgagctgaacctgggcagacgggaagagtacgacgtgctggacaagcggagaggcagggaccctgagatgggcggaaagccccggagaaagaacccccaggaaggactgtataacgaactccagaaagacaagatggccgaagcctacagcgagatcggcatgaagggcgagcggagaagaggcaagggccacgatggcctgtaccagggcctgagcaccgccaccaaggacacctatgacgccctgcacatgcaggccctgcctccaagaagggccaagcgatctggatctggagcaacaaacttctcactactcaaacaagcaggtgacgtggaggagaatcccgggcctactagtatggactggatttggcgcatccttttccttgtcggcgctgctaccggcgcgcattccttcgaagtgcagctggttgaatcaggtggcggcctggttcaacctggcggatctctgagactgagctgtgccgccagcggctacacctttaccgagtacacaatccactgggtccgacaggcccctggcaaaggacttgagtgggtcgccaacatcaaccccaacaatggcggcaccacctacaaccagaagttcgaggacagattcaccatcagccgggacaacagcaagaacaccctgtacctccagatgaactccctgagagccgaggacaccgccgtgtactattgtgccagaggctggaacttcgactactggggccagggaacactggtcaccgttagctctacgcgtgcctctacaaagggaccctccgtgtttcctctggctcccagcagcaagtctacaagcggaggaacagccgctctgggctgcctggtcaaggattactttcccgagcctgtgaccgtgtcctggaatagcggagcactgacaagcggcgtgcacacctttccagccgtgctgcaaagcagcggcctgtactctctgagcagcgtggtcacagtgcctagctctagcctgggcacccagacctacatctgcaatgtgaaccacaagcctagcaacaccaaggtggacaagagagtggaacccaagagctgtggtaccatcactcaaggtttggcagtgtcaaccatctcatcattctttccacctggctaccaagtgtccttctgcctggtcatggtgctgctgttcgccgtggataccggcctgtacttcagcgtcaagaccaacatccggtccagcaccagagactggaaggaccacaagttcaagtggcggaaggacccccaggacaagtaa

SEQ ID NO: 4859 - DNA, 2073 bp, synthetic construct
  source 1..2073: mol_type = other DNA
atggccttaccagtgaccgccttgctcctgccgctggccttgctgctccacgccgccaggccggcatgccgcgcacgcagcgaggacaggtataggaaccccaaaggaagtgcgggtaccggcggaggcggatctggcggcggaggtagcggtggcggaggatctgaattcgacatccagatgacacagagccctagcagcctgtctgccagcgtgggagacagagtgaccatcacatgcaaggccagcgaccacatcaacaactggctggcctggtatcagcagaagcctggacaggcccctaagctgctgatctacggcgctaccacactggaaacaggcgtgcccagcagattttctggcagcggctctggcaccgactacaccctgacaatatccagcctccagcctgaggacttcgccacctactactgtcagcagagctggaacaccccttggacattcggccagggcaccaagctggaaatcaagagactcgaggacctgaagaacgtgttcccacctgaggtggccgtgttcgagcctagcgaggccgagatcagccacacccagaaagccaccctcgtgtgcctggctaccggcttctaccccgaccatgtggaactgtcttggtgggtcaacggcaaagaggtgcacagcggcgtgtgtaccgacccccagccactgaaagaacagcccgccctgaacgacagccggtactgcctgagcagcagactgagagtgtccgccaccttctggcagaacccccggaaccacttcagatgccaggtgcagttctacggcctgagcgagaacgacgagtggacccaggacagagccaagcccgtgacccagatcgtgtctgccgaagcctggggcagagccgattgcggctttaccagcgagagctaccagcagggcgtgctgagcgccaccatcctgtacgagatcctgctgggcaaggccaccctgtacgccgtgctggtgtctgccctggtgctgatggctatggtcaagcggaaggacagccggggaagggccaagcgatctggatctggagcaacaaacttctcactactcaaacaagcaggtgacgtggaggagaatcccgggcctactagtgccaccatggactggatttggcgcatccttttccttgtcggcgctgctaccggcgcccattccgggcccgccagaagcgaggacagatacagaaaccccaaaggatccggcggcggaggatctggcggaggcggatctgggggcggaggctctttcgaacaagttcagcttcaacagcctggcgctgagctggtcaaacctggcgcttctgtgaagatgagctgcaaagccagcggctacgccttcagcagctactggatcaactggatgaagcagaaacccggccagggactcgaatggatcggccaaatctatcccggcgacggcgacaccaactacaacggcaagttcaagggcagagccacactgaccgccgatacctctagcagcacagcctacatgcagctgagcagcctgaccagcgaagatagcgccgtgtacttctgtgcccggtccatcacaacagtcgtgggctgcgctatggactattggggccagggaacaagcgtgaccgtgtctagtacgcgtatccagaaccctgatcctgccgtgtaccagctgcgggatagcaagagcagcgacaagagcgtgtgtctgttcaccgacttcgacagccagaccaacgtgtcccagagcaaggactccgacgtgtacatcaccgataagtgcgtgctggacatgcggagcatggacttcaagagcaactccgccgtggcctggtccaacaagtccgatttcgcctgcgccaacgccttcaacaacagcattatccccgaggacacattcttcccaagccccgagagcagctgcgacgtgaagctggtggaaaagagcttcgagacagacaccaacctgaacttccagaacctgagcgtgatcggcttcagaatcctgctgctgaaagtggccggctttaacctgctgatgaccctgcggctgtggtccagctaa

SEQ ID NO: 4860 - DNA, 2001 bp, synthetic construct; identical to SEQ ID NO: 4832
  source 1..2001: mol_type = other DNA

SEQ ID NO: 4861 - DNA, 1860 bp, synthetic construct
  source 1..1860: mol_type = other DNA
atggccttaccagtgaccgccttgctcctgccgctggccttgctgctccacgccgccaggccggacgtggtcatgacacagagcccttctagcctgtctgccagcgtgggcgacagagtgaccatcacctgtatggcctccgaggacatctacatccggctggcctggtatcagcagaagcctggaaacgcccctaagctgctgatctacgccgccacctctctggaaacaggcgtgccaagcagattttccggcagcggctctggcaccgatttcaccctgacaatatccagcctccagcctgaggacttcgccacctactactgccagcagtattggagcagcccctggacatttggcggaggcaccaaggtggaaatcaaactcgaggacctgaagaacgtgttcccacctgaggtggccgtgttcgagcctagcgaggccgagatcagccacacccagaaagccaccctcgtgtgcctggctaccggcttctaccccgaccatgtggaactgtcttggtgggtcaacggcaaagaggtgcacagcggcgtgtgtaccgacccccagccactgaaagaacagcccgccctgaacgacagccggtactgcctgagcagcagactgagagtgtccgccaccttctggcagaacccccggaaccacttcagatgccaggtgcagttctacggcctgagcgagaacgacgagtggacccaggacagagccaagcccgtgacccagatcgtgtctgccgaagcctggggcagagccgattgcggctttaccagcgagagctaccagcagggcgtgctgagcgcctactacatgtacttgttgctgctgctgaagtccgtggtgtacttcgccatcatcacatgctgcctgctgcggagaaccgccttctgctgcaacggcgagaagtctagggccaagcgatctggatctggagcaacaaacttctcactactcaaacaagcaggtgacgtggaggagaatcccgggcctactagtatggactggatttggcgcatccttttccttgtcggcgctgctaccggcgcgcattccttcgaacaggttcagctgcaagagtctggccccggactggtcaagcctagccaaacactgagcctgacctgtaccgtgtccggctacagcatcaccagcgactacacctggaactggatcagacagcctcctggcaacggactggaatggatcggctacatcacctacagcggcagcaccagctacaaccccagcctgaaaagccgggtgctgatctccgtggacaccagcaagaatcaggtgtccctgaagctgagcagcgtgacagccgctgataccgccgtgtactactgtgccagactggggagaagatacacaatggactactggggccagggcaccaccgtgacagtttcttctacgcgtatccagaaccctgatcctgccgtgtaccagctgcgggatagcaagagcagcgacaagagcgtgtgtctgttcaccgacttcgacagccagaccaacgtgtcccagagcaaggactccgacgtgtacatcaccgataagtgcgtgctggacatgcggagcatggacttcaagagcaactccgccgtggcctggtccaacaagtccgatttcgcctgcgccaacgccttcaacaacagcattatccccgaggacacattcttcccaagccccgagagcagctgcgacgtgaagctggtggaaaagagcttcgagacagacaccaacctgaacttccagaacctgagcgtgatcggcttcagaatcctgctgctgaaagtggccggctttaacctgctgatgaccctgcggctgtggtccagctaa

SEQ ID NO: 4862 - DNA, 2199 bp, synthetic construct
  source 1..2199: mol_type = other DNA
atggccttaccagtgaccgccttgctcctgccgctggccttgctgctccacgccgccaggccggacatccagatgacacagagccctagcagcctgtctgccagcgtgggagacagagtgaccatcacatgcaaggccagcgaccacatcaacaactggctggcctggtatcagcagaagcctggacaggcccctaagctgctgatctacggcgctaccacactggaaacaggcgtgcccagcagattttctggcagcggctctggcaccgactacaccctgacaatatccagcctccagcctgaggacttcgccacctactactgtcagcagagctggaacaccccttggacattcggccagggcaccaagctggaaatcaagagactcgagggacagcctaaggccaatcctaccgtgacactgttccctccaagcagcgaagaactccaggccaacaaggccacacttgtgtgcctgatctccgacttctaccctggggctgtgacagtggcttggaaggccgatggatctcctgtgaaagccggcgtggaaaccaccaagccatccaagcagagcaacaacaaatacgccgccagctcctacctgagcctgacacctgagcagtggaagtcccacagatcctacagctgccaagtgacccacgaaggcagcaccgtggaaaagacagtggcccctacagagtgcagcggatcccagagcttcggcctgctggaccccaagctgtgctacctgctggatggcatcctgttcatctacggcgtgatcctgaccgccctgttcctgagagtgaagttcagcagaagcgccgacgcccctgcctaccagcagggacagaaccaactgtacaacgagctgaacctgggcagacgggaagagtacgacgtgctggacaagcggagaggcagggaccctgagatgggcggaaagccccagcggagaaagaacccccaggaaggactgtataacgaactccagaaagacaagatggccgaagcctacagcgagatcggcatgaagggcgagcggagaagaggcaagggccacgatggcctgtaccagggcctgagcaccgccaccaaggacacctatgacgccctgcacatgcaggccctgcctccaagaagggccaagcgatctggatctggagcaacaaacttctcactactcaaacaagcaggtgacgtggaggagaatcccgggcctactagtatggactggatttggcgcatccttttccttgtcggcgctgctaccggcgcgcattccttcgaacaagttcagcttcaacagcctggcgctgagctggtcaaacctggcgcttctgtgaagatgagctgcaaagccagcggctacgccttcagcagctactggatcaactggatgaagcagaaacccggccagggactcgaatggatcggccaaatctatcccggcgacggcgacaccaactacaacggcaagttcaagggcagagccacactgaccgccgatacctctagcagcacagcctacatgcagctgagcagcctgaccagcgaagatagcgccgtgtacttctgtgcccggtccatcacaacagtcgtgggctgcgctatggactattggggccagggaacaagcgtgaccgtgtctagtacgcgtgcgtccactaagggtccgtcagtcttcccgctggcgccctgttcccgcagcacgagtgaatctaccgccgcccttgggtgcttggtaaaagactattttcctgagcccgttacagtatcatggaacagcggggctctgactagcggggtgcatacgttccctgcggttctgcaatctagcggactgtattctctctccagtgttgtgaccgtgccaagctccagcctcggtactaaaacttatacatgtaatgtggatcataaaccttcaaataccaaggttgacaaaagggtagagagtaagtacggtggtacccagagttttgggttgttggaccctaaattgtgctatctgttggacggaatcctgttcatttacggagtgatcctgaccgcattgttcctgaagagaggccggaagaagctgctgtacatcttcaagcagcctttcatgcggcccgtgcagaccacccaggaagaggacggctgctcctgccggttccccgaggaagaagaaggcggctgcgagctgtaa

SEQ ID NO: 4863 - DNA, 2409 bp, synthetic construct
  source 1..2409: mol_type = other DNA
atggccttaccagtgaccgccttgctcctgccgctggccttgctgctccacgccgccaggccggacatccagatgacacagagccctagcagcctgtctgccagcgtgggagacagagtgaccatcacatgcaaggccagcgaccacatcaacaactggctggcctggtatcagcagaagcctggacaggcccctaagctgctgatctacggcgctaccacactggaaacaggcgtgcccagcagattttctggcagcggctctggcaccgactacaccctgacaatatccagcctccagcctgaggacttcgccacctactactgtcagcagagctggaacaccccttggacattcggccagggcaccaagctggaaatcaagagactcgagggacagcctaaggccaatcctaccgtgacactgttccctccaagcagcgaagaactccaggccaacaaggccacacttgtgtgcctgatctccgacttctaccctggggctgtgacagtggcttggaaggccgatggatctcctgtgaaagccggcgtggaaaccaccaagccatccaagcagagcaacaacaaatacgccgccagctcctacctgagcctgacacctgagcagtggaagtcccacagatcctacagctgccaagtgacccacgaaggcagcaccgtggaaaagacagtggcccctacagagtgcagcggatcccagagcttcggcctgctggaccccaagctgtgctacctgctggatggcatcctgttcatctacggcgtgatcctgaccgccctgttcctgagagtgaagttcagcagaagcgccgacgcccctgcctaccagcagggacagaaccaactgtacaacgagctgaacctgggcagacgggaagagtacgacgtgctggacaagcggagaggcagggaccctgagatgggcggaaagccccggagaaagaacccccaggaaggactgtataacgaactccagaaagacaagatggccgaagcctacagcgagatcggcatgaagggcgagcggagaagaggcaagggccacgatggcctgtaccagggcctgagcaccgccaccaaggacacctatgacgccctgcacatgcaggccctgcctccaagaagggccaagcgatctggatctggagcaacaaacttctcactactcaaacaagcaggtgacgtggaggagaatcccgggcctactagtatggactggatttggcgcatccttttccttgtcggcgctgctaccggcgcgcattccttcgaacaagttcagcttcaacagcctggcgctgagctggtcaaacctggcgcttctgtgaagatgagctgcaaagccagcggctacgccttcagcagctactggatcaactggatgaagcagaaacccggccagggactcgaatggatcggccaaatctatcccggcgacggcgacaccaactacaacggcaagttcaagggcagagccacactgaccgccgatacctctagcagcacagcctacatgcagctgagcagcctgaccagcgaagatagcgccgtgtacttctgtgcccggtccatcacaacagtcgtgggctgcgctatggactattggggccagggaacaagcgtgaccgtgtctagtacgcgtgcgtccactaagggtccgtcagtcttcccgctggcgccctgttcccgcagcacgagtgaatctaccgccgcccttgggtgcttggtaaaagactattttcctgagcccgttacagtatcatggaacagcggggctctgactagcggggtgcatacgttccctgcggttctgcaatctagcggactgtattctctctccagtgttgtgaccgtgccaagctccagcctcggtactaaaacttatacatgtaatgtggatcataaaccttcaaataccaaggttgacaaaagggtagagagtaagtacggtggtacccagagttttgggttgttggaccctaaattgtgctatctgttggacggaatcctgttcatttacggagtgatcctgaccgcattgttcctgcgggttaagttttccagatccgcagacgcacccgcttaccaacaagggcagaaccaactctacaatgaacttaatttggggcggagggaagagtacgacgttctggacaaaaggaggggacgagatcccgagatgggcggaaagcctcagcgaaggaagaatccgcaagaggggctttataacgaactccagaaagataaaatggcagaagcctatagtgagattgggatgaagggagaaaggaggaggggtaaaggtcacgatgggttgtaccaaggattgagcacagccactaaagatacctatgatgcgctccacatgcaggccctgccgccaagataa

SEQ ID NO: 4864 - DNA, 2445 bp, synthetic construct
  source 1..2445: mol_type = other DNA
atggccttaccagtgaccgccttgctcctgccgctggccttgctgctccacgccgccaggccggacatccagatgacacagagccctagcagcctgtctgccagcgtgggagacagagtgaccatcacatgcaaggccagcgaccacatcaacaactggctggcctggtatcagcagaagcctggcaaggcccctaagctgctgatctacggcgctaccacactggaaacaggcgtgcccagcagattttctggcagcggctctggcaccgacttcaccctgacaatatccagcctccagcctgaggacttcgccacctactactgtcagcagagctggaacaccccttggacattcggccagggcaccaaggtggaaatcaagagactcgagggacagcctaaggccaatcctaccgtgacactgttccctccaagcagcgaagaactccaggccaacaaggccacacttgtgtgcctgatctccgacttctaccctggggctgtgacagtggcttggaaggccgatggatctcctgtgaaagccggcgtggaaaccaccaagccatccaagcagagcaacaacaaatacgccgccagctcctacctgagcctgacacctgagcagtggaagtcccacagatcctacagctgccaagtgacccacgaaggcagcaccgtggaaaagacagtggcccctacagagtgcagcggatcccagagcttcggcctgctggaccccaagctgtgctacctgctggatggcatcctgttcatctacggcgtgatcctgaccgccctgttcctgagagtgaagttcagcagaagcgccgacgcccctgcctaccagcagggacagaaccaactgtacaacgagctgaacctgggcagacgggaagagtacgacgtgctggacaagcggagaggcagggaccctgagatgggcggaaagccccggagaaagaacccccaggaaggactgtataacgaactccagaaagacaagatggccgaagcctacagcgagatcggcatgaagggcgagcggagaagaggcaagggccacgatggcctgtaccagggcctgagcaccgccaccaaggacacctatgacgccctgcacatgcaggccctgcctccaagaagggccaagcgatctggatctggagcaacaaacttctcactactcaaacaagcaggtgacgtggaggagaatcccgggcctactagtgccaccatggactggatttggcgcatccttttccttgtcggcgctgctaccggcgcccattccgccagaagcgaggacagatacagaaaccccaaattcgaagttcagctggttgaatctggcggcggactggttcaacctggcggatctctgagactgagctgtgccgcctctggctacgcctttagcaactactgggtcaactgggttcgacaggcccctggcaaaggactggaatgggtcgcccaaatctatcccggcgacggcgacaccaactacaacggcaagttcaagggcagattcaccatcagccgggacaacagcaagaacaccctgtacctccagatgaactccctgagagccgaggacaccgccgtgtactattgtgccagatccatcaccaccgtcgtgggctgcgctatggattattggggccagggaaccctggtcaccgtgtcctctacgcgtgcctctacaaagggaccctccgtgtttcctctggctcccagcagcaagtctacaagcggaggaacagccgctctgggctgcctggtcaaggattactttcccgagcctgtgaccgtgtcctggaatagcggagcactgacaagcggcgtgcacacctttccagccgtgctgcaaagcagcggcctgtactctctgagcagcgtggtcacagtgcctagctctagcctgggcacccagacctacatctgcaatgtgaaccacaagcctagcaacaccaaggtggacaagagagtggaacccaagagctgtggtacccagagttttgggttgttggaccctaaattgtgctatctgttggacggaatcctgttcatttacggagtgatcctgaccgcattgttcctgcgggttaagttttccagatccgcagacgcacccgcttaccaacaagggcagaaccaactctacaatgaacttaatttggggcggagggaagagtacgacgttctggacaaaaggaggggacgagatcccgagatgggcggaaagcctcagcgaaggaagaatccgcaagaggggctttataacgaactccagaaagataaaatggcagaagcctatagtgagattgggatgaagggagaaaggaggaggggtaaaggtcacgatgggttgtaccaaggattgagcacagccactaaagatacctatgatgcgctccacatgcaggccctgccgccaagataa

SEQ ID NO: 4865 - DNA, 1899 bp, synthetic construct
  source 1..1899: mol_type = other DNA
atggccttaccagtgaccgccttgctcctgccgctggccttgctgctccacgccgccaggccggacatccagatgacacagagccctagcagcctgtctgccagcgtgggagacagagtgaccatcacatgcaaggccagcgaccacatcaacaactggctggcctggtatcagcagaagcctggcaaggcccctaagctgctgatctacggcgctaccacactggaaacaggcgtgcccagcagattttctggcagcggctctggcaccgacttcaccctgacaatatccagcctccagcctgaggacttcgccacctactactgtcagcagagctggaacaccccttggacattcggccagggcaccaaggtggaaatcaagagactcgaggacctgaagaacgtgttcccacctgaggtggccgtgttcgagcctagcgaggccgagatcagccacacccagaaagccaccctcgtgtgcctggctaccggcttctaccccgaccatgtggaactgtcttggtgggtcaacggcaaagaggtgcacagcggcgtgtgtaccgacccccagccactgaaagaacagcccgccctgaacgacagccggtactgcctgagcagcagactgagagtgtccgccaccttctggcagaacccccggaaccacttcagatgccaggtgcagttctacggcctgagcgagaacgacgagtggacccaggacagagccaagcccgtgacccagatcgtgtctgccgaagcctggggcagagccgattgcggctttaccagcgagagctaccagcagggcgtgctgagcgccaccatcctgtacgagatcctgctgggcaaggccaccctgtacgccgtgctggtgtctgccctggtgctgatggctatggtcaagcggaaggacagccggggaagggccaagcgatctggatctggagcaacaaacttctcactactcaaacaagcaggtgacgtggaggagaatcccgggcctactagtatggactggatttggcgcatccttttccttgtcggcgctgctaccggcgcgcattccttcgaagttcagctggttgaatctggcggcggactggttcaacctggcggatctctgagactgagctgtgccgcctctggctacgcctttagcagctactgggtcaactgggttcgacaggcccctggcaaaggactggaatgggtcgcccaaatctatcccggcgacggcgacaccaactacaacggcaagttcaagggcagattcaccatcagccgggacaacagcaagaacaccctgtacctccagatgaactccctgagagccgaggacaccgccgtgtactattgtgccagatccatcaccaccgtcgtgggctgcgctatggattattggggccagggaaccctggtcaccgtgtcctctacgcgtgccagaagcgaggacagatacagaaaccccaaaatccagaaccctgatcctgccgtgtaccagctgcgggatagcaagagcagcgacaagagcgtgtgtctgttcaccgacttcgacagccagaccaacgtgtcccagagcaaggactccgacgtgtacatcaccgataagtgcgtgctggacatgcggagcatggacttcaagagcaactccgccgtggcctggtccaacaagtccgatttcgcctgcgccaacgccttcaacaacagcattatccccgaggacacattcttcccaagccccgagagcagctgcgacgtgaagctggtggaaaagagcttcgagacagacaccaacctgaacttccagaacctgagcgtgatcggcttcagaatcctgctgctgaaagtggccggctttaacctgctgatgaccctgcggctgtggtccagctaa

SEQ ID NO: 4866 - DNA, 1869 bp, synthetic construct
  source 1..1869: mol_type = other DNA
atggccttaccagtgaccgccttgctcctgccgctggccttgctgctccacgccgccaggccggacatccagatgacacagagccctagcagcctgtctgccagcgtgggagacagagtgaccatcacatgcaaggccagcgaccacatcaacaactggctggcctggtatcagcagaagcctggcaaggcccctaagctgctgatctacggcgctaccacactggaaacaggcgtgcccagcagattttctggcagcggctctggcaccgacttcaccctgacaatatccagcctccagcctgaggacttcgccacctactactgtcagcagagctggaacaccccttggacattcggccagggcaccaaggtggaaatcaagagactcgaggacctgaagaacgtgttcccacctgaggtggccgtgttcgagcctagcgaggccgagatcagccacacccagaaagccaccctcgtgtgcctggctaccggcttctaccccgaccatgtggaactgtcttggtgggtcaacggcaaagaggtgcacagcggcgtgtgtaccgacccccagccactgaaagaacagcccgccctgaacgacagccggtactgcctgagcagcagactgagagtgtccgccaccttctggcagaacccccggaaccacttcagatgccaggtgcagttctacggcctgagcgagaacgacgagtggacccaggacagagccaagcccgtgacccagatcgtgtctgccgaagcctggggcagagccgattgcggctttaccagcgagagctaccagcagggcgtgctgagcgcctactacatgtacttgttgctgctgctgaagtccgtggtgtacttcgccatcatcacatgctgcctgctgcggagaaccgccttctgctgcaacggcgagaagtctagggccaagcgatctggatctggagcaacaaacttctcactactcaaacaagcaggtgacgtggaggagaatcccgggcctactagtatggactggatttggcgcatccttttccttgtcggcgctgctaccggcgcgcattccttcgaagttcagctggttgaatctggcggcggactggttcaacctggcggatctctgagactgagctgtgccgcctctggctacgcctttagcagctactgggtcaactgggttcgacaggcccctggcaaaggactggaatgggtcgcccaaatctatcccggcgacggcgacaccaactacaacggcaagttcaagggcagattcaccatcagccgggacaacagcaagaacaccctgtacctccagatgaactccctgagagccgaggacaccgccgtgtactattgtgccagatccatcaccaccgtcgtgggctgcgctatggattattggggccagggaaccctggtcaccgtgtcctctacgcgtatccagaaccctgatcctgccgtgtaccagctgcgggatagcaagagcagcgacaagagcgtgtgtctgttcaccgacttcgacagccagaccaacgtgtcccagagcaaggactccgacgtgtacatcaccgataagtgcgtgctggacatgcggagcatggacttcaagagcaactccgccgtggcctggtccaacaagtccgatttcgcctgcgccaacgccttcaacaacagcattatccccgaggacacattcttcccaagccccgagagcagctgcgacgtgaagctggtggaaaagagcttcgagacagacaccaacctgaacttccagaacctgagcgtgatcggcttcagaatcctgctgctgaaagtggccggctttaacctgctgatgaccctgcggctgtggtccagctaa

SEQ ID NO: 4867 - DNA, 2283 bp, synthetic construct
  source 1..2283: mol_type = other DNA
atggccttaccagtgaccgccttgctcctgccgctggccttgctgctccacgccgccaggccggacatccagatgacacagagccctagcagcctgtctgccagcgtgggagacagagtgaccatcacatgcaaggccagcgaccacatcaacaactggctggcctggtatcagcagaagcctggcaaggcccctaagctgctgatctacggcgctaccacactggaaacaggcgtgcccagcagattttctggcagcggctctggcaccgacttcaccctgacaatatccagcctccagcctgaggacttcgccacctactactgtcagcagagctggaacaccccttggacattcggccagggcaccaaggtggaaatcaagagactcgaggacctgaagaacgtgttcccacctgaggtggccgtgttcgagcctagcgaggccgagatcagccacacccagaaagccaccctcgtgtgcctggctaccggcttctaccccgaccatgtggaactgtcttggtgggtcaacggcaaagaggtgcacagcggcgtgtgtaccgacccccagccactgaaagaacagcccgccctgaacgacagccggtactgcctgagcagcagactgagagtgtccgccaccttctggcagaacccccggaaccacttcagatgccaggtgcagttctacggcctgagcgagaacgacgagtggacccaggacagagccaagcccgtgacccagatcgtgtctgccgaagcctggggcagagccgattgcggctttaccagcgagagctaccagcagggcgtgctgagcgccaccatcctgtacgagatcctgctgggcaaggccaccctgtacgccgtgctggtgtctgccctggtgctgatggctatggtcaagcggaaggacagccggggaagggccaagcgatctggatctggagcaacaaacttctcactactcaaacaagcaggtgacgtggaggagaatcccgggcctactagtgccaccatggactggatttggcgcatccttttccttgtcggcgctgctaccggcgcccattccgggcccgaagtgcaactggttgaatccggtggcggcctggtgcaagcaggcggatctctcagacttagctgtgccgcctccggcagaaccttcacaatgggatggtttaggcaggctccagggaaagagagagagttcgtcgccgccatctctctgtctcccacactggcctactacgccgactctgtgaaaggccggttcaccatctccagagataatgccaagaacaccgtggtgctgcaaatgaactctctgaaacccgaggatacagccctgtactattgtgccgctgaccggaagtccgtgatgagcatcagacccgattactggggacagggcacacaagtcacagtgtcctctggatccggcggcggaggatctggcggaggcggatctgggggcggaggctctttcgaagttcagctggttgaatctggcggcggactggttcaacctggcggatctctgagactgagctgtgccgcctctggctacgcctttagcagctactgggtcaactgggttcgacaggcccctggcaaaggactggaatgggtcgcccaaatctatcccggcgacggcgacaccaactacaacggcaagttcaagggcagattcaccatcagccgggacaacagcaagaacaccctgtacctccagatgaactccctgagagccgaggacaccgccgtgtactattgtgccagatccatcaccaccgtcgtgggctgcgctatggattattggggccagggaaccctggtcaccgtgtcctctacgcgtatccagaaccctgatcctgccgtgtaccagctgcgggatagcaagagcagcgacaagagcgtgtgtctgttcaccgacttcgacagccagaccaacgtgtcccagagcaaggactccgacgtgtacatcaccgataagtgcgtgctggacatgcggagcatggacttcaagagcaactccgccgtggcctggtccaacaagtccgatttcgcctgcgccaacgccttcaacaacagcattatccccgaggacacattcttcccaagccccgagagcagctgcgacgtgaagctggtggaaaagagcttcgagacagacaccaacctgaacttccagaacctgagcgtgatcggcttcagaatcctgctgctgaaagtggccggctttaacctgctgatgaccctgcggctgtggtccagctaa

SEQ ID NO: 4868 - DNA, 2283 bp, synthetic construct
  source 1..2283: mol_type = other DNA
atggccttaccagtgaccgccttgctcctgccgctggccttgctgctccacgccgccaggccggacatccagatgacacagagccctagcagcctgtctgccagcgtgggagacagagtgaccatcacatgcaaggccagcgaccacatcaacaactggctggcctggtatcagcagaagcctggcaaggcccctaagctgctgatctacggcgctaccacactggaaacaggcgtgcccagcagattttctggcagcggctctggcaccgacttcaccctgacaatatccagcctccagcctgaggacttcgccacctactactgtcagcagagctggaacaccccttggacattcggccagggcaccaaggtggaaatcaagagactcgaggacctgaagaacgtgttcccacctgaggtggccgtgttcgagcctagcgaggccgagatcagccacacccagaaagccaccctcgtgtgcctggctaccggcttctaccccgaccatgtggaactgtcttggtgggtcaacggcaaagaggtgcacagcggcgtgtgtaccgacccccagccactgaaagaacagcccgccctgaacgacagccggtactgcctgagcagcagactgagagtgtccgccaccttctggcagaacccccggaaccacttcagatgccaggtgcagttctacggcctgagcgagaacgacgagtggacccaggacagagccaagcccgtgacccagatcgtgtctgccgaagcctggggcagagccgattgcggctttaccagcgagagctaccagcagggcgtgctgagcgccaccatcctgtacgagatcctgctgggcaaggccaccctgtacgccgtgctggtgtctgccctggtgctgatggctatggtcaagcggaaggacagccggggaagggccaagcgatctggatctggagcaacaaacttctcactactcaaacaagcaggtgacgtggaggagaatcccgggcctactagtgccaccatggactggatttggcgcatccttttccttgtcggcgctgctaccggcgcccattccgggcccgaagtgcagctggttgaatctggcggaggactggttcaggctggcggatctctgagactgtcttgtgccgccagcggcagaacctttagcatgggctggtttagacaggcccctggcaaagagagagagttcgtcgccgccatcacatactctggcggcagcccttactacgccgactctgtgaagggcagattcaccatcagccgggacaacgccaagaacaccgtgtacctccagatgaacagcctgaagcctgaggacaccgccgtgtactactgcgccgccaatccaacatacggcagcgactggaacgccgagaattggggccagggaacccaagtgacagtgtctagcggatccggcggcggaggatctggcggaggcggatctgggggcggaggctctttcgaagttcagctggttgaatctggcggcggactggttcaacctggcggatctctgagactgagctgtgccgcctctggctacgcctttagcagctactgggtcaactgggttcgacaggcccctggcaaaggactggaatgggtcgcccaaatctatcccggcgacggcgacaccaactacaacggcaagttcaagggcagattcaccatcagccgggacaacagcaagaacaccctgtacctccagatgaactccctgagagccgaggacaccgccgtgtactattgtgccagatccatcaccaccgtcgtgggctgcgctatggattattggggccagggaaccctggtcaccgtgtcctctacgcgtatccagaaccctgatcctgccgtgtaccagctgcgggatagcaagagcagcgacaagagcgtgtgtctgttcaccgacttcgacagccagaccaacgtgtcccagagcaaggactccgacgtgtacatcaccgataagtgcgtgctggacatgcggagcatggacttcaagagcaactccgccgtggcctggtccaacaagtccgatttcgcctgcgccaacgccttcaacaacagcattatccccgaggacacattcttcccaagccccgagagcagctgcgacgtgaagctggtggaaaagagcttcgagacagacaccaacctgaacttccagaacctgagcgtgatcggcttcagaatcctgctgctgaaagtggccggctttaacctgctgatgaccctgcggctgtggtccagctaa

SEQ ID NO: 4869 - DNA, 2355 bp, synthetic construct
  source 1..2355: mol_type = other DNA
atggccttaccagtgaccgccttgctcctgccgctggccttgctgctccacgccgccaggccggacatccagatgacacagagccctagcagcctgtctgccagcgtgggagacagagtgaccatcacatgcaaggccagcgaccacatcaacaactggctggcctggtatcagcagaagcctggacaggcccctaagctgctgatctacggcgctaccacactggaaacaggcgtgcccagcagattttctggcagcggctctggcaccgactacaccctgacaatatccagcctccagcctgaggacttcgccacctactactgtcagcagagctggaacaccccttggacattcggccagggcaccaagctggaaatcaagagactcgaggctagaagcgaagatcggtatcggaaccccaaggaggacctgaagaacgtgttcccacctgaggtggccgtgttcgagcctagcgaggccgagatcagccacacccagaaagccaccctcgtgtgcctggctaccggcttctaccccgaccatgtggaactgtcttggtgggtcaacggcaaagaggtgcacagcggcgtgtgtaccgacccccagccactgaaagaacagcccgccctgaacgacagccggtactgcctgagcagcagactgagagtgtccgccaccttctggcagaacccccggaaccacttcagatgccaggtgcagttctacggcctgagcgagaacgacgagtggacccaggacagagccaagcccgtgacccagatcgtgtctgccgaagcctggggcagagccgattgcggctttaccagcgagagctaccagcagggcgtgctgagcgccaccatcctgtacgagatcctgctgggcaaggccaccctgtacgccgtgctggtgtctgccctggtgctgatggctatggtcaagcggaaggacagccggggaagggccaagcgatctggatctggagcaacaaacttctcactactcaaacaagcaggtgacgtggaggagaatcccgggcctactagtgccaccatggactggatttggcgcatccttttccttgtcggcgctgctaccggcgcccattccgggcccgaagtgcaactggttgaatccggtggcggcctggtgcaagcaggcggatctctcagacttagctgtgccgcctccggcagaaccttcacaatgggatggtttaggcaggctccagggaaagagagagagttcgtcgccgccatctctctgtctcccacactggcctactacgccgactctgtgaaaggccggttcaccatctccagagataatgccaagaacaccgtggtgctgcaaatgaactctctgaaacccgaggatacagccctgtactattgtgccgctgaccggaagtccgtgatgagcatcagacccgattactggggacagggcacacaagtcacagtgtcctctggatccggcggcggaggatctggcggaggcggatctgggggcggaggctctttcgaacaagttcagcttcaacagcctggcgctgagctggtcaaacctggcgcttctgtgaagatgagctgcaaagccagcggctacgccttcagcagctactggatcaactggatgaagcagaaacccggccagggactcgaatggatcggccaaatctatcccggcgacggcgacaccaactacaacggcaagttcaagggcagagccacactgaccgccgatacctctagcagcacagcctacatgcagctgagcagcctgaccagcgaagatagcgccgtgtacttctgtgcccggtccatcacaacagtcgtgggctgcgctatggactattggggccagggaacaagcgtgaccgtgtctagtacgcgtgccagaagcgaggacagatacagaaaccccaaaatccagaaccctgatcctgccgtgtaccagctgcgggatagcaagagcagcgacaagagcgtgtgtctgttcaccgacttcgacagccagaccaacgtgtcccagagcaaggactccgacgtgtacatcaccgataagtgcgtgctggacatgcggagcatggacttcaagagcaactccgccgtggcctggtccaacaagtccgatttcgcctgcgccaacgccttcaacaacagcattatccccgaggacacattcttcccaagccccgagagcagctgcgacgtgaagctggtggaaaagagcttcgagacagacaccaacctgaacttccagaacctgagcgtgatcggcttcagaatcctgctgctgaaagtggccggctttaacctgctgatgaccctgcggctgtggtccagctaa

SEQ ID NO: 4870 - DNA, 2577 bp, synthetic construct
  source 1..2577: mol_type = other DNA
atggccttaccagtgaccgccttgctcctgccgctggccttgctgctccacgccgccaggccggacatccagatgacacagactacatcctcactgtctgcctctctgggagacagagtcaccatcagttgcagggcaagtcaggacattagtaagtacctgaactggtatcagcagaaaccagatggaactgttaaactcctgatctaccatacatcaagattacactcaggagtcccatcaaggttcagtggcagtgggtctggaacagattattctctcaccattagcaacctggagcaagaagatattgccacttacttttgccaacagggtaatacgcttccgtacacgttcggaggggggaccaagctggagatcacactcgaggacctgaagaacgtgttcccacctgaggtggccgtgttcgagcctagcgaggccgagatcagccacacccagaaagccaccctcgtgtgcctggctaccggcttctaccccgaccatgtggaactgtcttggtgggtcaacggcaaagaggtgcacagcggcgtgtgtaccgacccccagccactgaaagaacagcccgccctgaacgacagccggtactgcctgagcagcagactgagagtgtccgccaccttctggcagaacccccggaaccacttcagatgccaggtgcagttctacggcctgagcgagaacgacgagtggacccaggacagagccaagcccgtgacccagatcgtgtctgccgaagcctggggcagagccgattgcggctttaccagcgagagctaccagcagggcgtgctgagcgcctactacatgtacttgttgctgctgctgaagtccgtggtgtacttcgccatcatcacatgctgcctgctgcggagaaccgccttctgctgcaacggcgagaagtctagggccaagcgatctggatctggagcaacaaacttctcactactcaaacaagcaggtgacgtggaggagaatcccgggcctactagtatggactggatttggcgcatccttttccttgtcggcgctgctaccggcgcgcattccttcgaagtgaaactgcaggagtcaggacctggcctggtggcgccctcacagagcctgtccgtcacatgcactgtctcaggggtctcattacccgactatggtgtaagctggattcgccagcctccacgaaagggtctggagtggctgggagtaatatggggtagtgaaaccacatactataattcagctctcaaatccagactgaccatcatcaaggacaactccaagagccaagttttcttaaaaatgaacagtctgcaaactgatgacacagccatttactactgtgccaaacattattactacggtggtagctatgctatggactactggggccaaggaacctcagtcaccgtctcctcaacgcgtatccagaaccctgatcctgccgtgtaccagctgcgggatagcaagagcagcgacaagagcgtgtgtctgttcaccgacttcgacagccagaccaacgtgtcccagagcaaggactccgacgtgtacatcaccgataagtgcgtgctggacatgcggagcatggacttcaagagcaactccgccgtggcctggtccaacaagtccgatttcgcctgcgccaacgccttcaacaacagcattatccccgaggacacattcttcccaagcagcgacgtgccctgcgacgtgaagctggtggaaaagagcttcgagacagacaccaacctgaacttccagaacctgagcgtgatcggcttcagaatcctgctgctgaaagtggccggctttaacctgctgatgaccctgcggctgtggtccagccgcgccaagagaagcggatctggcgtgaagcagaccctgaatttcgacctgctgaagctggctggcgacgtggaatccaacccaggcccttctagaatgtaccggatgcagctgctgagctgtatcgccctgtctctggccctggtcacaaatagcaactgggttaacgtgatctccgacctgaagaagatcgaggacctgatccagtccatgcacatcgacgccacactgtacaccgagagcgacgtgcaccctagctgtaaagtgaccgccatgaagtgctttctgctggaactgcaagtgatctccctggaaagcggcgacgccagcatccacgacaccgtgaagaacctgattatcctggctaacaacagcctgagcagcaacggcaacgtgaccgagtccggctgtaaagagtgcgaggaactggaagagaagaatatcaaagagttcctccagagcttcgtgcacatcgtgcagatgttcatcaacaccagcaagatcgaagtgatgtaccctcctccttacctggacaacgagaagtccaacggcaccatcatccacgtgaagggcaagcacctgtgtccttctccactgttccccggacctagcaagcctttctgggtgctcgttgttgttggcggcgtgctggcctgttacagcctgctggttaccgtggccttcatcatcttttgggtccgaagcaagcggagctaa

SEQ ID NO: 4871 - DNA, 1914 bp, synthetic construct
  source 1..1914: mol_type = other DNA
atggccttaccagtgaccgccttgctcctgccgctggccttgctgctccacgccgccaggccggcatgcgctagaagcgaagatcggtatcggaaccccaagggtacccagatcgtgctgacacagagccccgccatcatgtctgttagccctggcgagaaagtgaccatgacctgtagcgccagcagcagcgtgaactacatgcactggttccagcagaagcccggcacaagccctaagctgtgggtgtacagcaccagcaatctggcctctggcgtgccagccagattttctggctctggcagcggcaccagctacagcctgacaatcagcagcatggaagccgaggatgccgccacctactattgtcagcagcggagcatctacccaccttggacatttggcggaggcaccaagctggaaatcaaactcgagatccagaaccctgatcctgccgtgtaccagctgcgggatagcaagagcagcgacaagagcgtgtgtctgttcaccgacttcgacagccagaccaacgtgtcccagagcaaggactccgacgtgtacatcaccgataagtgcgtgctggacatgcggagcatggacttcaagagcaactccgccgtggcctggtccaacaagtccgatttcgcctgcgccaacgccttcaacaacagcattatccccgaggacacattcttcccaagccccgagagcagctgcgacgtgaagctggtggaaaagagcttcgagacagacaccaacctgaacttccagaacctgagcgtgatcggcttcagaatcctgctgctgaaagtggccggctttaacctgctgatgaccctgcggctgtggtccagctctagtcgcgccaagagaagcggatctggcgtgaagcagaccctgaatttcgacctgctgaagctggctggcgacgtggaatccaacccaggccctactagtatggactggatttggcgcatccttttccttgtcggcgctgctaccggcgcgcattccttcgaagttcagctccagcagagcggccctgagcttgtgaaacctggcgcttccgtgaagatcagctgcaaggccagcggctacagcttcaccggctacaccatgaactgggtcaagcagtcccacggcaagaacctggaatggatcggcctgattaacccctacaacggcggcacctcctacaaccagaagttcaaggccaaggccacactgaccgtggacaagagcagcagcacagcctacatgcagctgaagtccctgaccagcgaggacagcgccgtgtactactgcgccagagattacggctacgtgctggactattggggccagggcacaagcgtgacagtgtctagtacgcgtgaggacctgaagaacgtgttcccacctgaggtggccgtgttcgagcctagcgaggccgagatcagccacacccagaaagccaccctcgtgtgcctggctaccggcttctaccccgaccatgtggaactgtcttggtgggtcaacggcaaagaggtgcacagcggcgtgtgtaccgacccccagccactgaaagaacagcccgccctgaacgacagccggtactgcctgagcagcagactgagagtgtccgccaccttctggcagaacccccggaaccacttcagatgccaggtgcagttctacggcctgagcgagaacgacgagtggacccaggacagagccaagcccgtgacccagatcgtgtctgccgaagcctggggcagagccgattgcggctttaccagcgagagctaccagcagggcgtgctgagcgccaccatcctgtacgagatcctgctgggcaaggccaccctgtacgccgtgctggtgtctgccctggtgctgatggctatggtcaagcggaaggacagccggggataa

SEQ ID NO: 4872 - DNA, 1938 bp, synthetic construct
  source 1..1938: mol_type = other DNA
atggccttaccagtgaccgccttgctcctgccgctggccttgctgctccacgccgccaggccggcatgcgctagaagcgaagatcggtatcggaaccccaagggtaccgacatcgtgatgacacagagccctgatagcctggccgtgtctctgggagagagagccaccatcaactgcaagagcagccagagcctgctgaacagcggcaacaacaagaactacgtgacatggtatcagcagaagcccggccagcctcctaagctgctgatctactggggcagcaccagatccacaggcgtgcccgatagattttctggctctggcagcggcaccgacttcaccctgacaatttctagcctgcaagccgaggacgtggccgtgtactactgccagaacgactacacataccccttcaccttcggccagggcaccaagctggaaatcaaactcgagatccagaaccctgatcctgccgtgtaccagctgcgggatagcaagagcagcgacaagagcgtgtgtctgttcaccgacttcgacagccagaccaacgtgtcccagagcaaggactccgacgtgtacatcaccgataagtgcgtgctggacatgcggagcatggacttcaagagcaactccgccgtggcctggtccaacaagtccgatttcgcctgcgccaacgccttcaacaacagcattatccccgaggacacattcttcccaagccccgagagcagctgcgacgtgaagctggtggaaaagagcttcgagacagacaccaacctgaacttccagaacctgagcgtgatcggcttcagaatcctgctgctgaaagtggccggctttaacctgctgatgaccctgcggctgtggtccagctctagtcgcgccaagagaagcggatctggcgtgaagcagaccctgaatttcgacctgctgaagctggctggcgacgtggaatccaacccaggccctactagtatggactggatttggcgcatccttttccttgtcggcgctgctaccggcgcgcattccttcgaacaagttcagctggttcagagcggagccgaagtgaagaaacctggggcctctgtgaaggtgtcctgcaaggcttccggctataccttcaccagcttttggctgaactgggtccgacaggcccctggacaaggactggaatggatgggcaacatctaccccagcaccagctacaccgtgtacaaccagaaattcaaggaccgcgtgaccatgaccagggacaccagcacaagcacagtgtacatggaactgagcagcctgcggagcgaggataccgccgtgtattattgcgccagaacctggcggggcaacagcttcgattattggggccagggaaccaccgtgaccgtgtcatctacgcgtgaggacctgaagaacgtgttcccacctgaggtggccgtgttcgagcctagcgaggccgagatcagccacacccagaaagccaccctcgtgtgcctggctaccggcttctaccccgaccatgtggaactgtcttggtgggtcaacggcaaagaggtgcacagcggcgtgtgtaccgacccccagccactgaaagaacagcccgccctgaacgacagccggtactgcctgagcagcagactgagagtgtccgccaccttctggcagaacccccggaaccacttcagatgccaggtgcagttctacggcctgagcgagaacgacgagtggacccaggacagagccaagcccgtgacccagatcgtgtctgccgaagcctggggcagagccgattgcggctttaccagcgagagctaccagcagggcgtgctgagcgccaccatcctgtacgagatcctgctgggcaaggccaccctgtacgccgtgctggtgtctgccctggtgctgatggctatggtcaagcggaaggacagccggggataa

SEQ ID NO: 4873 - DNA, 1929 bp, synthetic construct
  source 1..1929: mol_type = other DNA
atggccttaccagtgaccgccttgctcctgccgctggccttgctgctccacgccgccaggccggacatcgtgatgacacagagccctgatagcctggccgtgtctctgggagagagagccaccatcaactgcaagagcagccagagcctgctgaacagcggcaaccagaagaactacctggcctggtatcagcagaagcccggccagcctcctaagctgctgatctactggggcagcaccagatccacaggcgtgcccgatagattttctggctctggcagcggcaccgacttcaccctgacaatttctagcctgcaagccgaggacgtggccgtgtactactgccagaacgactacacataccccttcaccttcggccagggcaccaagctggaaatcaaactcgaggacctgaagaacgtgttcccacctgaggtggccgtgttcgagcctagcgaggccgagatcagccacacccagaaagccaccctcgtgtgcctggctaccggcttctaccccgaccatgtggaactgtcttggtgggtcaacggcaaagaggtgcacagcggcgtgtgtaccgacccccagccactgaaagaacagcccgccctgaacgacagccggtactgcctgagcagcagactgagagtgtccgccaccttctggcagaacccccggaaccacttcagatgccaggtgcagttctacggcctgagcgagaacgacgagtggacccaggacagagccaagcccgtgacccagatcgtgtctgccgaagcctggggcagagccgattgcggctttaccagcgagagctaccagcagggcgtgctgagcgccaccatcctgtacgagatcctgctgggcaaggccaccctgtacgccgtgctggtgtctgccctggtgctgatggctatggtcaagcggaaggacagccggggaagggccaagcgatctggatctggagcaacaaacttctcactactcaaacaagcaggtgacgtggaggagaatcccgggcctactagtgccaccatggactggatttggcgcatccttttccttgtcggcgctgctaccggcgcccattccgggcccgcaagaagtgaagatcgctacaggaaccctaaggggtcagccttcgaacaagttcagctggttcagagcggagccgaagtgaagaaacctggggcctctgtgaaggtgtcctgcaaggcttccggctataccttcaccagcttttggctgaactgggtccgacaggcccctggacaaggactggaatggatgggcaacatctaccccagcgacagctacaccgtgtacaaccagaaattcaaggaccgcgtgaccatgaccagggacaccagcacaagcacagtgtacatggaactgagcagcctgcggagcgaggataccgccgtgtattattgcgccagaacctggcggggcaacagcttcgattattggggccagggaaccaccgtgaccgtgtcatctacgcgtatccagaaccctgatcctgccgtgtaccagctgcgggatagcaagagcagcgacaagagcgtgtgtctgttcaccgacttcgacagccagaccaacgtgtcccagagcaaggactccgacgtgtacatcaccgataagtgcgtgctggacatgcggagcatggacttcaagagcaactccgccgtggcctggtccaacaagtccgatttcgcctgcgccaacgccttcaacaacagcattatccccgaggacacattcttcccaagccccgagagcagctgcgacgtgaagctggtggaaaagagcttcgagacagacaccaacctgaacttccagaacctgagcgtgatcggcttcagaatcctgctgctgaaagtggccggctttaacctgctgatgaccctgcggctgtggtccagctaa

SEQ ID NO: 4874 - DNA, 2331 bp, synthetic construct
  source 1..2331: mol_type = other DNA
atggccttaccagtgaccgccttgctcctgccgctggccttgctgctccacgccgccaggccggcatgcgctagaagcgaagatcggtatcggaaccccaaggaattcgacatccagatgacacagagccctagcagcctgtctgccagcgtgggagacagagtgaccatcacatgcaaggccagcgaccacatcaacaactggctggcctggtatcagcagaagcctggacaggcccctaagctgctgatctacggcgctaccacactggaaacaggcgtgcccagcagattttctggcagcggctctggcaccgactacaccctgacaatatccagcctccagcctgaggacttcgccacctactactgtcagcagagctggaacaccccttggacattcggccagggcaccaagctggaaatcaagagactcgaggacctgaagaacgtgttcccacctgaggtggccgtgttcgagcctagcgaggccgagatcagccacacccagaaagccaccctcgtgtgcctggctaccggcttctaccccgaccatgtggaactgtcttggtgggtcaacggcaaagaggtgcacagcggcgtgtgtaccgacccccagccactgaaagaacagcccgccctgaacgacagccggtactgcctgagcagcagactgagagtgtccgccaccttctggcagaacccccggaaccacttcagatgccaggtgcagttctacggcctgagcgagaacgacgagtggacccaggacagagccaagcccgtgacccagatcgtgtctgccgaagcctggggcagagccgattgcggctttaccagcgagagctaccagcagggcgtgctgagcgccaccatcctgtacgagatcctgctgggcaaggccaccctgtacgccgtgctggtgtctgccctggtgctgatggctatggtcaagcggaaggacagccggggaagggccaagcgatctggatctggagcaacaaacttctcactactcaaacaagcaggtgacgtggaggagaatcccgggcctactagtgccaccatggactggatttggcgcatccttttccttgtcggcgctgctaccggcgcccattccgggcccgaagtgcaactggttgaatccggtggcggcctggtgcaagcaggcggatctctcagacttagctgtgccgcctccggcagaaccttcacaatgggatggtttaggcaggctccagggaaagagagagagttcgtcgccgccatctctctgtctcccacactggcctactacgccgactctgtgaaaggccggttcaccatctccagagataatgccaagaacaccgtggtgctgcaaatgaactctctgaaacccgaggatacagccctgtactattgtgccgctgaccggaagtccgtgatgagcatcagacccgattactggggacagggcacacaagtcacagtgtcctctggatccggcggcggaggatctggcggaggcggatctgggggcggaggctctttcgaacaagttcagcttcaacagcctggcgctgagctggtcaaacctggcgcttctgtgaagatgagctgcaaagccagcggctacgccttcagcagctactggatcaactggatgaagcagaaacccggccagggactcgaatggatcggccaaatctatcccggcgacggcgacaccaactacaacggcaagttcaagggcagagccacactgaccgccgatacctctagcagcacagcctacatgcagctgagcagcctgaccagcgaagatagcgccgtgtacttctgtgcccggtccatcacaacagtcgtgggctgcgctatggactattggggccagggaacaagcgtgaccgtgtctagtacgcgtatccagaaccctgatcctgccgtgtaccagctgcgggatagcaagagcagcgacaagagcgtgtgtctgttcaccgacttcgacagccagaccaacgtgtcccagagcaaggactccgacgtgtacatcaccgataagtgcgtgctggacatgcggagcatggacttcaagagcaactccgccgtggcctggtccaacaagtccgatttcgcctgcgccaacgccttcaacaacagcattatccccgaggacacattcttcccaagccccgagagcagctgcgacgtgaagctggtggaaaagagcttcgagacagacaccaacctgaacttccagaacctgagcgtgatcggcttcagaatcctgctgctgaaagtggccggctttaacctgctgatgaccctgcggctgtggtccagctaa

SEQ ID NO: 4875 - DNA, 1893 bp, synthetic construct
  source 1..1893: mol_type = other DNA
atggccttaccagtgaccgccttgctcctgccgctggccttgctgctccacgccgccaggccggcatgcgctagaagcgaagatcggtatcggaaccccaaggaattcgacatccagatgacacagagccctagcagcctgtctgccagcgtgggagacagagtgaccatcacatgcaaggccagccaggatgtgggcacagccgtggattggtatcagcagaagcctggcaaggcccctaagctgctgatctactgggccagcacaagacacacaggcgtgcccagcagattttctggcagcggctctggcaccgacttcaccctgacaatatccagcctccagcctgaggacttcgccacctactactgccagcagtacaacagctaccctctgaccttcggccagggcaccaaggtggaaatcaaaagactcgaggacctgaagaacgtgttcccacctgaggtggccgtgttcgagcctagcgaggccgagatcagccacacccagaaagccaccctcgtgtgcctggctaccggcttctaccccgaccatgtggaactgtcttggtgggtcaacggcaaagaggtgcacagcggcgtgtgtaccgacccccagccactgaaagaacagcccgccctgaacgacagccggtactgcctgagcagcagactgagagtgtccgccaccttctggcagaacccccggaaccacttcagatgccaggtgcagttctacggcctgagcgagaacgacgagtggacccaggacagagccaagcccgtgacccagatcgtgtctgccgaagcctggggcagagccgattgcggctttaccagcgagagctaccagcagggcgtgctgagcgccaccatcctgtacgagatcctgctgggcaaggccaccctgtacgccgtgctggtgtctgccctggtgctgatggctatggtcaagcggaaggacagccggggaagggccaagcgatctggatctggagcaacaaacttctcactactcaaacaagcaggtgacgtggaggagaatcccgggcctactagtatggactggatttggcgcatccttttccttgtcggcgctgctaccggcgcgcattccttcgaagtgcagctggttgaatcaggtggcggcctggttcaacctggcggatctctgagactgagctgtgccgccagcggcttcacctttaccgactacacaatccactgggtccgacaggcccctggcaaaggacttgagtgggtcgccaacatcaaccccaacaatggcggcaccacctacaaccagaagttcgaggacagattcaccatcagccgggacaacagcaagaacaccctgtacctccagatgaactccctgagagccgaggacaccgccgtgtactattgtgccagaggctggaacttcgactactggggccagggaacactggtcaccgttagctctacgcgtatccagaaccctgatcctgccgtgtaccagctgcgggatagcaagagcagcgacaagagcgtgtgtctgttcaccgacttcgacagccagaccaacgtgtcccagagcaaggactccgacgtgtacatcaccgataagtgcgtgctggacatgcggagcatggacttcaagagcaactccgccgtggcctggtccaacaagtccgatttcgcctgcgccaacgccttcaacaacagcattatccccgaggacacattcttcccaagccccgagagcagctgcgacgtgaagctggtggaaaagagcttcgagacagacaccaacctgaacttccagaacctgagcgtgatcggcttcagaatcctgctgctgaaagtggccggctttaacctgctgatgaccctgcggctgtggtccagctaa

SEQ ID NO: 4876 - DNA, 2382 bp, synthetic construct
  source 1..2382: mol_type = other DNA
atggccttaccagtgaccgccttgctcctgccgctggccttgctgctccacgccgccaggccggcatgcgccaagtctgaggacctgtatcctaatccaaaaggtaccggcggaggcggatctggcggcggaggtagcggtggcggaggatctgaattcgacatccagatgacacagagccctagcagcctgtctgccagcgtgggagacagagtgaccatcacatgcaaggccagcgaccacatcaacaactggctggcctggtatcagcagaagcctggacaggcccctaagctgctgatctacggcgctaccacactggaaacaggcgtgcccagcagattttctggcagcggctctggcaccgactacaccctgacaatatccagcctccagcctgaggacttcgccacctactactgtcagcagagctggaacaccccttggacattcggccagggcaccaagctggaaatcaagagactcgaggacctgaagaacgtgttcccacctgaggtggccgtgttcgagcctagcgaggccgagatcagccacacccagaaagccaccctcgtgtgcctggctaccggcttctaccccgaccatgtggaactgtcttggtgggtcaacggcaaagaggtgcacagcggcgtgtgtaccgacccccagccactgaaagaacagcccgccctgaacgacagccggtactgcctgagcagcagactgagagtgtccgccaccttctggcagaacccccggaaccacttcagatgccaggtgcagttctacggcctgagcgagaacgacgagtggacccaggacagagccaagcccgtgacccagatcgtgtctgccgaagcctggggcagagccgattgcggctttaccagcgagagctaccagcagggcgtgctgagcgccaccatcctgtacgagatcctgctgggcaaggccaccctgtacgccgtgctggtgtctgccctggtgctgatggctatggtcaagcggaaggacagccggggaagggccaagcgatctggatctggagcaacaaacttctcactactcaaacaagcaggtgacgtggaggagaatcccgggcctactagtgccaccatggactggatttggcgcatccttttccttgtcggcgctgctaccggcgcccattccgggcccgaagtgcaactggttgaatccggtggcggcctggtgcaagcaggcggatctctcagacttagctgtgccgcctccggcagaaccttcacaatgggatggtttaggcaggctccagggaaagagagagagttcgtcgccgccatctctctgtctcccacactggcctactacgccgactctgtgaaaggccggttcaccatctccagagataatgccaagaacaccgtggtgctgcaaatgaactctctgaaacccgaggatacagccctgtactattgtgccgctgaccggaagtccgtgatgagcatcagacccgattactggggacagggcacacaagtcacagtgtcctctggatccggcggcggaggatctggcggaggcggatctgggggcggaggctctttcgaacaagttcagcttcaacagcctggcgctgagctggtcaaacctggcgcttctgtgaagatgagctgcaaagccagcggctacgccttcagcagctactggatcaactggatgaagcagaaacccggccagggactcgaatggatcggccaaatctatcccggcgacggcgacaccaactacaacggcaagttcaagggcagagccacactgaccgccgatacctctagcagcacagcctacatgcagctgagcagcctgaccagcgaagatagcgccgtgtacttctgtgcccggtccatcacaacagtcgtgggctgcgctatggactattggggccagggaacaagcgtgaccgtgtctagtacgcgtatccagaaccctgatcctgccgtgtaccagctgcgggatagcaagagcagcgacaagagcgtgtgtctgttcaccgacttcgacagccagaccaacgtgtcccagagcaaggactccgacgtgtacatcaccgataagtgcgtgctggacatgcggagcatggacttcaagagcaactccgccgtggcctggtccaacaagtccgatttcgcctgcgccaacgccttcaacaacagcattatccccgaggacacattcttcccaagccccgagagcagctgcgacgtgaagctggtggaaaagagcttcgagacagacaccaacctgaacttccagaacctgagcgtgatcggcttcagaatcctgctgctgaaagtggccggctttaacctgctgatgaccctgcggctgtggtccagctaa

SEQ ID NO: 4877 - DNA, 2985 bp, synthetic construct
  source 1..2985: mol_type = other DNA
atggccttaccagtgaccgccttgctcctgccgctggccttgctgctccacgccgccaggccgagctacgtgctgacacagcctccatccgtgtctgtggctccaggacagaccgccagaatcacatgcggcggcaacaacatcggcagcaagagcgtgcactggtatcagcagccacctggacaggctccagtggtggtggtgtacgacgacagcgatagacctagcggcatccccgagagattcagcggcagcaattccggcaataccgccacactgaccatcagcagagtggaagctggcgacgaggccgtgtactactgccaagtgtgggacagcagcagcgatcacgtggtgtttggcggcggaacaaagctgacagtgcttctcgaggacctgaagaacgtgttcccacctgaggtggccgtgttcgagcctagcgaggccgagatcagccacacccagaaagccaccctcgtgtgcctggctaccggcttctaccccgaccatgtggaactgtcttggtgggtcaacggcaaagaggtgcacagcggcgtgtctaccgacccccagccactgaaagaacagcccgccctgaacgacagccggtactgcctgagcagcagactgagagtgtccgccaccttctggcagaacccccggaaccacttcagatgccaggtgcagttctacggcctgagcgagaacgacgagtggacccaggacagagccaagcccgtgacccagatcgtgtctgccgaagcctggggcagagccgattgcggatcccagagcttcggcctgctggaccccaagctgtgctacctgctggatggcatcctgttcatctacggcgtgatcctgaccgccctgttcctgagagtgaagttcagcagaagcgccgacgcccctgcctaccagcagggacagaaccaactgtacaacgagctgaacctgggcagacgggaagagtacgacgtgctggacaagcggagaggcagggaccctgagatgggcggaaagccccggagaaagaacccccaggaaggactgtataacgaactccagaaagacaagatggccgaagcctacagcgagatcggcatgaagggcgagcggagaagaggcaagggccacgatggcctgtaccagggcctgagcaccgccaccaaggacacctatgacgccctgcacatgcaggccctgcctccaagaagggccaagcgatctggatctggagcaacaaacttctcactactcaaacaagcaggtgacgtggaggagaatcccgggcctactagtatggactggatttggcgcatccttttccttgtcggcgctgctaccggcgcgcattccttcgaacaactccagctgcaagagtctggccctggcctggtcaagcctagcgaaacactgagcctgacctgtaccgtgtctggcggctctatcagctccggcagctatttctggggctggatcagacaacctcctggcaaaggactggaatggatcggctccatctactacagcggcatcacctactacaaccccagcctgaagtccagagtgaccatctccgtggacaccagcaagaaccagttctccctgaagctgagcagcgtgacagccgccgataccgccgtgtattattgtgccagacatgacggcgctgtggccggcctgtttgattattggggacagggcaccctggtcaccgtgtcatctgctacgcgtatccagaaccctgatcctgccgtgtaccagctgcgggatagcaagagcagcgacaagagcgtgtgtctgttcaccgacttcgacagccagaccaacgtgtcccagagcaaggactccgacgtgtacatcaccgataagaccgtgctggacatgcggagcatggacttcaagagcaactccgccgtggcctggtccaacaagtccgatttcgcctgcgccaacgccttcaacaacagcattatccccgaggacacattcttcccaagccccgagagcagctgcggtaccatcactcaaggtttggcagtgtcaaccatctcatcattctttccacctggctaccaagtgtccttctgcctggtcatggtgctgctgttcgccgtggataccggcctgtacttcagcgtcaggagcaagcggtcacggctgctccacagcgattacatgaatatgacaccacgaagaccgggtcctactcgcaaacactaccaaccctacgcacctccccgcgactttgcagcgtaccgatctcgcgccaagagaagcggatctggcgtgaagcagaccctgaatttcgacctgctgaagctggctggcgacgtggaatccaacccaggcccttctagaatgtaccggatgcagctgctgagctgtatcgccctgtctctggccctggtcacaaatagcaactgggttaacgtgatctccgacctgaagaagatcgaggacctgatccagtccatgcacatcgacgccacactgtacaccgagagcgacgtgcaccctagctgtaaagtgaccgccatgaagtgctttctgctggaactgcaagtgatctccctggaaagcggcgacgccagcatccacgacaccgtgaagaacctgattatcctggctaacaacagcctgagcagcaacggcaacgtgaccgagtccggctgtaaagagtgcgaggaactggaagagaagaatatcaaagagttcctccagagcttcgtgcacatcgtgcagatgttcatcaacaccagcaagatcgaagtgatgtaccctcctccttacctggacaacgagaagtccaacggcaccatcatccacgtgaagggcaagcacctgtgtccttctccactgttccccggacctagcaagcctttctgggtgctcgttgttgttggcggcgtgctggcctgttacagcctgctggttaccgtggccttcatcatcttttgggtccgaagcaagcggagctaa

SEQ ID NO: 4878 - DNA, 3060 bp, synthetic construct
  source 1..3060: mol_type = other DNA
atggccttaccagtgaccgccttgctcctgccgctggccttgctgctccacgccgccaggccggacatccagatgacacagagccctagcagcctgtctgccagcgtgggagacagagtgaccatcacatgcaaggccagcgaccacatcaacaactggctggcctggtatcagcagaagcctggacaggcccctaagctgctgatctacggcgctaccacactggaaacaggcgtgcccagcagattttctggcagcggctctggcaccgactacaccctgacaatatccagcctccagcctgaggacttcgccacctactactgtcagcagagctggaacaccccttggacattcggccagggcaccaagctggaaatcaagagactcgaggacctgaagaacgtgttcccacctgaggtggccgtgttcgagcctagcgaggccgagatcagccacacccagaaagccaccctcgtgtgcctggctaccggcttctaccccgaccatgtggaactgtcttggtgggtcaacggcaaagaggtgcacagcggcgtgtgtaccgacccccagccactgaaagaacagcccgccctgaacgacagccggtactgcctgagcagcagactgagagtgtccgccaccttctggcagaacccccggaaccacttcagatgccaggtgcagttctacggcctgagcgagaacgacgagtggacccaggacagagccaagcccgtgacccagatcgtgtctgccgaagcctggggcagagccgattgcggctttaccagcgagagctaccagcagggcgtgctgagcgccggatcccagagcttcggcctgctggaccccaagctgtgctacctgctggatggcatcctgttcatctacggcgtgatcctgaccgccctgttcctgagagtgaagttcagcagaagcgccgacgcccctgcctaccagcagggacagaaccaactgtacaacgagctgaacctgggcagacgggaagagtacgacgtgctggacaagcggagaggcagggaccctgagatgggcggaaagccccggagaaagaacccccaggaaggactgtataacgaactccagaaagacaagatggccgaagcctacagcgagatcggcatgaagggcgagcggagaagaggcaagggccacgatggcctgtaccagggcctgagcaccgccaccaaggacacctatgacgccctgcacatgcaggccctgcctccaagaagggccaagcgatctggatctggagcaacaaacttctcactactcaaacaagcaggtgacgtggaggagaatcccgggcctactagtatggactggatttggcgcatccttttccttgtcggcgctgctaccggcgcgcattccttcgaacaagttcagcttcaacagcctggcgctgagctggtcaaacctggcgcttctgtgaagatgagctgcaaagccagcggctacgccttcagcagctactggatcaactggatgaagcagaaacccggccagggactcgaatggatcggccaaatctatcccggcgacggcgacaccaactacaacggcaagttcaagggcagagccacactgaccgccgatacctctagcagcacagcctacatgcagctgagcagcctgaccagcgaagatagcgccgtgtacttctgtgcccggtccatcacaacagtcgtgggctgcgctatggactattggggccagggaacaagcgtgaccgtgtctagtacgcgtatccagaaccctgatcctgccgtgtaccagctgcgggatagcaagagcagcgacaagagcgtgtgtctgttcaccgacttcgacagccagaccaacgtgtcccagagcaaggactccgacgtgtacatcaccgataagtgcgtgctggacatgcggagcatggacttcaagagcaactccgccgtggcctggtccaacaagtccgatttcgcctgcgccaacgccttcaacaacagcattatccccgaggacacattcttcccaagccccgagagcagctgcgacgtgaagctggtggaaaagagcttcgagacagacggtaccatcactcaaggtttggcagtgtcaaccatctcatcattctttccacctggctaccaagtgtccttctgcctggtcatggtgctgctgttcgccgtggataccggcctgtacttcagcgtcaggagcaagcggtcacggctgctccacagcgattacatgaatatgacaccacgaagaccgggtcctactcgcaaacactaccaaccctacgcacctccccgcgactttgcagcgtaccgatctcgcgccaagagaagcggatctggcgtgaagcagaccctgaatttcgacctgctgaagctggctggcgacgtggaatccaacccaggcccttctagaatgtaccggatgcagctgctgagctgtatcgccctgtctctggccctggtcacaaatagcaactgggttaacgtgatctccgacctgaagaagatcgaggacctgatccagtccatgcacatcgacgccacactgtacaccgagagcgacgtgcaccctagctgtaaagtgaccgccatgaagtgctttctgctggaactgcaagtgatctccctggaaagcggcgacgccagcatccacgacaccgtgaagaacctgattatcctggctaacaacagcctgagcagcaacggcaacgtgaccgagtccggctgtaaagagtgcgaggaactggaagagaagaatatcaaagagttcctccagagcttcgtgcacatcgtgcagatgttcatcaacaccagcaagatcgaagtgatgtaccctcctccttacctggacaacgagaagtccaacggcaccatcatccacgtgaagggcaagcacctgtgtccttctccactgttccccggacctagcaagcctttctgggtgctcgttgttgttggcggcgtgctggcctgttacagcctgctggttaccgtggccttcatcatcttttgggtccgaagcaagcggagctaa

SEQ ID NO: 4879 - DNA, 3402 bp, synthetic construct
  source 1..3402: mol_type = other DNA
atggccttaccagtgaccgccttgctcctgccgctggccttgctgctccacgccgccaggccggacatccagatgacacagagccctagcagcctgtctgccagcgtgggagacagagtgaccatcacatgcaaggccagcgaccacatcaacaactggctggcctggtatcagcagaagcctggacaggcccctaagctgctgatctacggcgctaccacactggaaacaggcgtgcccagcagattttctggcagcggctctggcaccgactacaccctgacaatatccagcctccagcctgaggacttcgccacctactactgtcagcagagctggaacaccccttggacattcggccagggcaccaagctggaaatcaagagactcgaggacctgaagaacgtgttcccacctgaggtggccgtgttcgagcctagcgaggccgagatcagccacacccagaaagccaccctcgtgtgcctggctaccggcttctaccccgaccatgtggaactgtcttggtgggtcaacggcaaagaggtgcacagcggcgtgtctaccgacccccagccactgaaagaacagcccgccctgaacgacagccggtactgcctgagcagcagactgagagtgtccgccaccttctggcagaacccccggaaccacttcagatgccaggtgcagttctacggcctgagcgagaacgacgagtggacccaggacagagccaagcccgtgacccagatcgtgtctgccgaagcctggggcagagccgattgcggatcccagagcttcggcctgctggaccccaagctgtgctacctgctggatggcatcctgttcatctacggcgtgatcctgaccgccctgttcctgagagtgaagttcagcagaagcgccgacgcccctgcctaccagcagggacagaaccaactgtacaacgagctgaacctgggcagacgggaagagtacgacgtgctggacaagcggagaggcagggaccctgagatgggcggaaagccccggagaaagaacccccaggaaggactgtataacgaactccagaaagacaagatggccgaagcctacagcgagatcggcatgaagggcgagcggagaagaggcaagggccacgatggcctgtaccagggcctgagcaccgccaccaaggacacctatgacgccctgcacatgcaggccctgcctccaagaagggccaagcgatctggatctggagcaacaaacttctcactactcaaacaagcaggtgacgtggaggagaatcccgggcctactagtgccaccatggactggatttggcgcatccttttccttgtcggcgctgctaccggcgcccattccgggcccgaagtgcagctggttgaatctggcggaggactggttcaggctggcggatctctgagactgtcttgtgccgccagcggcagaacctttagcatgggctggtttagacaggcccctggcaaagagagagagttcgtcgccgccatcacatactctggcggcagcccttactacgccgactctgtgaagggcagattcaccatcagccgggacaacgccaagaacaccgtgtacctccagatgaacagcctgaagcctgaggacaccgccgtgtactactgcgccgccaatccaacatacggcagcgactggaacgccgagaattggggccagggaacccaagtgacagtgtctagcggatccggcggcggaggatctggcggaggcggatctgggggcggaggctctttcgaacaagttcagcttcaacagcctggcgctgagctggtcaaacctggcgcttctgtgaagatgagctgcaaagccagcggctacgccttcagcagctactggatcaactggatgaagcagaaacccggccagggactcgaatggatcggccaaatctatcccggcgacggcgacaccaactacaacggcaagttcaagggcagagccacactgaccgccgatacctctagcagcacagcctacatgcagctgagcagcctgaccagcgaagatagcgccgtgtacttctgtgcccggtccatcacaacagtcgtgggctgcgctatggactattggggccagggaacaagcgtgaccgtgtctagtacgcgtatccagaaccctgatcctgccgtgtaccagctgcgggatagcaagagcagcgacaagagcgtgtgtctgttcaccgacttcgacagccagaccaacgtgtcccagagcaaggactccgacgtgtacatcaccgataagaccgtgctggacatgcggagcatggacttcaagagcaactccgccgtggcctggtccaacaagtccgatttcgcctgcgccaacgccttcaacaacagcattatccccgaggacacattcttcccaagccccgagagcagctgcggtaccatcactcaaggtttggcagtgtcaaccatctcatcattctttccacctggctaccaagtgtccttctgcctggtcatggtgctgctgttcgccgtggataccggcctgtacttcagcgtcaagagaggccggaagaagctgctgtacatcttcaagcagcctttcatgcggcccgtgcagaccacccaggaagaggacggctgctcctgccggttccccgaggaagaagaaggcggctgcgagctgcgcgccaagagaagcggatctggcgtgaagcagaccctgaatttcgacctgctgaagctggctggcgacgtggaatccaacccaggcccttctagaatgtaccggatgcagctgctgagctgtatcgccctgtctctggccctggtcacaaatagcaactgggttaacgtgatctccgacctgaagaagatcgaggacctgatccagtccatgcacatcgacgccacactgtacaccgagagcgacgtgcaccctagctgtaaagtgaccgccatgaagtgctttctgctggaactgcaagtgatctccctggaaagcggcgacgccagcatccacgacaccgtgaagaacctgattatcctggctaacaacagcctgagcagcaacggcaacgtgaccgagtccggctgtaaagagtgcgaggaactggaagagaagaatatcaaagagttcctccagagcttcgtgcacatcgtgcagatgttcatcaacaccagcaagatcgaagtgatgtaccctcctccttacctggacaacgagaagtccaacggcaccatcatccacgtgaagggcaagcacctgtgtccttctccactgttccccggacctagcaagcctttctgggtgctcgttgttgttggcggcgtgctggcctgttacagcctgctggttaccgtggccttcatcatcttttgggtccgaagcaagcggagctaa

SEQ ID NO: 4880 - DNA, 2442 bp, synthetic construct
  source 1..2442: mol_type = other DNA
atggccttaccagtgaccgccttgctcctgccgctggccttgctgctccacgccgccaggccgagctacgtgctgacacagcctccatccgtgtctgtggctccaggacagaccgccagaatcacatgcggcggcaacaacatcggcagcaagagcgtgcactggtatcagcagccacctggacaggctccagtggtggtggtgtacgacgacagcgatagacctagcggcatccccgagagattcagcggcagcaattccggcaataccgccacactgaccatcagcagagtggaagctggcgacgaggccgtgtactactgccaagtgtgggacagcagcagcgatcacgtggtgtttggcggcggaacaaagctgacagtgcttctcgaggacctgaagaacgtgttcccacctgaggtggccgtgttcgagcctagcgaggccgagatcagccacacccagaaagccaccctcgtgtgcctggctaccggcttctaccccgaccatgtggaactgtcttggtgggtcaacggcaaagaggtgcacagcggcgtgtctaccgacccccagccactgaaagaacagcccgccctgaacgacagccggtactgcctgagcagcagactgagagtgtccgccaccttctggcagaacccccggaaccacttcagatgccaggtgcagttctacggcctgagcgagaacgacgagtggacccaggacagagccaagcccgtgacccagatcgtgtctgccgaagcctggggcagagccgattgcggatcccagagcttcggcctgctggaccccaagctgtgctacctgctggatggcatcctgttcatctacggcgtgatcctgaccgccctgttcctgagagtgaagttcagcagaagcgccgacgcccctgcctaccagcagggacagaaccaactgtacaacgagctgaacctgggcagacgggaagagtacgacgtgctggacaagcggagaggcagggaccctgagatgggcggaaagccccggagaaagaacccccaggaaggactgtataacgaactccagaaagacaagatggccgaagcctacagcgagatcggcatgaagggcgagcggagaagaggcaagggccacgatggcctgtaccagggcctgagcaccgccaccaaggacacctatgacgccctgcacatgcaggccctgcctccaagaagggccaagcgatctggatctggagcaacaaacttctcactactcaaacaagcaggtgacgtggaggagaatcccgggcctactagtatggactggatttggcgcatccttttccttgtcggcgctgctaccggcgcgcattccttcgaacaactccagctgcaagagtctggccctggcctggtcaagcctagcgaaacactgagcctgacctgtaccgtgtctggcggctctatcagctccggcagctatttctggggctggatcagacaacctcctggcaaaggactggaatggatcggctccatctactacagcggcatcacctactacaaccccagcctgaagtccagagtgaccatctccgtggacaccagcaagaaccagttctccctgaagctgagcagcgtgacagccgccgataccgccgtgtattattgtgccagacatgacggcgctgtggccggcctgtttgattattggggacagggcaccctggtcaccgtgtcatctgctacgcgtatccagaaccctgatcctgccgtgtaccagctgcgggatagcaagagcagcgacaagagcgtgtgtctgttcaccgacttcgacagccagaccaacgtgtcccagagcaaggactccgacgtgtacatcaccgataagaccgtgctggacatgcggagcatggacttcaagagcaactccgccgtggcctggtccaacaagtccgatttcgcctgcgccaacgccttcaacaacagcattatccccgaggacacattcttcccaagccccgagagcagctgcggtaccatcactcaaggtttggcagtgtcaaccatctcatcattctttccacctggctaccaagtgtccttctgcctggtcatggtgctgctgttcgccgtggataccggcctgtacttcagcgtcaggagcaagcggtcacggctgctccacagcgattacatgaatatgacaccacgaagaccgggtcctactcgcaaacactaccaaccctacgcacctccccgcgactttgcagcgtaccgatctcgcgccaagagaagcggatctggcgtgaagcagaccctgaatttcgacctgctgaagctggctggcgacgtggaatccaacccaggcccttctagaggctccggtgcccgtcagtgggcagagcgcacatcgcccacagtccccgagaagttggggggaggggtcggcaattga

SEQ ID NO: 4881 - DNA, 2517 bp, synthetic construct
  source 1..2517: mol_type = other DNA
atggccttaccagtgaccgccttgctcctgccgctggccttgctgctccacgccgccaggccggacatccagatgacacagagccctagcagcctgtctgccagcgtgggagacagagtgaccatcacatgcaaggccagcgaccacatcaacaactggctggcctggtatcagcagaagcctggacaggcccctaagctgctgatctacggcgctaccacactggaaacaggcgtgcccagcagattttctggcagcggctctggcaccgactacaccctgacaatatccagcctccagcctgaggacttcgccacctactactgtcagcagagctggaacaccccttggacattcggccagggcaccaagctggaaatcaagagactcgaggacctgaagaacgtgttcccacctgaggtggccgtgttcgagcctagcgaggccgagatcagccacacccagaaagccaccctcgtgtgcctggctaccggcttctaccccgaccatgtggaactgtcttggtgggtcaacggcaaagaggtgcacagcggcgtgtgtaccgacccccagccactgaaagaacagcccgccctgaacgacagccggtactgcctgagcagcagactgagagtgtccgccaccttctggcagaacccccggaaccacttcagatgccaggtgcagttctacggcctgagcgagaacgacgagtggacccaggacagagccaagcccgtgacccagatcgtgtctgccgaagcctggggcagagccgattgcggctttaccagcgagagctaccagcagggcgtgctgagcgccggatcccagagcttcggcctgctggaccccaagctgtgctacctgctggatggcatcctgttcatctacggcgtgatcctgaccgccctgttcctgagagtgaagttcagcagaagcgccgacgcccctgcctaccagcagggacagaaccaactgtacaacgagctgaacctgggcagacgggaagagtacgacgtgctggacaagcggagaggcagggaccctgagatgggcggaaagccccggagaaagaacccccaggaaggactgtataacgaactccagaaagacaagatggccgaagcctacagcgagatcggcatgaagggcgagcggagaagaggcaagggccacgatggcctgtaccagggcctgagcaccgccaccaaggacacctatgacgccctgcacatgcaggccctgcctccaagaagggccaagcgatctggatctggagcaacaaacttctcactactcaaacaagcaggtgacgtggaggagaatcccgggcctactagtatggactggatttggcgcatccttttccttgtcggcgctgctaccggcgcgcattccttcgaacaagttcagcttcaacagcctggcgctgagctggtcaaacctggcgcttctgtgaagatgagctgcaaagccagcggctacgccttcagcagctactggatcaactggatgaagcagaaacccggccagggactcgaatggatcggccaaatctatcccggcgacggcgacaccaactacaacggcaagttcaagggcagagccacactgaccgccgatacctctagcagcacagcctacatgcagctgagcagcctgaccagcgaagatagcgccgtgtacttctgtgcccggtccatcacaacagtcgtgggctgcgctatggactattggggccagggaacaagcgtgaccgtgtctagtacgcgtatccagaaccctgatcctgccgtgtaccagctgcgggatagcaagagcagcgacaagagcgtgtgtctgttcaccgacttcgacagccagaccaacgtgtcccagagcaaggactccgacgtgtacatcaccgataagtgcgtgctggacatgcggagcatggacttcaagagcaactccgccgtggcctggtccaacaagtccgatttcgcctgcgccaacgccttcaacaacagcattatccccgaggacacattcttcccaagccccgagagcagctgcgacgtgaagctggtggaaaagagcttcgagacagacggtaccatcactcaaggtttggcagtgtcaaccatctcatcattctttccacctggctaccaagtgtccttctgcctggtcatggtgctgctgttcgccgtggataccggcctgtacttcagcgtcaggagcaagcggtcacggctgctccacagcgattacatgaatatgacaccacgaagaccgggtcctactcgcaaacactaccaaccctacgcacctccccgcgactttgcagcgtaccgatctcgcgccaagagaagcggatctggcgtgaagcagaccctgaatttcgacctgctgaagctggctggcgacgtggaatccaacccaggcccttctagaggctccggtgcccgtcagtgggcagagcgcacatcgcccacagtccccgagaagttggggggaggggtcggcaattga

SEQ ID NO: 4882 - DNA, 2196 bp, synthetic construct
  source 1..2196: mol_type = other DNA
atggccttaccagtgaccgccttgctcctgccgctggccttgctgctccacgccgccaggccggacatccagatgacacagagccctagcagcctgtctgccagcgtgggagacagagtgaccatcacatgcaaggccagcgaccacatcaacaactggctggcctggtatcagcagaagcctggacaggcccctaagctgctgatctacggcgctaccacactggaaacaggcgtgcccagcagattttctggcagcggctctggcaccgactacaccctgacaatatccagcctccagcctgaggacttcgccacctactactgtcagcagagctggaacaccccttggacattcggccagggcaccaagctggaaatcaagagactcgagggacagcctaaggccaatcctaccgtgacactgttccctccaagcagcgaagaactccaggccaacaaggccacacttgtgtgcctgatctccgacttctaccctggggctgtgacagtggcttggaaggccgatggatctcctgtgaaagccggcgtggaaaccaccaagccatccaagcagagcaacaacaaatacgccgccagctcctacctgagcctgacacctgagcagtggaagtcccacagatcctacagctgccaagtgacccacgaaggcagcaccgtggaaaagacagtggcccctacagagtgcagcggatcccagagcttcggcctgctggaccccaagctgtgctacctgctggatggcatcctgttcatctacggcgtgatcctgaccgccctgttcctgagagtgaagttcagcagaagcgccgacgcccctgcctaccagcagggacagaaccaactgtacaacgagctgaacctgggcagacgggaagagtacgacgtgctggacaagcggagaggcagggaccctgagatgggcggaaagccccggagaaagaacccccaggaaggactgtataacgaactccagaaagacaagatggccgaagcctacagcgagatcggcatgaagggcgagcggagaagaggcaagggccacgatggcctgtaccagggcctgagcaccgccaccaaggacacctatgacgccctgcacatgcaggccctgcctccaagaagggccaagcgatctggatctggagcaacaaacttctcactactcaaacaagcaggtgacgtggaggagaatcccgggcctactagtatggactggatttggcgcatccttttccttgtcggcgctgctaccggcgcgcattccttcgaacaagttcagcttcaacagcctggcgctgagctggtcaaacctggcgcttctgtgaagatgagctgcaaagccagcggctacgccttcagcagctactggatcaactggatgaagcagaaacccggccagggactcgaatggatcggccaaatctatcccggcgacggcgacaccaactacaacggcaagttcaagggcagagccacactgaccgccgatacctctagcagcacagcctacatgcagctgagcagcctgaccagcgaagatagcgccgtgtacttctgtgcccggtccatcacaacagtcgtgggctgcgctatggactattggggccagggaacaagcgtgaccgtgtctagtacgcgtgcctctacaaagggaccctccgtgtttcctctggctcccagcagcaagtctacaagcggaggaacagccgctctgggctgcctggtcaaggattactttcccgagcctgtgaccgtgtcctggaatagcggagcactgacaagcggcgtgcacacctttccagccgtgctgcaaagcagcggcctgtactctctgagcagcgtggtcacagtgcctagctctagcctgggcacccagacctacatctgcaatgtgaaccacaagcctagcaacaccaaggtggacaagagagtggaacccaagagctgtggtacccagagttttgggttgttggaccctaaattgtgctatctgttggacggaatcctgttcatttacggagtgatcctgaccgcattgttcctgaagagaggccggaagaagctgctgtacatcttcaagcagcctttcatgcggcccgtgcagaccacccaggaagaggacggctgctcctgccggttccccgaggaagaagaaggcggctgcgagctgtaa

SEQ ID NO: 4883 - DNA, 2241 bp, synthetic construct
  source 1..2241: mol_type = other DNA
atggccttaccagtgaccgccttgctcctgccgctggccttgctgctccacgccgccaggccggacatccagatgacacagagccctagcagcctgtctgccagcgtgggagacagagtgaccatcacatgcaaggccagcgaccacatcaacaactggctggcctggtatcagcagaagcctggacaggcccctaagctgctgatctacggcgctaccacactggaaacaggcgtgcccagcagattttctggcagcggctctggcaccgactacaccctgacaatatccagcctccagcctgaggacttcgccacctactactgtcagcagagctggaacaccccttggacattcggccagggcaccaagctggaaatcaagagactcgaggacctgaagaacgtgttcccacctgaggtggccgtgttcgagcctagcgaggccgagatcagccacacccagaaagccaccctcgtgtgcctggctaccggcttctaccccgaccatgtggaactgtcttggtgggtcaacggcaaagaggtgcacagcggcgtgtctaccgacccccagccactgaaagaacagcccgccctgaacgacagccggtactgcctgagcagcagactgagagtgtccgccaccttctggcagaacccccggaaccacttcagatgccaggtgcagttctacggcctgagcgagaacgacgagtggacccaggacagagccaagcccgtgacccagatcgtgtctgccgaagcctggggcagagccgattgcggatcccagagcttcggcctgctggaccccaagctgtgctacctgctggatggcatcctgttcatctacggcgtgatcctgaccgccctgttcctgagagtgaagttcagcagaagcgccgacgcccctgcctaccagcagggacagaaccaactgtacaacgagctgaacctgggcagacgggaagagtacgacgtgctggacaagcggagaggcagggaccctgagatgggcggaaagccccggagaaagaacccccaggaaggactgtataacgaactccagaaagacaagatggccgaagcctacagcgagatcggcatgaagggcgagcggagaagaggcaagggccacgatggcctgtaccagggcctgagcaccgccaccaaggacacctatgacgccctgcacatgcaggccctgcctccaagaagggccaagcgatctggatctggagcaacaaacttctcactactcaaacaagcaggtgacgtggaggagaatcccgggcctactagtatggactggatttggcgcatccttttccttgtcggcgctgctaccggcgcgcattccttcgaacaagttcagcttcaacagcctggcgctgagctggtcaaacctggcgcttctgtgaagatgagctgcaaagccagcggctacgccttcagcagctactggatcaactggatgaagcagaaacccggccagggactcgaatggatcggccaaatctatcccggcgacggcgacaccaactacaacggcaagttcaagggcagagccacactgaccgccgatacctctagcagcacagcctacatgcagctgagcagcctgaccagcgaagatagcgccgtgtacttctgtgcccggtccatcacaacagtcgtgggctgcgctatggactattggggccagggaacaagcgtgaccgtgtctagtacgcgtatccagaaccctgatcctgccgtgtaccagctgcgggatagcaagagcagcgacaagagcgtgtgtctgttcaccgacttcgacagccagaccaacgtgtcccagagcaaggactccgacgtgtacatcaccgataagaccgtgctggacatgcggagcatggacttcaagagcaactccgccgtggcctggtccaacaagtccgatttcgcctgcgccaacgccttcaacaacagcattatccccgaggacacattcttcccaagccccgagagcagctgcggtacccagagttttgggttgttggaccctaaattgtgctatctgttggacggaatcctgttcatttacggagtgatcctgaccgcattgttcctgaagagaggccggaagaagctgctgtacatcttcaagcagcctttcatgcggcccgtgcagaccacccaggaagaggacggctgctcctgccggttccccgaggaagaagaaggcggctgcgagctgtaa

SEQ ID NO: 4884 - DNA, 2352 bp, synthetic construct
  source 1..2352: mol_type = other DNA
atggccttaccagtgaccgccttgctcctgccgctggccttgctgctccacgccgccaggccggacatccagatgacacagagccctagcagcctgtctgccagcgtgggagacagagtgaccatcacatgcaaggccagcgaccacatcaacaactggctggcctggtatcagcagaagcctggacaggcccctaagctgctgatctacggcgctaccacactggaaacaggcgtgcccagcagattttctggcagcggctctggcaccgactacaccctgacaatatccagcctccagcctgaggacttcgccacctactactgtcagcagagctggaacaccccttggacattcggccagggcaccaagctggaaatcaagagactcgaggacctgaagaacgtgttcccacctgaggtggccgtgttcgagcctagcgaggccgagatcagccacacccagaaagccaccctcgtgtgcctggctaccggcttctaccccgaccatgtggaactgtcttggtgggtcaacggcaaagaggtgcacagcggcgtgtctaccgacccccagccactgaaagaacagcccgccctgaacgacagccggtactgcctgagcagcagactgagagtgtccgccaccttctggcagaacccccggaaccacttcagatgccaggtgcagttctacggcctgagcgagaacgacgagtggacccaggacagagccaagcccgtgacccagatcgtgtctgccgaagcctggggcagagccgattgcggatcccagagcttcggcctgctggaccccaagctgtgctacctgctggatggcatcctgttcatctacggcgtgatcctgaccgccctgttcctgagagtgaagttcagcagaagcgccgacgcccctgcctaccagcagggacagaaccaactgtacaacgagctgaacctgggcagacgggaagagtacgacgtgctggacaagcggagaggcagggaccctgagatgggcggaaagccccggagaaagaacccccaggaaggactgtataacgaactccagaaagacaagatggccgaagcctacagcgagatcggcatgaagggcgagcggagaagaggcaagggccacgatggcctgtaccagggcctgagcaccgccaccaaggacacctatgacgccctgcacatgcaggccctgcctccaagaagggccaagcgatctggatctggagcaacaaacttctcactactcaaacaagcaggtgacgtggaggagaatcccgggcctactagtatggactggatttggcgcatccttttccttgtcggcgctgctaccggcgcgcattccttcgaacaagttcagcttcaacagcctggcgctgagctggtcaaacctggcgcttctgtgaagatgagctgcaaagccagcggctacgccttcagcagctactggatcaactggatgaagcagaaacccggccagggactcgaatggatcggccaaatctatcccggcgacggcgacaccaactacaacggcaagttcaagggcagagccacactgaccgccgatacctctagcagcacagcctacatgcagctgagcagcctgaccagcgaagatagcgccgtgtacttctgtgcccggtccatcacaacagtcgtgggctgcgctatggactattggggccagggaacaagcgtgaccgtgtctagtacgcgtatccagaaccctgatcctgccgtgtaccagctgcgggatagcaagagcagcgacaagagcgtgtgtctgttcaccgacttcgacagccagaccaacgtgtcccagagcaaggactccgacgtgtacatcaccgataagaccgtgctggacatgcggagcatggacttcaagagcaactccgccgtggcctggtccaacaagtccgatttcgcctgcgccaacgccttcaacaacagcattatccccgaggacacattcttcccaagccccgagagcagctgcggtacccagagttttgggttgttggaccctaaattgtgctatctgttggacggaatcctgttcatttacggagtgatcctgaccgcattgttcctgaggagcaagcggtcacggctgctccacagcgattacatgaatatgacaccacgaagaccgggtcctactcgcaaacactaccaaccctacgcacctccccgcgactttgcagcgtaccgatctaatctagaggctccggtgcccgtcagtgggcagagcgcacatcgcccacagtccccgagaagttggggggaggggtcggcaattgaaccggtgcctagagaaggtggcgcggggtaa

SEQ ID NO: 4885 - DNA, 2310 bp, synthetic construct
  source 1..2310: mol_type = other DNA
atggccttaccagtgaccgccttgctcctgccgctggccttgctgctccacgccgccaggccggacatccagatgacacagagccctagcagcctgtctgccagcgtgggagacagagtgaccatcacatgcaaggccagcgaccacatcaacaactggctggcctggtatcagcagaagcctggacaggcccctaagctgctgatctacggcgctaccacactggaaacaggcgtgcccagcagattttctggcagcggctctggcaccgactacaccctgacaatatccagcctccagcctgaggacttcgccacctactactgtcagcagagctggaacaccccttggacattcggccagggcaccaagctggaaatcaagagactcgagggacagcctaaggccaatcctaccgtgacactgttccctccaagcagcgaagaactccaggccaacaaggccacacttgtgtgcctgatctccgacttctaccctggggctgtgacagtggcttggaaggccgatggatctcctgtgaaagccggcgtggaaaccaccaagccatccaagcagagcaacaacaaatacgccgccagctcctacctgagcctgacacctgagcagtggaagtcccacagatcctacagctgccaagtgacccacgaaggcagcaccgtggaaaagacagtggcccctacagagtgcagcggatcccagagcttcggcctgctggaccccaagctgtgctacctgctggatggcatcctgttcatctacggcgtgatcctgaccgccctgttcctgagagtgaagttcagcagaagcgccgacgcccctgcctaccagcagggacagaaccaactgtacaacgagctgaacctgggcagacgggaagagtacgacgtgctggacaagcggagaggcagggaccctgagatgggcggaaagccccagcggagaaagaacccccaggaaggactgtataacgaactccagaaagacaagatggccgaagcctacagcgagatcggcatgaagggcgagcggagaagaggcaagggccacgatggcctgtaccagggcctgagcaccgccaccaaggacacctatgacgccctgcacatgcaggccctgcctccaagaagggccaagcgatctggatctggagcaacaaacttctcactactcaaacaagcaggtgacgtggaggagaatcccgggcctactagtatggactggatttggcgcatccttttccttgtcggcgctgctaccggcgcgcattccttcgaacaagttcagcttcaacagcctggcgctgagctggtcaaacctggcgcttctgtgaagatgagctgcaaagccagcggctacgccttcagcagctactggatcaactggatgaagcagaaacccggccagggactcgaatggatcggccaaatctatcccggcgacggcgacaccaactacaacggcaagttcaagggcagagccacactgaccgccgatacctctagcagcacagcctacatgcagctgagcagcctgaccagcgaagatagcgccgtgtacttctgtgcccggtccatcacaacagtcgtgggctgcgctatggactattggggccagggaacaagcgtgaccgtgtctagtacgcgtgcctctacaaagggaccctccgtgtttcctctggctcccagcagcaagtctacaagcggaggaacagccgctctgggctgcctggtcaaggattactttcccgagcctgtgaccgtgtcctggaatagcggagcactgacaagcggcgtgcacacctttccagccgtgctgcaaagcagcggcctgtactctctgagcagcgtggtcacagtgcctagctctagcctgggcacccagacctacatctgcaatgtgaaccacaagcctagcaacaccaaggtggacaagagagtggaacccaagagctgtggtacccagagttttgggttgttggaccctaaattgtgctatctgttggacggaatcctgttcatttacggagtgatcctgaccgcattgttcctgaggagcaagcggtcacggctgctccacagcgattacatgaatatgacaccacgaagaccgggtcctactcgcaaacactaccaaccctacgcacctccccgcgactttgcagcgtaccgatctaatctagaggctccggtgcccgtcagtgggcagagcgcacatcgcccacagtccccgagaagttggggggaggggtcggcaattgaaccggtgcctagagaaggtggcgcggggtaa

SEQ ID NO: 4886 - DNA, 2310 bp, synthetic construct
  source 1..2310: mol_type = other DNA
atggccttaccagtgaccgccttgctcctgccgctggccttgctgctccacgccgccaggccggacatccagatgacacagagccctagcagcctgtctgccagcgtgggagacagagtgaccatcacatgcaaggccagcgaccacatcaacaactggctggcctggtatcagcagaagcctggacaggcccctaagctgctgatctacggcgctaccacactggaaacaggcgtgcccagcagattttctggcagcggctctggcaccgactacaccctgacaatatccagcctccagcctgaggacttcgccacctactactgtcagcagagctggaacaccccttggacattcggccagggcaccaagctggaaatcaagagactcgagggacagcctaaggccaatcctaccgtgacactgttccctccaagcagcgaagaactccaggccaacaaggccacacttgtgtgcctgatctccgacttctaccctggggctgtgacagtggcttggaaggccgatggatctcctgtgaaagccggcgtggaaaccaccaagccatccaagcagagcaacaacaaatacgccgccagctcctacctgagcctgacacctgagcagtggaagtcccacagatcctacagctgccaagtgacccacgaaggcagcaccgtggaaaagacagtggcccctacagagtgcagcggatcccagagcttcggcctgctggaccccaagctgtgctacctgctggatggcatcctgttcatctacggcgtgatcctgaccgccctgttcctgagagtgaagttcagcagaagcgccgacgcccctgcctaccagcagggacagaaccaactgtacaacgagctgaacctgggcagacgggaagagtacgacgtgctggacaagcggagaggcagggaccctgagatgggcggaaagccccagcggagaaagaacccccaggaaggactgtataacgaactccagaaagacaagatggccgaagcctacagcgagatcggcatgaagggcgagcggagaagaggcaagggccacgatggcctgtaccagggcctgagcaccgccaccaaggacacctatgacgccctgcacatgcaggccctgcctccaagaagggccaagcgatctggatctggagcaacaaacttctcactactcaaacaagcaggtgacgtggaggagaatcccgggcctactagtatggactggatttggcgcatccttttccttgtcggcgctgctaccggcgcgcattccttcgaacaagttcagcttcaacagcctggcgctgagctggtcaaacctggcgcttctgtgaagatgagctgcaaagccagcggctacgccttcagcagctactggatcaactggatgaagcagaaacccggccagggactcgaatggatcggccaaatctatcccggcgacggcgacaccaactacaacggcaagttcaagggcagagccacactgaccgccgatacctctagcagcacagcctacatgcagctgagcagcctgaccagcgaagatagcgccgtgtacttctgtgcccggtccatcacaacagtcgtgggctgcgctatggactattggggccagggaacaagcgtgaccgtgtctagtacgcgtgcgtccactaagggtccgtcagtcttcccgctggcgccctgttcccgcagcacgagtgaatctaccgccgcccttgggtgcttggtaaaagactattttcctgagcccgttacagtatcatggaacagcggggctctgactagcggggtgcatacgttccctgcggttctgcaatctagcggactgtattctctctccagtgttgtgaccgtgccaagctccagcctcggtactaaaacttatacatgtaatgtggatcataaaccttcaaataccaaggttgacaaaagggtagagagtaagtacggtggtacccagagttttgggttgttggaccctaaattgtgctatctgttggacggaatcctgttcatttacggagtgatcctgaccgcattgttcctgaggagcaagcggtcacggctgctccacagcgattacatgaatatgacaccacgaagaccgggtcctactcgcaaacactaccaaccctacgcacctccccgcgactttgcagcgtaccgatctaatctagaggctccggtgcccgtcagtgggcagagcgcacatcgcccacagtccccgagaagttggggggaggggtcggcaattgaaccggtgcctagagaaggtggcgcggggtaa

SEQ ID NO: 4887 - DNA, 2859 bp, synthetic construct
  source 1..2859: mol_type = other DNA
atggccttaccagtgaccgccttgctcctgccgctggccttgctgctccacgccgccaggccggacatccagatgacacagagccctagcagcctgtctgccagcgtgggagacagagtgaccatcacatgcaaggccagcgaccacatcaacaactggctggcctggtatcagcagaagcctggacaggcccctaagctgctgatctacggcgctaccacactggaaacaggcgtgcccagcagattttctggcagcggctctggcaccgactacaccctgacaatatccagcctccagcctgaggacttcgccacctactactgtcagcagagctggaacaccccttggacattcggccagggcaccaagctggaaatcaagagactcgaggacctgaagaacgtgttcccacctgaggtggccgtgttcgagcctagcgaggccgagatcagccacacccagaaagccaccctcgtgtgcctggctaccggcttctaccccgaccatgtggaactgtcttggtgggtcaacggcaaagaggtgcacagcggcgtgtctaccgacccccagccactgaaagaacagcccgccctgaacgacagccggtactgcctgagcagcagactgagagtgtccgccaccttctggcagaacccccggaaccacttcagatgccaggtgcagttctacggcctgagcgagaacgacgagtggacccaggacagagccaagcccgtgacccagatcgtgtctgccgaagcctggggcagagccgattgcggatcccagagcttcggcctgctggaccccaagctgtgctacctgctggatggcatcctgttcatctacggcgtgatcctgaccgccctgttcctgagagtgaagttcagcagaagcgccgacgcccctgcctaccagcagggacagaaccaactgtacaacgagctgaacctgggcagacgggaagagtacgacgtgctggacaagcggagaggcagggaccctgagatgggcggaaagccccggagaaagaacccccaggaaggactgtataacgaactccagaaagacaagatggccgaagcctacagcgagatcggcatgaagggcgagcggagaagaggcaagggccacgatggcctgtaccagggcctgagcaccgccaccaaggacacctatgacgccctgcacatgcaggccctgcctccaagaagggccaagcgatctggatctggagcaacaaacttctcactactcaaacaagcaggtgacgtggaggagaatcccgggcctactagtgccaccatggactggatttggcgcatccttttccttgtcggcgctgctaccggcgcccattccgggcccgaagtgcagctggttgaatctggcggaggactggttcaggctggcggatctctgagactgtcttgtgccgccagcggcagaacctttagcatgggctggtttagacaggcccctggcaaagagagagagttcgtcgccgccatcacatactctggcggcagcccttactacgccgactctgtgaagggcagattcaccatcagccgggacaacgccaagaacaccgtgtacctccagatgaacagcctgaagcctgaggacaccgccgtgtactactgcgccgccaatccaacatacggcagcgactggaacgccgagaattggggccagggaacccaagtgacagtgtctagcggatccggcggcggaggatctggcggaggcggatctgggggcggaggctctttcgaacaagttcagcttcaacagcctggcgctgagctggtcaaacctggcgcttctgtgaagatgagctgcaaagccagcggctacgccttcagcagctactggatcaactggatgaagcagaaacccggccagggactcgaatggatcggccaaatctatcccggcgacggcgacaccaactacaacggcaagttcaagggcagagccacactgaccgccgatacctctagcagcacagcctacatgcagctgagcagcctgaccagcgaagatagcgccgtgtacttctgtgcccggtccatcacaacagtcgtgggctgcgctatggactattggggccagggaacaagcgtgaccgtgtctagtacgcgtatccagaaccctgatcctgccgtgtaccagctgcgggatagcaagagcagcgacaagagcgtgtgtctgttcaccgacttcgacagccagaccaacgtgtcccagagcaaggactccgacgtgtacatcaccgataagaccgtgctggacatgcggagcatggacttcaagagcaactccgccgtggcctggtccaacaagtccgatttcgcctgcgccaacgccttcaacaacagcattatccccgaggacacattcttcccaagccccgagagcagctgcggtaccatcactcaaggtttggcagtgtcaaccatctcatcattctttccacctggctaccaagtgtccttctgcctggtcatggtgctgctgttcgccgtggataccggcctgtacttcagcgtcaagagaggccggaagaagctgctgtacatcttcaagcagcctttcatgcggcccgtgcagaccacccaggaagaggacggctgctcctgccggttccccgaggaagaagaaggcggctgcgagctgcgcgccaagagaagcggatctggcgtgaagcagaccctgaatttcgacctgctgaagctggctggcgacgtggaatccaacccaggcccttctagaggctccggtgcccgtcagtgggcagagcgcacatcgcccacagtccccgagaagttggggggaggggtcggcaattga

SEQ ID NO: 4888 - DNA, 2232 bp, synthetic construct
  source 1..2232: mol_type = other DNA
atggccttaccagtgaccgccttgctcctgccgctggccttgctgctccacgccgccaggccggacatccagatgacacagagccctagcagcctgtctgccagcgtgggagacagagtgaccatcacatgcaaggccagcgaccacatcaacaactggctggcctggtatcagcagaagcctggacaggcccctaagctgctgatctacggcgctaccacactggaaacaggcgtgcccagcagattttctggcagcggctctggcaccgactacaccctgacaatatccagcctccagcctgaggacttcgccacctactactgtcagcagagctggaacaccccttggacattcggccagggcaccaagctggaaatcaagagactcgagggacagcctaaggccaatcctaccgtgacactgttccctccaagcagcgaagaactccaggccaacaaggccacacttgtgtgcctgatctccgacttctaccctggggctgtgacagtggcttggaaggccgatggatctcctgtgaaagccggcgtggaaaccaccaagccatccaagcagagcaacaacaaatacgccgccagctcctacctgagcctgacacctgagcagtggaagtcccacagatcctacagctgccaagtgacccacgaaggcagcaccgtggaaaagacagtggcccctacagagtgcagcggatcccagagcttcggcctgctggaccccaagctgtgctacctgctggatggcatcctgttcatctacggcgtgatcctgaccgccctgttcctgagagtgaagttcagcagaagcgccgacgcccctgcctaccagcagggacagaaccaactgtacaacgagctgaacctgggcagacgggaagagtacgacgtgctggacaagcggagaggcagggaccctgagatgggcggaaagccccggagaaagaacccccaggaaggactgtataacgaactccagaaagacaagatggccgaagcctacagcgagatcggcatgaagggcgagcggagaagaggcaagggccacgatggcctgtaccagggcctgagcaccgccaccaaggacacctatgacgccctgcacatgcaggccctgcctccaagaagggccaagcgatctggatctggagcaacaaacttctcactactcaaacaagcaggtgacgtggaggagaatcccgggcctactagtgccaccatggactggatttggcgcatccttttccttgtcggcgctgctaccggcgcccattccgccagaagcgaggacagatacagaaaccccaaattcgaagttcagctggttgaatctggcggcggactggttcaacctggcggatctctgagactgagctgtgccgcctctggctacgcctttagcaactactgggtcaactgggttcgacaggcccctggcaaaggactggaatgggtcgcccaaatctatcccggcgacggcgacaccaactacaacggcaagttcaagggcagattcaccatcagccgggacaacagcaagaacaccctgtacctccagatgaactccctgagagccgaggacaccgccgtgtactattgtgccagatccatcaccaccgtcgtgggctgcgctatggattattggggccagggaaccctggtcaccgtgtcctctacgcgtgcctctacaaagggaccctccgtgtttcctctggctcccagcagcaagtctacaagcggaggaacagccgctctgggctgcctggtcaaggattactttcccgagcctgtgaccgtgtcctggaatagcggagcactgacaagcggcgtgcacacctttccagccgtgctgcaaagcagcggcctgtactctctgagcagcgtggtcacagtgcctagctctagcctgggcacccagacctacatctgcaatgtgaaccacaagcctagcaacaccaaggtggacaagagagtggaacccaagagctgtggtacccagagttttgggttgttggaccctaaattgtgctatctgttggacggaatcctgttcatttacggagtgatcctgaccgcattgttcctgaagagaggccggaagaagctgctgtacatcttcaagcagcctttcatgcggcccgtgcagaccacccaggaagaggacggctgctcctgccggttccccgaggaagaagaaggcggctgcgagctgtaa

SEQ ID NO: 4889 - DNA, 2205 bp, synthetic construct
  source 1..2205: mol_type = other DNA
atggccttaccagtgaccgccttgctcctgccgctggccttgctgctccacgccgccaggccggacatccagatgacacagagccctagcagcctgtctgccagcgtgggagacagagtgaccatcacatgcaaggccagcgaccacatcaacaactggctggcctggtatcagcagaagcctggacaggcccctaagctgctgatctacggcgctaccacactggaaacaggcgtgcccagcagattttctggcagcggctctggcaccgactacaccctgacaatatccagcctccagcctgaggacttcgccacctactactgtcagcagagctggaacaccccttggacattcggccagggcaccaagctggaaatcaagagactcgagggacagcctaaggccaatcctaccgtgacactgttccctccaagcagcgaagaactccaggccaacaaggccacacttgtgtgcctgatctccgacttctaccctggggctgtgacagtggcttggaaggccgatggatctcctgtgaaagccggcgtggaaaccaccaagccatccaagcagagcaacaacaaatacgccgccagctcctacctgagcctgacacctgagcagtggaagtcccacagatcctacagctgccaagtgacccacgaaggcagcaccgtggaaaagacagtggcccctacagagtgcagcggatcccagagcttcggcctgctggaccccaagctgtgctacctgctggatggcatcctgttcatctacggcgtgatcctgaccgccctgttcctgagagtgaagttcagcagaagcgccgacgcccctgcctaccagcagggacagaaccaactgtacaacgagctgaacctgggcagacgggaagagtacgacgtgctggacaagcggagaggcagggaccctgagatgggcggaaagccccggagaaagaacccccaggaaggactgtataacgaactccagaaagacaagatggccgaagcctacagcgagatcggcatgaagggcgagcggagaagaggcaagggccacgatggcctgtaccagggcctgagcaccgccaccaaggacacctatgacgccctgcacatgcaggccctgcctccaagaagggccaagcgatctggatctggagcaacaaacttctcactactcaaacaagcaggtgacgtggaggagaatcccgggcctactagtgccaccatggactggatttggcgcatccttttccttgtcggcgctgctaccggcgcccattccgccagaagcgaggacagatacagaaaccccaaattcgaagttcagctggttgaatctggcggcggactggttcaacctggcggatctctgagactgagctgtgccgcctctggctacgcctttagcaactactgggtcaactgggttcgacaggcccctggcaaaggactggaatgggtcgcccaaatctatcccggcgacggcgacaccaactacaacggcaagttcaagggcagattcaccatcagccgggacaacagcaagaacaccctgtacctccagatgaactccctgagagccgaggacaccgccgtgtactattgtgccagatccatcaccaccgtcgtgggctgcgctatggattattggggccagggaaccctggtcaccgtgtcctctacgcgtatccagaaccctgatcctgccgtgtaccagctgcgggatagcaagagcagcgacaagagcgtgtgtctgttcaccgacttcgacagccagaccaacgtgtcccagagcaaggactccgacgtgtacatcaccgataagaccgtgctggacatgcggagcatggacttcaagagcaactccgccgtggcctggtccaacaagtccgatttcgcctgcgccaacgccttcaacaacagcattatccccgaggacacattcttcccaagccccgagagcagctgcggtacccagagttttgggttgttggaccctaaattgtgctatctgttggacggaatcctgttcatttacggagtgatcctgaccgcattgttcctgaagagaggccggaagaagctgctgtacatcttcaagcagcctttcatgcggcccgtgcagaccacccaggaagaggacggctgctcctgccggttccccgaggaagaagaaggcggctgcgagctgtaa

SEQ ID NO: 4890 - DNA, 2220 bp, synthetic construct
  source 1..2220: mol_type = other DNA
atggccttaccagtgaccgccttgctcctgccgctggccttgctgctccacgccgccaggccggacatccagatgacacagagccctagcagcctgtctgccagcgtgggagacagagtgaccatcacatgcaaggccagcgaccacatcaacaactggctggcctggtatcagcagaagcctggacaggcccctaagctgctgatctacggcgctaccacactggaaacaggcgtgcccagcagattttctggcagcggctctggcaccgactacaccctgacaatatccagcctccagcctgaggacttcgccacctactactgtcagcagagctggaacaccccttggacattcggccagggcaccaagctggaaatcaagagactcgagggacagcctaaggccaatcctaccgtgacactgttccctccaagcagcgaagaactccaggccaacaaggccacacttgtgtgcctgatctccgacttctaccctggggctgtgacagtggcttggaaggccgatggatctcctgtgaaagccggcgtggaaaccaccaagccatccaagcagagcaacaacaaatacgccgccagctcctacctgagcctgacacctgagcagtggaagtcccacagatcctacagctgccaagtgacccacgaaggcagcaccgtggaaaagacagtggcccctacagagtgcagcggatcccagagcttcggcctgctggaccccaagctgtgctacctgctggatggcatcctgttcatctacggcgtgatcctgaccgccctgttcctgagagtgaagttcagcagaagcgccgacgcccctgcctaccagcagggacagaaccaactgtacaacgagctgaacctgggcagacgggaagagtacgacgtgctggacaagcggagaggcagggaccctgagatgggcggaaagccccggagaaagaacccccaggaaggactgtataacgaactccagaaagacaagatggccgaagcctacagcgagatcggcatgaagggcgagcggagaagaggcaagggccacgatggcctgtaccagggcctgagcaccgccaccaaggacacctatgacgccctgcacatgcaggccctgcctccaagaagggccaagcgatctggatctggagcaacaaacttctcactactcaaacaagcaggtgacgtggaggagaatcccgggcctactagtgccaccatggactggatttggcgcatccttttccttgtcggcgctgctaccggcgcccattccgccagaagcgaggacagatacagaaaccccaaattcgaagttcagctggttgaatctggcggcggactggttcaacctggcggatctctgagactgagctgtgccgcctctggctacgcctttagcaactactgggtcaactgggttcgacaggcccctggcaaaggactggaatgggtcgcccaaatctatcccggcgacggcgacaccaactacaacggcaagttcaagggcagattcaccatcagccgggacaacagcaagaacaccctgtacctccagatgaactccctgagagccgaggacaccgccgtgtactattgtgccagatccatcaccaccgtcgtgggctgcgctatggattattggggccagggaaccctggtcaccgtgtcctctacgcgtatccagaaccctgatcctgccgtgtaccagctgcgggatagcaagagcagcgacaagagcgtgtgtctgttcaccgacttcgacagccagaccaacgtgtcccagagcaaggactccgacgtgtacatcaccgataagaccgtgctggacatgcggagcatggacttcaagagcaactccgccgtggcctggtccaacaagtccgatttcgcctgcgccaacgccttcaacaacagcattatccccgaggacacattcttcccaagccccgagagcagctgcggtacccagagttttgggttgttggaccctaaattgtgctatctgttggacggaatcctgttcatttacggagtgatcctgaccgcattgttcctgaggagcaagcggtcacggctgctccacagcgattacatgaatatgacaccacgaagaccgggtcctactcgcaaacactaccaaccctacgcacctccccgcgactttgcagcgtaccgatctaatctagaaggagtcgactga

SEQ ID NO: 4891 - DNA, 2247 bp, synthetic construct
  source 1..2247: mol_type = other DNA
atggccttaccagtgaccgccttgctcctgccgctggccttgctgctccacgccgccaggccggacatccagatgacacagagccctagcagcctgtctgccagcgtgggagacagagtgaccatcacatgcaaggccagcgaccacatcaacaactggctggcctggtatcagcagaagcctggacaggcccctaagctgctgatctacggcgctaccacactggaaacaggcgtgcccagcagattttctggcagcggctctggcaccgactacaccctgacaatatccagcctccagcctgaggacttcgccacctactactgtcagcagagctggaacaccccttggacattcggccagggcaccaagctggaaatcaagagactcgagggacagcctaaggccaatcctaccgtgacactgttccctccaagcagcgaagaactccaggccaacaaggccacacttgtgtgcctgatctccgacttctaccctggggctgtgacagtggcttggaaggccgatggatctcctgtgaaagccggcgtggaaaccaccaagccatccaagcagagcaacaacaaatacgccgccagctcctacctgagcctgacacctgagcagtggaagtcccacagatcctacagctgccaagtgacccacgaaggcagcaccgtggaaaagacagtggcccctacagagtgcagcggatcccagagcttcggcctgctggaccccaagctgtgctacctgctggatggcatcctgttcatctacggcgtgatcctgaccgccctgttcctgagagtgaagttcagcagaagcgccgacgcccctgcctaccagcagggacagaaccaactgtacaacgagctgaacctgggcagacgggaagagtacgacgtgctggacaagcggagaggcagggaccctgagatgggcggaaagccccggagaaagaacccccaggaaggactgtataacgaactccagaaagacaagatggccgaagcctacagcgagatcggcatgaagggcgagcggagaagaggcaagggccacgatggcctgtaccagggcctgagcaccgccaccaaggacacctatgacgccctgcacatgcaggccctgcctccaagaagggccaagcgatctggatctggagcaacaaacttctcactactcaaacaagcaggtgacgtggaggagaatcccgggcctactagtgccaccatggactggatttggcgcatccttttccttgtcggcgctgctaccggcgcccattccgccagaagcgaggacagatacagaaaccccaaattcgaagttcagctggttgaatctggcggcggactggttcaacctggcggatctctgagactgagctgtgccgcctctggctacgcctttagcaactactgggtcaactgggttcgacaggcccctggcaaaggactggaatgggtcgcccaaatctatcccggcgacggcgacaccaactacaacggcaagttcaagggcagattcaccatcagccgggacaacagcaagaacaccctgtacctccagatgaactccctgagagccgaggacaccgccgtgtactattgtgccagatccatcaccaccgtcgtgggctgcgctatggattattggggccagggaaccctggtcaccgtgtcctctacgcgtgcctctacaaagggaccctccgtgtttcctctggctcccagcagcaagtctacaagcggaggaacagccgctctgggctgcctggtcaaggattactttcccgagcctgtgaccgtgtcctggaatagcggagcactgacaagcggcgtgcacacctttccagccgtgctgcaaagcagcggcctgtactctctgagcagcgtggtcacagtgcctagctctagcctgggcacccagacctacatctgcaatgtgaaccacaagcctagcaacaccaaggtggacaagagagtggaacccaagagctgtggtacccagagttttgggttgttggaccctaaattgtgctatctgttggacggaatcctgttcatttacggagtgatcctgaccgcattgttcctgaggagcaagcggtcacggctgctccacagcgattacatgaatatgacaccacgaagaccgggtcctactcgcaaacactaccaaccctacgcacctccccgcgactttgcagcgtaccgatctaatctagaaggagtcgactga

SEQ ID NO: 4892 - DNA, 1977 bp, synthetic construct; identical to SEQ ID NO: 4848
  source 1..1977: mol_type = other DNA

SEQ ID NO: 4893 - DNA, 1947 bp, synthetic construct
  source 1..1947: mol_type = other DNA
atggccttaccagtgaccgccttgctcctgccgctggccttgctgctccacgccgccaggccggctagaagcgaagatcggtatcggaaccccaaggaattcgacatcgtgatgacacagagccctgatagcctggccgtgtctctgggagagagagccaccatcaactgcaagagcagccagagcctgctgaacagcggcaaccagaagaactacctggcctggtatcagcagaagcccggccagcctcctaagctgctgatctactggggcagcaccagatccacaggcgtgcccgatagattttctggctctggcagcggcaccgacttcaccctgacaatttctagcctgcaagccgaggacgtggccgtgtactactgccagaacgactacacataccccttcaccttcggccagggcaccaagctggaaatcaaactcgaggacctgaagaacgtgttcccacctgaggtggccgtgttcgagcctagcgaggccgagatcagccacacccagaaagccaccctcgtgtgcctggctaccggcttctaccccgaccatgtggaactgtcttggtgggtcaacggcaaagaggtgcacagcggcgtgtgtaccgacccccagccactgaaagaacagcccgccctgaacgacagccggtactgcctgagcagcagactgagagtgtccgccaccttctggcagaacccccggaaccacttcagatgccaggtgcagttctacggcctgagcgagaacgacgagtggacccaggacagagccaagcccgtgacccagatcgtgtctgccgaagcctggggcagagccgattgcggctttaccagcgagagctaccagcagggcgtgctgagcgccaccatcctgtacgagatcctgctgggcaaggccaccctgtacgccgtgctggtgtctgccctggtgctgatggctatggtcaagcggaaggacagccggggaagggccaagcgatctggatctggagcaacaaacttctcactactcaaacaagcaggtgacgtggaggagaatcccgggcctactagtatggactggatttggcgcatccttttccttgtcggcgctgctaccggcgcgcattccttcgaacaagttcagctggttcagagcggagccgaagtgaagaaacctggggcctctgtgaaggtgtcctgcaaggcttccggctataccttcaccagcttttggctgaactgggtccgacaggcccctggacaaggactggaatggatgggcaacatctaccccagcgacagctacaccgtgtacaaccagaaattcaaggaccgcgtgaccatgaccagggacaccagcacaagcacagtgtacatggaactgagcagcctgcggagcgaggataccgccgtgtattattgcgccagaacctggcggggcaacagcttcgattattggggccagggaaccaccgtgaccgtgtcatctacgcgtgccagaagcgaggacagatacagaaaccccaaaatccagaaccctgatcctgccgtgtaccagctgcgggatagcaagagcagcgacaagagcgtgtgtctgttcaccgacttcgacagccagaccaacgtgtcccagagcaaggactccgacgtgtacatcaccgataagtgcgtgctggacatgcggagcatggacttcaagagcaactccgccgtggcctggtccaacaagtccgatttcgcctgcgccaacgccttcaacaacagcattatccccgaggacacattcttcccaagccccgagagcagctgcgacgtgaagctggtggaaaagagcttcgagacagacaccaacctgaacttccagaacctgagcgtgatcggcttcagaatcctgctgctgaaagtggccggctttaacctgctgatgaccctgcggctgtggtccagctaa

SEQ ID NO: 4894 - DNA, 1926 bp, synthetic construct; identical to SEQ ID NO: 4849
  source 1..1926: mol_type = other DNA

SEQ ID NO: 4895 - DNA, 1869 bp, synthetic construct; identical to SEQ ID NO: 4744
  source 1..1869: mol_type = other DNA

SEQ ID NO: 4896 - DNA, 2220 bp, synthetic construct
  source 1..2220: mol_type = other DNA
atggccttaccagtgaccgccttgctcctgccgctggccttgctgctccacgccgccaggccggacgacatcgtgatgacacagagccctgatagcctggccgtgtctctgggagagagagccaccattaactgcaaggccagccagagcgtggactacgacggcgacagcttcctgaactggtatcagcagaagcccggccagcctcctaagctgctgatctacgccgccagcaatctggaaagcggcgtgccaagcagattttccggctctggcagcggcaccgatttcaccctgacaatatccagcctccagcctgaggacgtggccgtgtactactgccagcagagcaacgacgaccctctgacctttggacagggcaccaaggtggaaatcaaactcgaggacctgaagaacgtgttcccacctgaggtggccgtgttcgagcctagcgaggccgagatcagccacacccagaaagccaccctcgtgtgcctggctaccggcttctaccccgaccatgtggaactgtcttggtgggtcaacggcaaagaggtgcacagcggcgtgtctaccgacccccagccactgaaagaacagcccgccctgaacgacagccggtactgcctgagcagcagactgagagtgtccgccaccttctggcagaacccccggaaccacttcagatgccaggtgcagttctacggcctgagcgagaacgacgagtggacccaggacagagccaagcccgtgacccagatcgtgtctgccgaagcctggggcagagccgattgcggatcccagagcttcggcctgctggaccccaagctgtgctacctgctggatggcatcctgttcatctacggcgtgatcctgaccgccctgttcctgagagtgaagttcagcagaagcgccgacgcccctgcctaccagcagggacagaaccaactgtacaacgagctgaacctgggcagacgggaagagtacgacgtgctggacaagcggagaggcagggaccctgagatgggcggaaagccccggagaaagaacccccaggaaggactgtataacgaactccagaaagacaagatggccgaagcctacagcgagatcggcatgaagggcgagcggagaagaggcaagggccacgatggcctgtaccagggcctgagcaccgccaccaaggacacctatgacgccctgcacatgcaggccctgcctccaagaagggccaagcgatctggatctggagcaacaaacttctcactactcaaacaagcaggtgacgtggaggagaatcccgggcctactagtatggactggatttggcgcatccttttccttgtcggcgctgctaccggcgcgcattccttcgaagaagtccaacttgtggagtctggagggggcctggtgcagcccggcggctctctcagactgtcttgtgcggcaagcggctacaccttcacctcttactggatagaatgggtgaggcaggcacctggaaagggactggagtggattggagagattctgccaggagggggagatacaaattacaatgaaatcttcaaggggcgggccaccttttcagcggataccagcaagaatacagcttacctgcagatgaatagcctccgggcagaagataccgctgtttattattgcacgagacgggtgccaataagactggactattgggggcaagggactcttgtcaccgtcagttcaacgcgtatccagaaccctgatcctgccgtgtaccagctgcgggatagcaagagcagcgacaagagcgtgtgtctgttcaccgacttcgacagccagaccaacgtgtcccagagcaaggactccgacgtgtacatcaccgataagaccgtgctggacatgcggagcatggacttcaagagcaactccgccgtggcctggtccaacaagtccgatttcgcctgcgccaacgccttcaacaacagcattatccccgaggacacattcttcccaagccccgagagcagctgcggtaccatcactcaaggtttggcagtgtcaaccatctcatcattctttccacctggctaccaagtgtccttctgcctggtcatggtgctgctgttcgccgtggataccggcctgtacttcagcgtcaagaccaacatccggtccagcaccagagactggaaggaccacaagttcaagtggcggaaggaccctcaggacaagtaa

SEQ ID NO: 4897 - DNA, 642 bp, synthetic construct
  source 1..642: mol_type = other DNA
atggccttaccagtgaccgccttgctcctgccgctggccttgctgctccacgccgccaggccggaggtgcagctggttgaatctggcggaggatctgttcaggctggcggctctctgagactgtcttgtgccgccagcggctacacctacagcatcaactgcatgggctggttcagacaggcccctggcaaagagagagaaggcgttgccgccatctctaccggcggaggcagaaccgattaccgggattctgtgaagggcagattcaccatcagccaggacaacgccaagaacaccgtgtacctccagatgaacagcctgaagcctgaggacaccgccatgtactactgtgccggcaagaccacctatcctggctacggatgtggcctgggcagaagcgcctacaattattggggccagggcacccaagtgaccgtgtcatctacgcgtgcaagaagtgaagatcgctacaggaaccctaagggcggcggaggaagcgaacttcctacacagggcaccttcagcaacgtgtccaccaatgtgtccccagccaagcctaccaccaccgcctgcgcacgcagcgaggacaggtataggaaccccaaagctcgagggaggcagctggagccaccctcagtttga

SEQ ID NO: 4898 - DNA, 1872 bp, synthetic construct
  source 1..1872: mol_type = other DNA
atggccttaccagtgaccgccttgctcctgccgctggccttgctgctccacgccgccaggccggacatccagttgacccagtcccccagctcactcagcgccagtgtgggggaccgggtgaccattacctgtaaagccagtcagagtgtggactatgagggggatagcttcctgaattggtatcagcagaagcctggcaaagccccaaagctgctgatctacgctgcatctaatctggagtcaggcgtgccttctaggttctccggtagtgggtctgggaccgatttcacattgaccatttcatccctccaacccgaggatttcgctacatattactgtcagcagtccaatgaggaccctctcacctttggccagggcaccaaagttgaaattaagagactcgaggacctgaagaacgtgttcccacctgaggtggccgtgttcgagcctagcgaggccgagatcagccacacccagaaagccaccctcgtgtgcctggctaccggcttctaccccgaccatgtggaactgtcttggtgggtcaacggcaaagaggtgcacagcggcgtgtgtaccgacccccagccactgaaagaacagcccgccctgaacgacagccggtactgcctgagcagcagactgagagtgtccgccaccttctggcagaacccccggaaccacttcagatgccaggtgcagttctacggcctgagcgagaacgacgagtggacccaggacagagccaagcccgtgacccagatcgtgtctgccgaagcctggggcagagccgattgcggctttaccagcgagagctaccagcagggcgtgctgagcgcctactacatgtacttgttgctgctgctgaagtccgtggtgtacttcgccatcatcacatgctgcctgctgcggagaaccgccttctgctgcaacggcgagaagtctagggccaagcgatctggatctggagcaacaaacttctcactactcaaacaagcaggtgacgtggaggagaatcccgggcctactagtatggactggatttggcgcatccttttccttgtcggcgctgctaccggcgcgcattccttcgaagaagtccaacttgtggagtctggagggggcctggtgcagcccggcggctctctcagactgtcttgtgcggcaagcggctacaccttcagctcttactggatagaatgggtgaggcaggcacctggaaagggactggagtggattggagagattctgccaggagggggagatacaaattacaatgaaatcttcaaggggcgggccaccttttcagcggataccagcaagaatacagcttacctgcagatgaatagcctccgggcagaagataccgctgtttattattgcacgagacgggtgccaataagactggactattgggggcaagggactcttgtcaccgtcagttcaacgcgtatccagaaccctgatcctgccgtgtaccagctgcgggatagcaagagcagcgacaagagcgtgtgtctgttcaccgacttcgacagccagaccaacgtgtcccagagcaaggactccgacgtgtacatcaccgataagtgcgtgctggacatgcggagcatggacttcaagagcaactccgccgtggcctggtccaacaagtccgatttcgcctgcgccaacgccttcaacaacagcattatccccgaggacacattcttcccaagccccgagagcagctgcgacgtgaagctggtggaaaagagcttcgagacagacaccaacctgaacttccagaacctgagcgtgatcggcttcagaatcctgctgctgaaagtggccggctttaacctgctgatgaccctgcggctgtggtccagctaa

SEQ ID NO: 4899 - DNA, 1473 bp, synthetic construct; identical to SEQ ID NO: 4751
  source 1..1473: mol_type = other DNA

SEQ ID NO: 4900 - DNA, 2289 bp, synthetic construct
  source 1..2289: mol_type = other DNA
atggccttaccagtgaccgccttgctcctgccgctggccttgctgctccacgccgccaggccggacatccagatgacacagagccctagcagcctgtctgccagcgtgggagacagagtgaccatcacatgcaaggccagcgaccacatcaacaactggctggcctggtatcagcagaagcctggcaaggcccctaagctgctgatctacggcgctaccacactggaaacaggcgtgcccagcagattttctggcagcggctctggcaccgacttcaccctgacaatatccagcctccagcctgaggacttcgccacctactactgtcagcagagctggaacaccccttggacattcggccagggcaccaaggtggaaatcaagagactcgaggacctgaagaacgtgttcccacctgaggtggccgtgttcgagcctagcgaggccgagatcagccacacccagaaagccaccctcgtgtgcctggctaccggcttctaccccgaccatgtggaactgtcttggtgggtcaacggcaaagaggtgcacagcggcgtgtgtaccgacccccagccactgaaagaacagcccgccctgaacgacagccggtactgcctgagcagcagactgagagtgtccgccaccttctggcagaacccccggaaccacttcagatgccaggtgcagttctacggcctgagcgagaacgacgagtggacccaggacagagccaagcccgtgacccagatcgtgtctgccgaagcctggggcagagccgattgcggctttaccagcgagagctaccagcagggcgtgctgagcgccaccatcctgtacgagatcctgctgggcaaggccaccctgtacgccgtgctggtgtctgccctggtgctgatggctatggtcaagcggaaggacagccggggaagggccaagcgatctggatctggagcaacaaacttctcactactcaaacaagcaggtgacgtggaggagaatcccgggcctactagtgccaccatggactggatttggcgcatccttttccttgtcggcgctgctaccggcgcccattccgggccccaggttcagctgcaagagtctggccctggcctggtcaagcctagccaaacactgagcctgacctgtaccgtgtctggcggctctatcaccaccggcgagttctactggaactggttcagacagcctcctggcaaaggactggaatggatgggagccattgccgccagcggcagcacaacatacagccctagcttcgagagccggaccagcatcagcagagacaccagcaagaatcagttcagcctgaagctgagcagcgtgacagccgccgatacagccgtgtattactgcggcagatcctttggagtggccgccgtgacaaccggccagaatagaggacagggcaccctggtcacagtgtctagcggatccgcacgcagcgaggacaggtataggaaccccaaaggaagtttcgaagttcagctggttgaatctggcggcggactggttcaacctggcggatctctgagactgagctgtgccgcctctggctacgcctttagcagctactgggtcaactgggttcgacaggcccctggcaaaggactggaatgggtcgcccaaatctatcccggcgacggcgacaccaactacaacggcaagttcaagggcagattcaccatcagccgggacaacagcaagaacaccctgtacctccagatgaactccctgagagccgaggacaccgccgtgtactattgtgccagatccatcaccaccgtcgtgggctgcgctatggattattggggccagggaaccctggtcaccgtgtcctctacgcgtatccagaaccctgatcctgccgtgtaccagctgcgggatagcaagagcagcgacaagagcgtgtgtctgttcaccgacttcgacagccagaccaacgtgtcccagagcaaggactccgacgtgtacatcaccgataagtgcgtgctggacatgcggagcatggacttcaagagcaactccgccgtggcctggtccaacaagtccgatttcgcctgcgccaacgccttcaacaacagcattatccccgaggacacattcttcccaagccccgagagcagctgcgacgtgaagctggtggaaaagagcttcgagacagacaccaacctgaacttccagaacctgagcgtgatcggcttcagaatcctgctgctgaaagtggccggctttaacctgctgatgaccctgcggctgtggtccagctaa

SEQ ID NO: 4901 - DNA, 3090 bp, synthetic construct
  source 1..3090: mol_type = other DNA
atggccttaccagtgaccgccttgctcctgccgctggccttgctgctccacgccgccaggccggacatccagatgacacagagccctagcagcctgtctgccagcgtgggagacagagtgaccatcacatgcaaggccagcgaccacatcaacaactggctggcctggtatcagcagaagcctggacaggcccctaagctgctgatctacggcgctaccacactggaaacaggcgtgcccagcagattttctggcagcggctctggcaccgactacaccctgacaatatccagcctccagcctgaggacttcgccacctactactgtcagcagagctggaacaccccttggacattcggccagggcaccaagctggaaatcaagagactcgaggacctgaagaacgtgttcccacctgaggtggccgtgttcgagcctagcgaggccgagatcagccacacccagaaagccaccctcgtgtgcctggctaccggcttctaccccgaccatgtggaactgtcttggtgggtcaacggcaaagaggtgcacagcggcgtgtgtaccgacccccagccactgaaagaacagcccgccctgaacgacagccggtactgcctgagcagcagactgagagtgtccgccaccttctggcagaacccccggaaccacttcagatgccaggtgcagttctacggcctgagcgagaacgacgagtggacccaggacagagccaagcccgtgacccagatcgtgtctgccgaagcctggggcagagccgattgcggctttaccagcgagagctaccagcagggcgtgctgagcgcctactacatgtacttgttgctgctgctgaagtccgtggtgtacttcgccatcatcacatgctgcctgctgcggagaaccgccttctgctgcaacggcgagaagtctagggccaagcgatctggatctggagcaacaaacttctcactactcaaacaagcaggtgacgtggaggagaatcccgggcctactagtgccaccatggactggatttggcgcatccttttccttgtcggcgctgctaccggcgcccattccgggccccaggttcagctgcaagagtctggccctggcctggtcaagcctagccaaacactgagcctgacctgtaccgtgtctggcggctctatcaccaccggcgagttctactggaactggttcagacagcctcctggcaaaggactggaatggatgggagccattgccgccagcggcagcacaacatacagccctagcttcgagagccggaccagcatcagcagagacaccagcaagaatcagttcagcctgaagctgagcagcgtgacagccgccgatacagccgtgtattactgcggcagatcctttggagtggccgccgtgacaaccggccagaatagaggacagggcaccctggtcacagtgtctagcggatccggcggcggaggatctggcggaggcggatctgggggcggaggctctttcgaacaagttcagcttcaacagcctggcgctgagctggtcaaacctggcgcttctgtgaagatgagctgcaaagccagcggctacgccttcagcagctactggatcaactggatgaagcagaaacccggccagggactcgaatggatcggccaaatctatcccggcgacggcgacaccaactacaacggcaagttcaagggcagagccacactgaccgccgatacctctagcagcacagcctacatgcagctgagcagcctgaccagcgaagatagcgccgtgtacttctgtgcccggtccatcacaacagtcgtgggctgcgctatggactattggggccagggaacaagcgtgaccgtgtctagtacgcgtatccagaaccctgatcctgccgtgtaccagctgcgggatagcaagagcagcgacaagagcgtgtgtctgttcaccgacttcgacagccagaccaacgtgtcccagagcaaggactccgacgtgtacatcaccgataagtgcgtgctggacatgcggagcatggacttcaagagcaactccgccgtggcctggtccaacaagtccgatttcgcctgcgccaacgccttcaacaacagcattatccccgaggacacattcttcccaagccccgagagcagctgcgacgtgaagctggtggaaaagagcttcgagacagacaccaacctgaacttccagaacctgagcgtgatcggcttcagaatcctgctgctgaaagtggccggctttaacctgctgatgaccctgcggctgtggtccagccgcgccaagagaagcggatctggcgtgaagcagaccctgaatttcgacctgctgaagctggctggcgacgtggaatccaacccaggcccttctagaatggctagactggccctgtctcctgtgtctagccactggctggttgctctgctgctgcttctgtctgccgctgaacctgtgcctgccgccaaaagcgaggatctgtaccccaatcctaagggcagcgcctgctccagaatctggcagagccctcggtttatcgcccggaagaggggcttcaccgtgaagatgcactgctacgtgaccaacagcaccttcagcatcgtgtcctggctgcggaagcgggaaaccgacaaagaaccccagcaagtgaacctggaacagggccacatgcaccagacacagaacagctccgtgaccacactgattatccaggacatccgcttcgaggacaacgggatctacttctgccagcaagagtgcagcaagaccagcgaggtgtacagaggctgtggcaccgagctgagagtgatgggctttagcacactggcccagctgaagcagcggaacacactgaaggacggcatcattatgatccagacgctgctcatcatcctgtttattatcgtgcccatcttcctgctgctggacaaggacgatagcaaggccggcatggaagaggaccacacctacgaaggactggacatcgaccagaccgccacatacgaggacatcgtgaccctgagaaccggcgaagtgaagtggagcgtgggagagcaccctggacaagaataa

SEQ ID NO: 4902 - DNA, 2256 bp, synthetic construct
  source 1..2256: mol_type = other DNA
atggccttaccagtgaccgccttgctcctgccgctggccttgctgctccacgccgccaggccggacatccagatgacacagagccctagcagcctgtctgccagcgtgggagacagagtgaccatcacatgcaaggccagcgaccacatcaacaactggctggcctggtatcagcagaagcctggacaggcccctaagctgctgatctacggcgctaccacactggaaacaggcgtgcccagcagattttctggcagcggctctggcaccgactacaccctgacaatatccagcctccagcctgaggacttcgccacctactactgtcagcagagctggaacaccccttggacattcggccagggcaccaagctggaaatcaagagaggcggaggcggaagtggaggcggaggatctggcggcggaggctctcaagttcagcttcaacagcctggcgctgagctggtcaaacctggcgcttctgtgaagatgagctgcaaagccagcggctacgccttcagcagctactggatcaactggatgaagcagaaacccggccagggactcgaatggatcggccaaatctatcccggcgacggcgacaccaactacaacggcaagttcaagggcagagccacactgaccgccgatacctctagcagcacagcctacatgcagctgagcagcctgaccagcgaagatagcgccgtgtacttctgtgcccggtccatcacaacagtcgtgggctgcgctatggactattggggccagggaacaagcgtgaccgtgtctagtacgcgtaccacgacgccagcgccgcgaccaccaacaccggcgcccaccatcgcgtcgcagcccctgtccctgcgcccagaggcgtgccggccagcggcggggggcgcagtgcacacgagggggctggacttcgcctgtgacatctacatctgggcgcccttggccgggacttgtggggtccttctcctgtcactggttatcaccctttactgcaaacggggcagaaagaaactcctgtatatattcaaacaaccatttatgagaccagtacaaactactcaagaggaagatggctgtagctgccgatttccagaagaagaagaaggaggatgtgaactgagagtgaagttcagcaggagcgcagacgcccccgcgtaccagcagggccagaaccagctctataacgagctgaatctaggacgaagagaggagtacgatgttttggacaagagacgtggccgggaccctgagatggggggaaagccgagaaggaagaaccctcaggaaggcctgtacaatgaactgcagaaagataagatggcggaggcctacagtgagattgggatgaaaggcgagcgccggaggggcaaggggcacgatggcctttaccagggtctcagtacagccaccaaggacacctacgacgcccttcacatgcaggccctgccccctcgctctagagccaagcgatctggatctggagcaacaaacttctcactactcaaacaagcaggtgacgtggaggagaatcccgggcctgggatccacaccatggctagactggccctgtctcctgtgcctagccattggatggttgccctgctgctgctcctgtctgctgaacctgttcctgccgccagaagcgaggacagatacagaaaccccaagggcagcgcctgctccagaatctggcaaagccccagattcattgcccggaagaggggcttcaccgtgaagatgcactgctacatgaacagcgccagcggcaacgtttcctggctgtggaagcaagagatggacgagaaccctcagcagctgaagctggaaaagggccgcatggaagagagccagaacgagtctctggccacactgaccatccagggcatcagattcgaggacaacggcatctacttttgccagcagaagtgcaacaacaccagcgaggtgtaccaaggctgtggcaccgagctgagagtgatgggctttagcacactggcccagctgaaacagcggaacaccctgaaggacggcatcattatgatccagacactgctcatcatcctgtttattatcgtgcccatcttcctgctgctcgacaaggacgatagcaaggccggcatggaagaggaccacacctacgaaggactggacatcgaccagaccgccacatacgaggacatcgtgaccctgagaaccggcgaagtgaagtggagcgtgggagagcaccctggacaagaataa

SEQ ID NO: 4903 - DNA, 1848 bp, synthetic construct
  source 1..1848: mol_type = other DNA
atggccttaccagtgaccgccttgctcctgccgctggccttgctgctccacgccgccaggccggacatccagatgacacagagccctagcagcctgtctgccagcgtgggagacagagtgaccatcacatgcaaggccagccaggatgtgggcacagccgtggattggtatcagcagaagcctggcaaggcccctaagctgctgatctactgggccagcacaagacacacaggcgtgcccagcagattttctggcagcggctctggcaccgacttcaccctgacaatatccagcctccagcctgaggacttcgccacctactactgccagcagtacaacagctaccctctgaccttcggccagggcaccaaggtggaaatcaaaagactcgaggacctgaagaacgtgttcccacctgaggtggccgtgttcgagcctagcgaggccgagatcagccacacccagaaagccaccctcgtgtgcctggctaccggcttctaccccgaccatgtggaactgtcttggtgggtcaacggcaaagaggtgcacagcggcgtgtgtaccgacccccagccactgaaagaacagcccgccctgaacgacagccggtactgcctgagcagcagactgagagtgtccgccaccttctggcagaacccccggaaccacttcagatgccaggtgcagttctacggcctgagcgagaacgacgagtggacccaggacagagccaagcccgtgacccagatcgtgtctgccgaagcctggggcagagccgattgcggctttaccagcgagagctaccagcagggcgtgctgagcgccaccatcctgtacgagatcctgctgggcaaggccaccctgtacgccgtgctggtgtctgccctggtgctgatggctatggtcaagcggaaggacagccggggaagggccaagcgatctggatctggagcaacaaacttctcactactcaaacaagcaggtgacgtggaggagaatcccgggcctactagtatggactggatttggcgcatccttttccttgtcggcgctgctaccggcgcgcattccttcgaagtgcagctggttgaatcaggtggcggcctggttcaacctggcggatctctgagactgagctgtgccgccagcggctacacctttaccgagtacacaatccactgggtccgacaggcccctggcaaaggacttgagtgggtcgccaacatcaaccccaacaatggcggcaccacctacaaccagaagttcgaggacagattcaccatcagccgggacaacagcaagaacaccctgtacctccagatgaactccctgagagccgaggacaccgccgtgtactattgtgccagaggctggaacttcgactactggggccagggaacactggtcaccgttagctctacgcgtatccagaaccctgatcctgccgtgtaccagctgcgggatagcaagagcagcgacaagagcgtgtgtctgttcaccgacttcgacagccagaccaacgtgtcccagagcaaggactccgacgtgtacatcaccgataagtgcgtgctggacatgcggagcatggacttcaagagcaactccgccgtggcctggtccaacaagtccgatttcgcctgcgccaacgccttcaacaacagcattatccccgaggacacattcttcccaagccccgagagcagctgcgacgtgaagctggtggaaaagagcttcgagacagacaccaacctgaacttccagaacctgagcgtgatcggcttcagaatcctgctgctgaaagtggccggctttaacctgctgatgaccctgcggctgtggtccagctaa

SEQ ID NO: 4904 - DNA, 1848 bp, synthetic construct; identical to SEQ ID NO: 4903
  source 1..1848: mol_type = other DNA

SEQ ID NO: 4905 - DNA, 2865 bp, synthetic construct
  source 1..2865: mol_type = other DNA
atggccttaccagtgaccgccttgctcctgccgctggccttgctgctccacgccgccaggccggacatccagatgacacagagccctagcagcctgtctgccagcgtgggagacagagtgaccatcacatgcaaggccagcgaccacatcaacaactggctggcctggtatcagcagaagcctggacaggcccctaagctgctgatctacggcgctaccacactggaaacaggcgtgcccagcagattttctggcagcggctctggcaccgactacaccctgacaatatccagcctccagcctgaggacttcgccacctactactgtcagcagagctggaacaccccttggacattcggccagggcaccaagctggaaatcaagagactcgaggacctgaagaacgtgttcccacctgaggtggccgtgttcgagcctagcgaggccgagatcagccacacccagaaagccaccctcgtgtgcctggctaccggcttctaccccgaccatgtggaactgtcttggtgggtcaacggcaaagaggtgcacagcggcgtgtgtaccgacccccagccactgaaagaacagcccgccctgaacgacagccggtactgcctgagcagcagactgagagtgtccgccaccttctggcagaacccccggaaccacttcagatgccaggtgcagttctacggcctgagcgagaacgacgagtggacccaggacagagccaagcccgtgacccagatcgtgtctgccgaagcctggggcagagccgattgcggctttaccagcgagagctaccagcagggcgtgctgagcgcctactacatgtacttgttgctgctgctgaagtccgtggtgtacttcgccatcatcacatgctgcctgctgcggagaaccgccttctgctgcaacggcgagaagtctagggccaagcgatctggatctggagcaacaaacttctcactactcaaacaagcaggtgacgtggaggagaatcccgggcctactagtgccaccatggactggatttggcgcatccttttccttgtcggcgctgctaccggcgcccattccgggccccaggttcagctgcaagagtctggccctggcctggtcaagcctagccaaacactgagcctgacctgtaccgtgtctggcggctctatcaccaccggcgagttctactggaactggttcagacagcctcctggcaaaggactggaatggatgggagccattgccgccagcggcagcacaacatacagccctagcttcgagagccggaccagcatcagcagagacaccagcaagaatcagttcagcctgaagctgagcagcgtgacagccgccgatacagccgtgtattactgcggcagatcctttggagtggccgccgtgacaaccggccagaatagaggacagggcaccctggtcacagtgtctagcggatccggcggcggaggatctggcggaggcggatctgggggcggaggctctttcgaacaagttcagcttcaacagcctggcgctgagctggtcaaacctggcgcttctgtgaagatgagctgcaaagccagcggctacgccttcagcagctactggatcaactggatgaagcagaaacccggccagggactcgaatggatcggccaaatctatcccggcgacggcgacaccaactacaacggcaagttcaagggcagagccacactgaccgccgatacctctagcagcacagcctacatgcagctgagcagcctgaccagcgaagatagcgccgtgtacttctgtgcccggtccatcacaacagtcgtgggctgcgctatggactattggggccagggaacaagcgtgaccgtgtctagtacgcgtatccagaaccctgatcctgccgtgtaccagctgcgggatagcaagagcagcgacaagagcgtgtgtctgttcaccgacttcgacagccagaccaacgtgtcccagagcaaggactccgacgtgtacatcaccgataagtgcgtgctggacatgcggagcatggacttcaagagcaactccgccgtggcctggtccaacaagtccgatttcgcctgcgccaacgccttcaacaacagcattatccccgaggacacattcttcccaagccccgagagcagctgcgacgtgaagctggtggaaaagagcttcgagacagacaccaacctgaacttccagaacctgagcgtgatcggcttcagaatcctgctgctgaaagtggccggctttaacctgctgatgaccctgcggctgtggtccagccgcgccaagagaagcggatctggcgtgaagcagaccctgaatttcgacctgctgaagctggctggcgacgtggaatccaacccaggcccttctagaatggccctgcctgtgacagctctgctgctgcctctggcactgctgctgcacgccgccagacctgccagacctgccaagagcgaggatctgtaccccaatcctaaagaacttcctacacagggcaccttcagcaacgtgtccaccaatgtgtccccagccaagcctaccaccaccgcctgcgccaagtctgaggacctgtatcctaatccaaaaggcggatctcctgctcctagacctcctacaccagctcctacaatcgccagccagcctctgtctctcagacccgaagcctgtagacctgctgctggcggagctgtgcataccagaggactggatttcgcctgcgacatctacatctgggctcctctggctggcacatgtggcgttctgctgctgagcctggtcatcaccctgtactgcaaccaccggaacaggcggagagtgtgcaagtgccctagacctgtggtttaa

SEQ ID NO: 4906 - DNA, 3222 bp, synthetic construct
  source 1..3222: mol_type = other DNA
atggccttaccagtgaccgccttgctcctgccgctggccttgctgctccacgccgccaggccggacatccagatgacacagagccctagcagcctgtctgccagcgtgggagacagagtgaccatcacatgcaaggccagccaggatgtgggcacagccgtggattggtatcagcagaagcctggcaaggcccctaagctgctgatctactgggccagcacaagacacacaggcgtgcccagcagattttctggcagcggctctggcaccgacttcaccctgacaatatccagcctccagcctgaggacttcgccacctactactgccagcagtacaacagctaccctctgaccttcggccagggcaccaaggtggaaatcaaaagactcgaggacctgaagaacgtgttcccacctgaggtggccgtgttcgagcctagcgaggccgagatcagccacacccagaaagccaccctcgtgtgcctggctaccggcttctaccccgaccatgtggaactgtcttggtgggtcaacggcaaagaggtgcacagcggcgtgtctaccgacccccagccactgaaagaacagcccgccctgaacgacagccggtactgcctgagcagcagactgagagtgtccgccaccttctggcagaacccccggaaccacttcagatgccaggtgcagttctacggcctgagcgagaacgacgagtggacccaggacagagccaagcccgtgacccagatcgtgtctgccgaagcctggggcagagccgattgcggatcccagagcttcggcctgctggaccccaagctgtgctacctgctggatggcatcctgttcatctacggcgtgatcctgaccgccctgttcctgagagtgaagttcagcagaagcgccgacgcccctgcctaccagcagggacagaaccaactgtacaacgagctgaacctgggcagacgggaagagtacgacgtgctggacaagcggagaggcagggaccctgagatgggcggaaagccccagcggagaaagaacccccaggaaggactgtataacgaactccagaaagacaagatggccgaagcctacagcgagatcggcatgaagggcgagcggagaagaggcaagggccacgatggcctgtaccagggcctgagcaccgccaccaaggacacctatgacgccctgcacatgcaggccctgcctccaagaagggccaagcgatctggatctggagcaacaaacttctcactactcaaacaagcaggtgacgtggaggagaatcccgggcctactagtatggactggatttggcgcatccttttccttgtcggcgctgctaccggcgcgcattccttcgaagtgcagctggttgaatcaggtggcggcctggttcaacctggcggatctctgagactgagctgtgccgccagcggctacacctttaccgagtacacaatccactgggtccgacaggcccctggcaaaggacttgagtgggtcgccaacatcaaccccaacaatggcggcaccacctacaaccagaagttcgaggacagattcaccatcagccgggacaacagcaagaacaccctgtacctccagatgaactccctgagagccgaggacaccgccgtgtactattgtgccagaggctggaacttcgactactggggccagggaacactggtcaccgttagctctacgcgtatccagaaccctgatcctgccgtgtaccagctgcgggatagcaagagcagcgacaagagcgtgtgtctgttcaccgacttcgacagccagaccaacgtgtcccagagcaaggactccgacgtgtacatcaccgataagaccgtgctggacatgcggagcatggacttcaagagcaactccgccgtggcctggtccaacaagtccgatttcgcctgcgccaacgccttcaacaacagcattatccccgaggacacattcttcccaagccccgagagcagctgcggtacccagagttttgggttgttggaccctaaattgtgctatctgttggacggaatcctgttcatttacggagtgatcctgaccgcattgttcctgcgggttaagttttccagatccgcagacgcacccgcttaccaacaagggcagaaccaactctacaatgaacttaatttggggcggagggaagagtacgacgttctggacaaaaggaggggacgagatcccgagatgggcggaaagcctcgaaggaagaatccgcaagaggggctttataacgaactccagaaagataaaatggcagaagcctatagtgagattgggatgaagggagaaaggaggaggggtaaaggtcacgatgggttgtaccaaggattgagcacagccactaaagatacctatgatgcgctccacatgcaggccctgccgccaagacgcgccaagagaagcggatctggcgtgaagcagaccctgaatttcgacctgctgaagctggctggcgacgtggaatccaacccaggcccttctagaatggctagactggccctgtctcctgtgtctagccactggctggttgctctgctgctgcttctgtctgccgctgaacctgtgcctgccgccaaaagcgaggatctgtaccccaatcctaagggcagcgcctgctccagaatctggcagagccctcggtttatcgcccggaagaggggcttcaccgtgaagatgcactgctacgtgaccaacagcaccttcagcatcgtgtcctggctgcggaagcgggaaaccgacaaagaaccccagcaagtgaacctggaacagggccacatgcaccagacacagaacagctccgtgaccacactgattatccaggacatccgcttcgaggacaacgggatctacttctgccagcaagagtgcagcaagaccagcgaggtgtacagaggctgtggcaccgagctgagagtgatgggctttagcacactggcccagctgaagcagcggaacacactgaaggacggcatcattatgatccagacgctgctcatcatcctgtttattatcgtgcccatcttcctgctgctggacaaggacgatagcaaggccggcatggaagaggaccacacctacgaaggactggacatcgaccagaccgccacatacgaggacatcgtgaccctgagaaccggcgaagtgaagtggagcgtgggagagcaccctggacaagaataa

SEQ ID NO: 4907 - DNA, 2997 bp, synthetic construct
  source 1..2997: mol_type = other DNA
atggccttaccagtgaccgccttgctcctgccgctggccttgctgctccacgccgccaggccggacatccagatgacacagagccctagcagcctgtctgccagcgtgggagacagagtgaccatcacatgcaaggccagccaggatgtgggcacagccgtggattggtatcagcagaagcctggcaaggcccctaagctgctgatctactgggccagcacaagacacacaggcgtgcccagcagattttctggcagcggctctggcaccgacttcaccctgacaatatccagcctccagcctgaggacttcgccacctactactgccagcagtacaacagctaccctctgaccttcggccagggcaccaaggtggaaatcaaaagactcgaggacctgaagaacgtgttcccacctgaggtggccgtgttcgagcctagcgaggccgagatcagccacacccagaaagccaccctcgtgtgcctggctaccggcttctaccccgaccatgtggaactgtcttggtgggtcaacggcaaagaggtgcacagcggcgtgtctaccgacccccagccactgaaagaacagcccgccctgaacgacagccggtactgcctgagcagcagactgagagtgtccgccaccttctggcagaacccccggaaccacttcagatgccaggtgcagttctacggcctgagcgagaacgacgagtggacccaggacagagccaagcccgtgacccagatcgtgtctgccgaagcctggggcagagccgattgcggatcccagagcttcggcctgctggaccccaagctgtgctacctgctggatggcatcctgttcatctacggcgtgatcctgaccgccctgttcctgagagtgaagttcagcagaagcgccgacgcccctgcctaccagcagggacagaaccaactgtacaacgagctgaacctgggcagacgggaagagtacgacgtgctggacaagcggagaggcagggaccctgagatgggcggaaagccccagcggagaaagaacccccaggaaggactgtataacgaactccagaaagacaagatggccgaagcctacagcgagatcggcatgaagggcgagcggagaagaggcaagggccacgatggcctgtaccagggcctgagcaccgccaccaaggacacctatgacgccctgcacatgcaggccctgcctccaagaagggccaagcgatctggatctggagcaacaaacttctcactactcaaacaagcaggtgacgtggaggagaatcccgggcctactagtatggactggatttggcgcatccttttccttgtcggcgctgctaccggcgcgcattccttcgaagtgcagctggttgaatcaggtggcggcctggttcaacctggcggatctctgagactgagctgtgccgccagcggctacacctttaccgagtacacaatccactgggtccgacaggcccctggcaaaggacttgagtgggtcgccaacatcaaccccaacaatggcggcaccacctacaaccagaagttcgaggacagattcaccatcagccgggacaacagcaagaacaccctgtacctccagatgaactccctgagagccgaggacaccgccgtgtactattgtgccagaggctggaacttcgactactggggccagggaacactggtcaccgttagctctacgcgtatccagaaccctgatcctgccgtgtaccagctgcgggatagcaagagcagcgacaagagcgtgtgtctgttcaccgacttcgacagccagaccaacgtgtcccagagcaaggactccgacgtgtacatcaccgataagaccgtgctggacatgcggagcatggacttcaagagcaactccgccgtggcctggtccaacaagtccgatttcgcctgcgccaacgccttcaacaacagcattatccccgaggacacattcttcccaagccccgagagcagctgcggtacccagagttttgggttgttggaccctaaattgtgctatctgttggacggaatcctgttcatttacggagtgatcctgaccgcattgttcctgcgggttaagttttccagatccgcagacgcacccgcttaccaacaagggcagaaccaactctacaatgaacttaatttggggcggagggaagagtacgacgttctggacaaaaggaggggacgagatcccgagatgggcggaaagcctcgaaggaagaatccgcaagaggggctttataacgaactccagaaagataaaatggcagaagcctatagtgagattgggatgaagggagaaaggaggaggggtaaaggtcacgatgggttgtaccaaggattgagcacagccactaaagatacctatgatgcgctccacatgcaggccctgccgccaagacgcgccaagagaagcggatctggcgtgaagcagaccctgaatttcgacctgctgaagctggctggcgacgtggaatccaacccaggcccttctagaatggccctgcctgtgacagctctgctgctgcctctggcactgctgctgcacgccgccagacctgccagacctgccaagagcgaggatctgtaccccaatcctaaagaacttcctacacagggcaccttcagcaacgtgtccaccaatgtgtccccagccaagcctaccaccaccgcctgcgccaagtctgaggacctgtatcctaatccaaaaggcggatctcctgctcctagacctcctacaccagctcctacaatcgccagccagcctctgtctctcagacccgaagcctgtagacctgctgctggcggagctgtgcataccagaggactggatttcgcctgcgacatctacatctgggctcctctggctggcacatgtggcgttctgctgctgagcctggtcatcaccctgtactgcaaccaccggaacaggcggagagtgtgcaagtgccctagacctgtggtttaa

SEQ ID NO: 4908 - DNA, 2589 bp, synthetic construct
  source 1..2589: mol_type = other DNA
atggccttaccagtgaccgccttgctcctgccgctggccttgctgctccacgccgccaggccgagctacgtgctgacacagcctccatccgtgtctgtggctccaggacagaccgccagaatcacatgcggcggcaacaacatcggcggcaagagcgtgcactggtatcagcagccacctggacaggctccagtggtggtggtgtacgacgacagcgatagacctagcggcatccccgagagattcagcggcagcaattccggcaataccgccacactgaccatcagcagagtggaagctggcgacgaggccgtgtactactgccaagtgtgggacagcagcagcgatcacgtggtgtttggcggcggaacaaagctgacagtgcttctcgaggacctgaagaacgtgttcccacctgaggtggccgtgttcgagcctagcgaggccgagatcagccacacccagaaagccaccctcgtgtgcctggctaccggcttctaccccgaccatgtggaactgtcttggtgggtcaacggcaaagaggtgcacagcggcgtgtgtaccgacccccagccactgaaagaacagcccgccctgaacgacagccggtactgcctgagcagcagactgagagtgtccgccaccttctggcagaacccccggaaccacttcagatgccaggtgcagttctacggcctgagcgagaacgacgagtggacccaggacagagccaagcccgtgacccagatcgtgtctgccgaagcctggggcagagccgattgcggctttaccagcgagagctaccagcagggcgtgctgagcgcctactacatgtacttgttgctgctgctgaagtccgtggtgtacttcgccatcatcacatgctgcctgctgcggagaaccgccttctgctgcaacggcgagaagtctagggccaagcgatctggatctggagcaacaaacttctcactactcaaacaagcaggtgacgtggaggagaatcccgggcctactagtatggactggatttggcgcatccttttccttgtcggcgctgctaccggcgcgcattccttcgaacaactccagctgcaagagtctggccctggcctggtcaagcctagcgaaacactgagcctgacctgtaccgtgtctggcggctctatcagctccagcagctatttctggggctggatcagacaacctcctggcaaaggactggaatggatcggctccatctactacagcggcatcacctactacaaccccagcctgaagtccagagtgaccatctccgtggacaccagcaagaaccagttctccctgaagctgagcagcgtgacagccgccgataccgccgtgtattattgtgccagacatgacggcgctgtggccggcctgtttgattattggggacagggcaccctggtcaccgtgtcatctgctacgcgtatccagaaccctgatcctgccgtgtaccagctgcgggatagcaagagcagcgacaagagcgtgtgtctgttcaccgacttcgacagccagaccaacgtgtcccagagcaaggactccgacgtgtacatcaccgataagtgcgtgctggacatgcggagcatggacttcaagagcaactccgccgtggcctggtccaacaagtccgatttcgcctgcgccaacgccttcaacaacagcattatccccgaggacacattcttcccaagcagcgacgtgccctgcgacgtgaagctggtggaaaagagcttcgagacagacaccaacctgaacttccagaacctgagcgtgatcggcttcagaatcctgctgctgaaagtggccggctttaacctgctgatgaccctgcggctgtggtccagccgcgccaagagaagcggatctggcgtgaagcagaccctgaatttcgacctgctgaagctggctggcgacgtggaatccaacccaggcccttctagaatgtaccggatgcagctgctgagctgtatcgccctgtctctggccctggtcacaaatagcaactgggttaacgtgatctccgacctgaagaagatcgaggacctgatccagtccatgcacatcgacgccacactgtacaccgagagcgacgtgcaccctagctgtaaagtgaccgccatgaagtgctttctgctggaactgcaagtgatctccctggaaagcggcgacgccagcatccacgacaccgtgaagaacctgattatcctggctaacaacagcctgagcagcaacggcaacgtgaccgagtccggctgtaaagagtgcgaggaactggaagagaagaatatcaaagagttcctccagagcttcgtgcacatcgtgcagatgttcatcaacaccagcaagatcgaagtgatgtaccctcctccttacctggacaacgagaagtccaacggcaccatcatccacgtgaagggcaagcacctgtgtccttctccactgttccccggacctagcaagcctttctgggtgctcgttgttgttggcggcgtgctggcctgttacagcctgctggttaccgtggccttcatcatcttttgggtccgaagcaagcggagctaa

SEQ ID NO: 4909 - DNA, 2130 bp, synthetic construct
  source 1..2130: mol_type = other DNA
atggccttaccagtgaccgccttgctcctgccgctggccttgctgctccacgccgccaggccggacatccagatgacacagagccctagcagcctgtctgccagcgtgggagacagagtgaccatcacatgcaaggccagcgaccacatcaacaactggctggcctggtatcagcagaagcctggacaggcccctaagctgctgatctacggcgctaccacactggaaacaggcgtgcccagcagattttctggcagcggctctggcaccgactacaccctgacaatatccagcctccagcctgaggacttcgccacctactactgtcagcagagctggaacaccccttggacattcggccagggcaccaagctggaaatcaagagactcgagatccagaaccctgatcctgccgtgtaccagctgcgggatagcaagagcagcgacaagagcgtgtgtctgttcaccgacttcgacagccagaccaacgtgtcccagagcaaggactccgacgtgtacatcaccgataagtgcgtgctggacatgcggagcatggacttcaagagcaactccgccgtggcctggtccaacaagtccgatttcgcctgcgccaacgccttcaacaacagcattatccccgaggacacattcttcccaagcagcgacgtgccctgcgacgtgaagctggtggaaaagagcttcgagacagacaccaacctgaacttccagaacctgagcgtgatcggcttcagaatcctgctgctgaaagtggccggctttaacctgctgatgaccctgcggctgtggtccagccgcgccaagagaagcggatctggcgtgaagcagaccctgaatttcgacctgctgaagctggctggcgacgtggaatccaacccaggccctactagtgcgaccatggccctgcctgtgacagctctgctgctgcctctggcactgctgctgcacgccgccagacctgcaagaagtgaagatcgctacaggaaccctaaggggtcagcctgcaaaggcggcggaggaagcgaacttcctacacagggcaccttcagcaacgtgtccaccaatgtgtccccagccaagcctaccaccaccgcctgcgcacgcagcgaggacaggtataggaaccccaaaggaagtgcgtgctctggatccggcggcggaggatctggcggaggcggatctgggggcggaggctctttcgaacaagttcagcttcaacagcctggcgctgagctggtcaaacctggcgcttctgtgaagatgagctgcaaagccagcggctacgccttcagcagctactggatcaactggatgaagcagaaacccggccagggactcgaatggatcggccaaatctatcccggcgacggcgacaccaactacaacggcaagttcaagggcagagccacactgaccgccgatacctctagcagcacagcctacatgcagctgagcagcctgaccagcgaagatagcgccgtgtacttctgtgcccggtccatcacaacagtcgtgggctgcgctatggactattggggccagggaacaagcgtgaccgtgtctagtacgcgtgaggacctgaagaacgtgttcccacctgaggtggccgtgttcgagcctagcaaggccgagatcgcccacacccagaaagccaccctcgtgtgcctggctaccggcttctaccccgaccatgtggaactgtcttggtgggtcaacggcaaagaggtgcacagcggcgtgtgtaccgacccccagccactgaaagaacagcccgccctgaacgacagccggtactgcctgagcagcagactgagagtgtccgccaccttctggcagaacccccggaaccacttcagatgccaggtgcagttctacggcctgagcgagaacgacgagtggacccaggacagagccaagcccgtgacccagatcgtgtctgccgaagcctggggcagagccgattgcggcatcaccagcgccagctaccaccagggcgtgctgagcgccaccatcctgtacgagatcctgctgggcaaggccaccctgtacgccgtgctggtgtctgccctggtgctgatggctatggtcaagcggaaggacagccggggataa

SEQ ID NO: 4910 - DNA, 1977 bp, synthetic construct; identical to SEQ ID NO: 4795
  source 1..1977: mol_type = other DNA

SEQ ID NO: 4911 - DNA, 3189 bp, synthetic construct
  source 1..3189: mol_type = other DNA
atggccttaccagtgaccgccttgctcctgccgctggccttgctgctccacgccgccaggccggacatccagatgacacagagccctagcagcctgtctgccagcgtgggagacagagtgaccatcacatgcaaggccagcgaccacatcaacaactggctggcctggtatcagcagaagcctggacaggcccctaagctgctgatctacggcgctaccacactggaaacaggcgtgcccagcagattttctggcagcggctctggcaccgactacaccctgacaatatccagcctccagcctgaggacttcgccacctactactgtcagcagagctggaacaccccttggacattcggccagggcaccaagctggaaatcaagagactcgaggacctgaagaacgtgttcccacctgaggtggccgtgttcgagcctagcgaggccgagatcagccacacccagaaagccaccctcgtgtgcctggctaccggcttctaccccgaccatgtggaactgtcttggtgggtcaacggcaaagaggtgcacagcggcgtgtctaccgacccccagccactgaaagaacagcccgccctgaacgacagccggtactgcctgagcagcagactgagagtgtccgccaccttctggcagaacccccggaaccacttcagatgccaggtgcagttctacggcctgagcgagaacgacgagtggacccaggacagagccaagcccgtgacccagatcgtgtctgccgaagcctggggcagagccgattgcggatcccagagcttcggcctgctggaccccaagctgtgctacctgctggatggcatcctgttcatctacggcgtgatcctgaccgccctgttcctgagagtgaagttcagcagaagcgccgacgcccctgcctaccagcagggacagaaccaactgtacaacgagctgaacctgggcagacgggaagagtacgacgtgctggacaagcggagaggcagggaccctgagatgggcggaaagccccggagaaagaacccccaggaaggactgtataacgaactccagaaagacaagatggccgaagcctacagcgagatcggcatgaagggcgagcggagaagaggcaagggccacgatggcctgtaccagggcctgagcaccgccaccaaggacacctatgacgccctgcacatgcaggccctgcctccaagaagggccaagcgatctggatctggagcaacaaacttctcactactcaaacaagcaggtgacgtggaggagaatcccgggcctactagtatggactggatttggcgcatccttttccttgtcggcgctgctaccggcgcgcattccttcgaacaagttcagcttcaacagcctggcgctgagctggtcaaacctggcgcttctgtgaagatgagctgcaaagccagcggctacgccttcagcagctactggatcaactggatgaagcagaaacccggccagggactcgaatggatcggccaaatctatcccggcgacggcgacaccaactacaacggcaagttcaagggcagagccacactgaccgccgatacctctagcagcacagcctacatgcagctgagcagcctgaccagcgaagatagcgccgtgtacttctgtgcccggtccatcacaacagtcgtgggctgcgctatggactattggggccagggaacaagcgtgaccgtgtctagtacgcgtatccagaaccctgatcctgccgtgtaccagctgcgggatagcaagagcagcgacaagagcgtgtgtctgttcaccgacttcgacagccagaccaacgtgtcccagagcaaggactccgacgtgtacatcaccgataagaccgtgctggacatgcggagcatggacttcaagagcaactccgccgtggcctggtccaacaagtccgatttcgcctgcgccaacgccttcaacaacagcattatccccgaggacacattcttcccaagccccgagagcagctgcggtacccagagttttgggttgttggaccctaaattgtgctatctgttggacggaatcctgttcatttacggagtgatcctgaccgcattgttcctgcgggttaagttttccagatccgcagacgcacccgcttaccaacaagggcagaaccaactctacaatgaacttaatttggggcggagggaagagtacgacgttctggacaaaaggaggggacgagatcccgagatgggcggaaagcctcgaaggaagaatccgcaagaggggctttataacgaactccagaaagataaaatggcagaagcctatagtgagattgggatgaagggagaaaggaggaggggtaaaggtcacgatgggttgtaccaaggattgagcacagccactaaagatacctatgatgcgctccacatgcaggccctgccgccaagacgcgccaagagaagcggatctggcgtgaagcagaccctgaatttcgacctgctgaagctggctggcgacgtggaatccaacccaggcccttctagaatgagaatcagcaagccccacctgagatccatcagcatccagtgctacctgtgcctgctgctgaacagccactttctgacagaggccggcatccacgtgttcatcctgggctgtttttctgccggcctgcctaagaccgaggccaactgggttaacgtgatctccgacctgaagaagatcgaggacctgatccagtccatgcacatcgacgccacactgtacaccgagagcgacgtgcaccctagctgtaaagtgaccgccatgaagtgctttctgctggaactgcaagtgatctccctggaaagcggcgacgccagcatccacgacaccgtggaaaacctgattatcctggctaacaacagcctgagcagcaacggcaacgtgaccgagtccggctgtaaagagtgcgaggaactggaagagaagaatatcaaagagttcctccagagcttcgtgcacatcgtgcagatgttcatcaacaccagcgccagaagcgaggacagatacagaaaccccaagggcttcagcacactggcccagctgaaacagcggaacaccctgaaggacggcatcattatgatccagacactgctcatcatcctgtttattatcgtgcccatcttcctgctgctcgacaaggactaa

SEQ ID NO: 4912 - DNA, 2610 bp, synthetic construct
  source 1..2610: mol_type = other DNA
atggccttaccagtgaccgccttgctcctgccgctggccttgctgctccacgccgccaggccgagctacgtgctgacacagcctccatccgtgtctgtggctccaggacagaccgccagaatcacatgcggcggcaacaacatcggcggcaagagcgtgcactggtatcagcagccacctggacaggctccagtggtggtggtgtacgacgacagcgatagacctagcggcatccccgagagattcagcggcagcaattccggcaataccgccacactgaccatcagcagagtggaagctggcgacgaggccgtgtactactgccaagtgtgggacagcagcagcgatcacgtggtgtttggcggcggaacaaagctgacagtgcttctcgaggacctgaagaacgtgttcccacctgaggtggccgtgttcgagcctagcaaggccgagatcgcccacacccagaaagccaccctcgtgtgcctggctaccggcttctaccccgaccatgtggaactgtcttggtgggtcaacggcaaagaggtgcacagcggcgtgtgtaccgacccccagccactgaaagaacagcccgccctgaacgacagccggtactgcctgagcagcagactgagagtgtccgccaccttctggcagaacccccggaaccacttcagatgccaggtgcagttctacggcctgagcgagaacgacgagtggacccaggacagagccaagcccgtgacccagatcgtgtctgccgaagcctggggcagagccgattgcggcatcaccagcgccagctaccaccagggcgtgctgagcgccaccatcctgtacgagatcctgctgggcaaggccaccctgtacgccgtgctggtgtctgccctggtgctgatggctatggtcaagcggaaggacagccggggaagggccaagcgatctggatctggagcaacaaacttctcactactcaaacaagcaggtgacgtggaggagaatcccgggcctactagtatggactggatttggcgcatccttttccttgtcggcgctgctaccggcgcgcattccttcgaacaactccagctgcaagagtctggccctggcctggtcaagcctagcgaaacactgagcctgacctgtaccgtgtctggcggctctatcagctccagcagctatttctggggctggatcagacaacctcctggcaaaggactggaatggatcggctccatctactacagcggcatcacctactacaaccccagcctgaagtccagagtgaccatctccgtggacaccagcaagaaccagttctccctgaagctgagcagcgtgacagccgccgataccgccgtgtattattgtgccagacatgacggcgctgtggccggcctgtttgattattggggacagggcaccctggtcaccgtgtcatctgctacgcgtatccagaaccctgatcctgccgtgtaccagctgcgggatagcaagagcagcgacaagagcgtgtgtctgttcaccgacttcgacagccagaccaacgtgtcccagagcaaggactccgacgtgtacatcaccgataagtgcgtgctggacatgcggagcatggacttcaagagcaactccgccgtggcctggtccaacaagtccgatttcgcctgcgccaacgccttcaacaacagcattatccccgaggacacattcttcccaagcagcgacgtgccctgcgacgtgaagctggtggaaaagagcttcgagacagacaccaacctgaacttccagaacctgagcgtgatcggcttcagaatcctgctgctgaaagtggccggctttaacctgctgatgaccctgcggctgtggtccagccgcgccaagagaagcggatctggcgtgaagcagaccctgaatttcgacctgctgaagctggctggcgacgtggaatccaacccaggcccttctagaatgagaatcagcaagccccacctgagatccatcagcatccagtgctacctgtgcctgctgctgaacagccactttctgacagaggccggcatccacgtgttcatcctgggctgtttttctgccggcctgcctaagaccgaggccaactgggttaacgtgatctccgacctgaagaagatcgaggacctgatccagtccatgcacatcgacgccacactgtacaccgagagcgacgtgcaccctagctgtaaagtgaccgccatgaagtgctttctgctggaactgcaagtgatctccctggaaagcggcgacgccagcatccacgacaccgtggaaaacctgattatcctggctaacaacagcctgagcagcaacggcaacgtgaccgagtccggctgtaaagagtgcgaggaactggaagagaagaatatcaaagagttcctccagagcttcgtgcacatcgtgcagatgttcatcaacaccagcgccagaagcgaggacagatacagaaaccccaagggcttcagcacactggcccagctgaaacagcggaacaccctgaaggacggcatcattatgatccagacactgctcatcatcctgtttattatcgtgcccatcttcctgctgctcgacaaggactaa

SEQ ID NO: 4913 - DNA, 1992 bp, synthetic construct
  source 1..1992: mol_type = other DNA
atggccttaccagtgaccgccttgctcctgccgctggccttgctgctccacgccgccaggccggacatcgtgatgacacagagccctgatagcctggccgtgtctctgggagagagagccaccatcaactgcaagagcagccagagcctgctgaacagcggcaaccagaagaactacctggcctggtatcagcagaagcccggccagcctcctaagctgctgatctactggggcagcaccagatccacaggcgtgcccgatagattttctggctctggcagcggcaccgacttcaccctgacaatttctagcctgcaagccgaggacgtggccgtgtactactgccagaacgactacacataccccttcaccttcggccagggcaccaagctggaaatcaaactcgagatccagaaccctgatcctgccgtgtaccagctgcgggatagcaagagcagcgacaagagcgtgtgtctgttcaccgacttcgacagccagaccaacgtgtcccagagcaaggactccgacgtgtacatcaccgataagtgcgtgctggacatgcggagcatggacttcaagagcaactccgccgtggcctggtccaacaagtccgatttcgcctgcgccaacgccttcaacaacagcattatccccgaggacacattcttcccaagccccgagagcagctgcgacgtgaagctggtggaaaagagcttcgagacagacaccaacctgaacttccagaacctgagcgtgatcggcttcagaatcctgctgctgaaagtggccggctttaacctgctgatgaccctgcggctgtggtccagctctagtcgcgccaagagaagcggatctggcgtgaagcagaccctgaatttcgacctgctgaagctggctggcgacgtggaatccaacccaggccctactagtgccaccatggactggatttggcgcatccttttccttgtcggcgctgctaccggcgcccattccgggcccgccagaagcgaggacagatacagaaaccccaaaggatccggcggcggaggatctggcggaggcggatctgggggcggaggctctttcgaacaagttcagctggttcagagcggagccgaagtgaagaaacctggggcctctgtgaaggtgtcctgcaaggcttccggctataccttcaccagcttttggctgaactgggtccgacaggcccctggacaaggactggaatggatgggcaacatctaccccagcaccagctacaccgtgtacaaccagaaattcaaggaccgcgtgaccatgaccagggacaccagcacaagcacagtgtacatggaactgagcagcctgcggagcgaggataccgccgtgtattattgcgccagaacctggcggggcaacagcttcgattattggggccagggaaccaccgtgaccgtgtcatctacgcgtgaggacctgaagaacgtgttcccacctgaggtggccgtgttcgagcctagcgaggccgagatcagccacacccagaaagccaccctcgtgtgcctggctaccggcttctaccccgaccatgtggaactgtcttggtgggtcaacggcaaagaggtgcacagcggcgtgtgtaccgacccccagccactgaaagaacagcccgccctgaacgacagccggtactgcctgagcagcagactgagagtgtccgccaccttctggcagaacccccggaaccacttcagatgccaggtgcagttctacggcctgagcgagaacgacgagtggacccaggacagagccaagcccgtgacccagatcgtgtctgccgaagcctggggcagagccgattgcggctttaccagcgagagctaccagcagggcgtgctgagcgcctactacatgtacttgttgctgctgctgaagtccgtggtgtacttcgccatcatcacatgctgcctgctgcggagaaccgccttctgctgcaacggcgagaagtcttaa

SEQ ID NO: 4914 - DNA, 1875 bp, synthetic construct
  source 1..1875: mol_type = other DNA
atggccttaccagtgaccgccttgctcctgccgctggccttgctgctccacgccgccaggccgagctacgtgctgacacagcctccatccgtgtctgtggctccaggacagaccgccagaatcacatgcggcggcaacaacatcggcggcaagagcgtgcactggtatcagcagccacctggacaggctccagtggtggtggtgtacgacgacagcgatagacctagcggcatccccgagagattcagcggcagcaattccggcaataccgccacactgaccatcagcagagtggaagctggcgacgaggccgtgtactactgccaagtgtgggacagcagcagcgatcacgtggtgtttggcggcggaacaaagctgacagtgcttctcgaggacctgaagaacgtgttcccacctgaggtggccgtgttcgagcctagcgaggccgagatcagccacacccagaaagccaccctcgtgtgcctggctaccggcttctaccccgaccatgtggaactgtcttggtgggtcaacggcaaagaggtgcacagcggcgtgtgtaccgacccccagccactgaaagaacagcccgccctgaacgacagccggtactgcctgagcagcagactgagagtgtccgccaccttctggcagaacccccggaaccacttcagatgccaggtgcagttctacggcctgagcgagaacgacgagtggacccaggacagagccaagcccgtgacccagatcgtgtctgccgaagcctggggcagagccgattgcggctttaccagcgagagctaccagcagggcgtgctgagcgcctactacatgtacttgttgctgctgctgaagtccgtggtgtacttcgccatcatcacatgctgcctgctgcggagaaccgccttctgctgcaacggcgagaagtctagggccaagcgatctggatctggagcaacaaacttctcactactcaaacaagcaggtgacgtggaggagaatcccgggcctactagtatggactggatttggcgcatccttttccttgtcggcgctgctaccggcgcgcattccttcgaacaactccagctgcaagagtctggccctggcctggtcaagcctagcgaaacactgagcctgacctgtaccgtgtctggcggctctatcagctccagcagctatttctggggctggatcagacaacctcctggcaaaggactggaatggatcggctccatctactacagcggcatcacctactacaaccccagcctgaagtccagagtgaccatctccgtggacaccagcaagaaccagttctccctgaagctgagcagcgtgacagccgccgataccgccgtgtattattgtgccagacatgacggcgctgtggccggcctgtttgattattggggacagggcaccctggtcaccgtgtcatctgctacgcgtatccagaaccctgatcctgccgtgtaccagctgcgggatagcaagagcagcgacaagagcgtgtgtctgttcaccgacttcgacagccagaccaacgtgtcccagagcaaggactccgacgtgtacatcaccgataagtgcgtgctggacatgcggagcatggacttcaagagcaactccgccgtggcctggtccaacaagtccgatttcgcctgcgccaacgccttcaacaacagcattatccccgaggacacattcttcccaagccccgagagcagctgcgacgtgaagctggtggaaaagagcttcgagacagacaccaacctgaacttccagaacctgagcgtgatcggcttcagaatcctgctgctgaaagtggccggctttaacctgctgatgaccctgcggctgtggtccagctaa

SEQ ID NO: 4915 - DNA, 1875 bp, synthetic construct
  source 1..1875: mol_type = other DNA
atggccttaccagtgaccgccttgctcctgccgctggccttgctgctccacgccgccaggccgagctacgtgctgacacagcctccatccgtgtctgtggctccaggacagaccgccagaatcacatgcggcggcaacaacatcggcagcaagagcgtgcactggtatcagcagccacctggacaggctccagtggtggtggtgtacgacgacagcgatagacctagcggcatccccgagagattcagcggcagcaattccggcaataccgccacactgaccatcagcagagtggaagctggcgacgaggccgtgtactactgccaagtgtgggacagcagcagcgatcacgtggtgtttggcggcggaacaaagctgacagtgcttctcgaggacctgaagaacgtgttcccacctgaggtggccgtgttcgagcctagcgaggccgagatcagccacacccagaaagccaccctcgtgtgcctggctaccggcttctaccccgaccatgtggaactgtcttggtgggtcaacggcaaagaggtgcacagcggcgtgtgtaccgacccccagccactgaaagaacagcccgccctgaacgacagccggtactgcctgagcagcagactgagagtgtccgccaccttctggcagaacccccggaaccacttcagatgccaggtgcagttctacggcctgagcgagaacgacgagtggacccaggacagagccaagcccgtgacccagatcgtgtctgccgaagcctggggcagagccgattgcggctttaccagcgagagctaccagcagggcgtgctgagcgcctactacatgtacttgttgctgctgctgaagtccgtggtgtacttcgccatcatcacatgctgcctgctgcggagaaccgccttctgctgcaacggcgagaagtctagggccaagcgatctggatctggagcaacaaacttctcactactcaaacaagcaggtgacgtggaggagaatcccgggcctactagtatggactggatttggcgcatccttttccttgtcggcgctgctaccggcgcgcattccttcgaacaactccagctgcaagagtctggccctggcctggtcaagcctagcgaaacactgagcctgacctgtaccgtgtctggcggctctatcagctccggcagctatttctggggctggatcagacaacctcctggcaaaggactggaatggatcggctccatctactacagcggcatcacctactacaaccccagcctgaagtccagagtgaccatctccgtggacaccagcaagaaccagttctccctgaagctgagcagcgtgacagccgccgataccgccgtgtattattgtgccagacatgacggcgctgtggccggcctgtttgattattggggacagggcaccctggtcaccgtgtcatctgctacgcgtatccagaaccctgatcctgccgtgtaccagctgcgggatagcaagagcagcgacaagagcgtgtgtctgttcaccgacttcgacagccagaccaacgtgtcccagagcaaggactccgacgtgtacatcaccgataagtgcgtgctggacatgcggagcatggacttcaagagcaactccgccgtggcctggtccaacaagtccgatttcgcctgcgccaacgccttcaacaacagcattatccccgaggacacattcttcccaagccccgagagcagctgcgacgtgaagctggtggaaaagagcttcgagacagacaccaacctgaacttccagaacctgagcgtgatcggcttcagaatcctgctgctgaaagtggccggctttaacctgctgatgaccctgcggctgtggtccagctaa

SEQ ID NO: 4916 - DNA, 2664 bp, synthetic construct
  source 1..2664: mol_type = other DNA
atggccttaccagtgaccgccttgctcctgccgctggccttgctgctccacgccgccaggccggacatccagatgacacagagccctagcagcctgtctgccagcgtgggagacagagtgaccatcacatgcaaggccagcgaccacatcaacaactggctggcctggtatcagcagaagcctggacaggcccctaagctgctgatctacggcgctaccacactggaaacaggcgtgcccagcagattttctggcagcggctctggcaccgactacaccctgacaatatccagcctccagcctgaggacttcgccacctactactgtcagcagagctggaacaccccttggacattcggccagggcaccaagctggaaatcaagagactcgaggacctgaagaacgtgttcccacctgaggtggccgtgttcgagcctagcgaggccgagatcagccacacccagaaagccaccctcgtgtgcctggctaccggcttctaccccgaccatgtggaactgtcttggtgggtcaacggcaaagaggtgcacagcggcgtgtgtaccgacccccagccactgaaagaacagcccgccctgaacgacagccggtactgcctgagcagcagactgagagtgtccgccaccttctggcagaacccccggaaccacttcagatgccaggtgcagttctacggcctgagcgagaacgacgagtggacccaggacagagccaagcccgtgacccagatcgtgtctgccgaagcctggggcagagccgattgcggctttaccagcgagagctaccagcagggcgtgctgagcgccaccatcctgtacgagatcctgctgggcaaggccaccctgtacgccgtgctggtgtctgccctggtgctgatggctatggtcaagcggaaggacagccggggaagggccaagcgatctggatctggagcaacaaacttctcactactcaaacaagcaggtgacgtggaggagaatcccgggcctactagtgccaccatggactggatttggcgcatccttttccttgtcggcgctgctaccggcgcccattccgggcccgccagaagcgaggacagatacagaaaccgtactggatccggcggcggaggatctggcggaggcggatctgggggcggaggctctttcgaacaagttcagcttcaacagcctggcgctgagctggtcaaacctggcgcttctgtgaagatgagctgcaaagccagcggctacgccttcagcagctactggatcaactggatgaagcagaaacccggccagggactcgaatggatcggccaaatctatcccggcgacggcgacaccaactacaacggcaagttcaagggcagagccacactgaccgccgatacctctagcagcacagcctacatgcagctgagcagcctgaccagcgaagatagcgccgtgtacttctgtgcccggtccatcacaacagtcgtgggctgcgctatggactattggggccagggaacaagcgtgaccgtgtctagtacgcgtatccagaaccctgatcctgccgtgtaccagctgcgggatagcaagagcagcgacaagagcgtgtgtctgttcaccgacttcgacagccagaccaacgtgtcccagagcaaggactccgacgtgtacatcaccgataagtgcgtgctggacatgcggagcatggacttcaagagcaactccgccgtggcctggtccaacaagtccgatttcgcctgcgccaacgccttcaacaacagcattatccccgaggacacattcttcccaagccccgagagcagctgcgacgtgaagctggtggaaaagagcttcgagacagacaccaacctgaacttccagaacctgagcgtgatcggcttcagaatcctgctgctgaaagtggccggctttaacctgctgatgaccctgcggctgtggtccagccgcgccaagagaagcggatctggcgtgaagcagaccctgaatttcgacctgctgaagctggctggcgacgtggaatccaacccaggcccttctagaggccatatgaccgagtacaagcccacggtgcgcctcgccacccgcgacgacgtccccagggccgtacgcaccctcgccgccgcgttcgccgactaccccgccacgcgccacaccgtcgatccggaccgccacatcgagcgggtcaccgagctgcaagaactcttcctcacgcgcgtcgggctcgacatcggcaaggtgtgggtcgcggacgacggcgccgcggtggcggtctggaccacgccggagagcgtcgaagcgggggcggtgttcgccgagatcggcccgcgcatggccgagttgagcggttcccggctggccgcgcagcaacagatggaaggcctcctggcgccgcaccggcccaaggagcccgcgtggttcctggccaccgtcggcgtctcgcccgaccaccagggcaagggtctgggcagcgccgtcgtgctccccggagtggaggcggccgagcgcgccggggtgcccgccttcctggagacctccgcgccccgcaacctccccttctacgagcggctcggcttcaccgtcaccgccgacgtcgaggtgcccgaaggaccgcgcacctggtgcatgacccgcaagcccggtgcctga

SEQ ID NO: 4917 - DNA, 2169 bp, synthetic construct
  source 1..2169: mol_type = other DNA
atggccttaccagtgaccgccttgctcctgccgctggccttgctgctccacgccgccaggccggacatccagatgacacagagccctagcagcctgtctgccagcgtgggagacagagtgaccatcacatgcaaggccagcgaccacatcaacaactggctggcctggtatcagcagaagcctggacaggcccctaagctgctgatctacggcgctaccacactggaaacaggcgtgcccagcagattttctggcagcggctctggcaccgactacaccctgacaatatccagcctccagcctgaggacttcgccacctactactgtcagcagagctggaacaccccttggacattcggccagggcaccaagctggaaatcaagagactcgagggacagcctaaggccaatcctaccgtgacactgttccctccaagcagcgaagaactccaggccaacaaggccacacttgtgtgcctgatctccgacttctaccctggggctgtgacagtggcttggaaggccgatggatctcctgtgaaagccggcgtggaaaccaccaagccatccaagcagagcaacaacaaatacgccgccagctcctacctgagcctgacacctgagcagtggaagtcccacagatcctacagctgccaagtgacccacgaaggcagcaccgtggaaaagacagtggcccctacagagtgcagcggatcccagagcttcggcctgctggaccccaagctgtgctacctgctggatggcatcctgttcatctacggcgtgatcctgaccgccctgttcctgagagtgaagttcagcagaagcgccgacgcccctgcctaccagcagggacagaaccaactgtacaacgagctgaacctgggcagacgggaagagtacgacgtgctggacaagcggagaggcagggaccctgagatgggcggaaagccccggagaaagaacccccaggaaggactgtataacgaactccagaaagacaagatggccgaagcctacagcgagatcggcatgaagggcgagcggagaagaggcaagggccacgatggcctgtaccagggcctgagcaccgccaccaaggacacctatgacgccctgcacatgcaggccctgcctccaagaagggccaagcgatctggatctggagcaacaaacttctcactactcaaacaagcaggtgacgtggaggagaatcccgggcctactagtatggactggatttggcgcatccttttccttgtcggcgctgctaccggcgcgcattccttcgaacaagttcagcttcaacagcctggcgctgagctggtcaaacctggcgcttctgtgaagatgagctgcaaagccagcggctacgccttcagcagctactggatcaactggatgaagcagaaacccggccagggactcgaatggatcggccaaatctatcccggcgacggcgacaccaactacaacggcaagttcaagggcagagccacactgaccgccgatacctctagcagcacagcctacatgcagctgagcagcctgaccagcgaagatagcgccgtgtacttctgtgcccggtccatcacaacagtcgtgggctgcgctatggactattggggccagggaacaagcgtgaccgtgtctagtacgcgtatccagaaccctgatcctgccgtgtaccagctgcgggatagcaagagcagcgacaagagcgtgtgtctgttcaccgacttcgacagccagaccaacgtgtcccagagcaaggactccgacgtgtacatcaccgataagaccgtgctggacatgcggagcatggacttcaagagcaactccgccgtggcctggtccaacaagtccgatttcgcctgcgccaacgccttcaacaacagcattatccccgaggacacattcttcccaagccccgagagcagctgcggtacccagagttttgggttgttggaccctaaattgtgctatctgttggacggaatcctgttcatttacggagtgatcctgaccgcattgttcctgaagagaggccggaagaagctgctgtacatcttcaagcagcctttcatgcggcccgtgcagaccacccaggaagaggacggctgctcctgccggttccccgaggaagaagaaggcggctgcgagctgtaa

SEQ ID NO: 4918 - DNA, 2925 bp, synthetic construct
  source 1..2925: mol_type = other DNA
atggccttaccagtgaccgccttgctcctgccgctggccttgctgctccacgccgccaggccgagctacgtgctgacacagcctccatccgtgtctgtggctccaggacagaccgccagaatcacatgcggcggcaacaacatcggcggcaagagcgtgcactggtatcagcagccacctggacaggctccagtggtggtggtgtacgacgacagcgatagacctagcggcatccccgagagattcagcggcagcaattccggcaataccgccacactgaccatcagcagagtggaagctggcgacgaggccgtgtactactgccaagtgtgggacagcagcagcgatcacgtggtgtttggcggcggaacaaagctgacagtgcttctcgaggacctgaagaacgtgttcccacctgaggtggccgtgttcgagcctagcgaggccgagatcagccacacccagaaagccaccctcgtgtgcctggctaccggcttctaccccgaccatgtggaactgtcttggtgggtcaacggcaaagaggtgcacagcggcgtgtctaccgacccccagccactgaaagaacagcccgccctgaacgacagccggtactgcctgagcagcagactgagagtgtccgccaccttctggcagaacccccggaaccacttcagatgccaggtgcagttctacggcctgagcgagaacgacgagtggacccaggacagagccaagcccgtgacccagatcgtgtctgccgaagcctggggcagagccgattgcggatcccagagcttcggcctgctggaccccaagctgtgctacctgctggatggcatcctgttcatctacggcgtgatcctgaccgccctgttcctgagagtgaagttcagcagaagcgccgacgcccctgcctaccagcagggacagaaccaactgtacaacgagctgaacctgggcagacgggaagagtacgacgtgctggacaagcggagaggcagggaccctgagatgggcggaaagccccggagaaagaacccccaggaaggactgtataacgaactccagaaagacaagatggccgaagcctacagcgagatcggcatgaagggcgagcggagaagaggcaagggccacgatggcctgtaccagggcctgagcaccgccaccaaggacacctatgacgccctgcacatgcaggccctgcctccaagaagggccaagcgatctggatctggagcaacaaacttctcactactcaaacaagcaggtgacgtggaggagaatcccgggcctactagtatggactggatttggcgcatccttttccttgtcggcgctgctaccggcgcgcattccttcgaacaactccagctgcaagagtctggccctggcctggtcaagcctagcgaaacactgagcctgacctgtaccgtgtctggcggctctatcagctccagcagctatttctggggctggatcagacaacctcctggcaaaggactggaatggatcggctccatctactacagcggcatcacctactacaaccccagcctgaagtccagagtgaccatctccgtggacaccagcaagaaccagttctccctgaagctgagcagcgtgacagccgccgataccgccgtgtattattgtgccagacatgacggcgctgtggccggcctgtttgattattggggacagggcaccctggtcaccgtgtcatctgctacgcgtatccagaaccctgatcctgccgtgtaccagctgcgggatagcaagagcagcgacaagagcgtgtgtctgttcaccgacttcgacagccagaccaacgtgtcccagagcaaggactccgacgtgtacatcaccgataagaccgtgctggacatgcggagcatggacttcaagagcaactccgccgtggcctggtccaacaagtccgatttcgcctgcgccaacgccttcaacaacagcattatccccgaggacacattcttcccaagccccgagagcagctgcggtaccatcactcaaggtttggcagtgtcaaccatctcatcattctttccacctggctaccaagtgtccttctgcctggtcatggtgctgctgttcgccgtggataccggcctgtacttcagcgtcaagaccaacatccggtccagcaccagagactggaaggaccacaagttcaagtggcggaaggaccctcaggacaagaagagaggccggaagaagctgctgtacatcttcaagcagcctttcatgcggcccgtgcagaccacccaggaagaggacggctgctcctgccggttccccgaggaagaagaaggcggctgcgagctgcgcgccaagagaagcggatctggcgtgaagcagaccctgaatttcgacctgctgaagctggctggcgacgtggaatccaacccaggcccttctagaatggccctgcctgtgacagctctgctgctgcctctggcactgctgctgcacgccgccagacctgcaagaagtgaagatcgctacaggaaccctaaggggtcaggaggaagcgaacttcctacacagggcaccttcagcaacgtgtccaccaatgtgtccccagccaagcctaccaccaccgcctgcgcacgcagcgaggacaggtataggaaccccaaaggaagtggcggatctcctgctcctagacctcctacaccagctcctacaatcgccagccagcctctgtctctcagacccgaagcctgtagacctgctgctggcggagctgtgcataccagaggactggatttcgcctgcgacatctacatctgggctcctctggctggcacatgtggcgttctgctgctgagcctggtcatcaccctgtactgcaaccaccggaacaggcggagagtgtgcaagtgccctagacctgtggtttaa

SEQ ID NO: 4919 - DNA, 1875 bp, synthetic construct
  source 1..1875: mol_type = other DNA
atggccttaccagtgaccgccttgctcctgccgctggccttgctgctccacgccgccaggccggacgacatccagttgacccagtcccccagctcactcagcgccagtgtgggggaccgggtgaccattacctgtaaagccagtcagagtgtggactatgagggggatagcttcctgaattggtatcagcagaagcctggcaaagccccaaagctgctgatctacgctgcatctaatctggagtcaggcgtgccttctaggttctccggtagtgggtctgggaccgatttcacattgaccatttcatccctccaacccgaggatttcgctacatattactgtcagcagtccaatgaggaccctctcacctttggccagggcaccaaagttgaaattaagagactcgaggacctgaagaacgtgttcccacctgaggtggccgtgttcgagcctagcgaggccgagatcagccacacccagaaagccaccctcgtgtgcctggctaccggcttctaccccgaccatgtggaactgtcttggtgggtcaacggcaaagaggtgcacagcggcgtgtgtaccgacccccagccactgaaagaacagcccgccctgaacgacagccggtactgcctgagcagcagactgagagtgtccgccaccttctggcagaacccccggaaccacttcagatgccaggtgcagttctacggcctgagcgagaacgacgagtggacccaggacagagccaagcccgtgacccagatcgtgtctgccgaagcctggggcagagccgattgcggctttaccagcgagagctaccagcagggcgtgctgagcgcctactacatgtacttgttgctgctgctgaagtccgtggtgtacttcgccatcatcacatgctgcctgctgcggagaaccgccttctgctgcaacggcgagaagtctagggccaagcgatctggatctggagcaacaaacttctcactactcaaacaagcaggtgacgtggaggagaatcccgggcctactagtatggactggatttggcgcatccttttccttgtcggcgctgctaccggcgcgcattccttcgaagaagtccaacttgtggagtctggagggggcctggtgcagcccggcggctctctcagactgtcttgtgcggcaagcggctacaccttcagctcttactggatagaatgggtgaggcaggcacctggaaagggactggagtggattggagagattctgccaggagggggagatacaaattacaatgaaatcttcaaggggcgggccaccttttcagcggataccagcaagaatacagcttacctgcagatgaatagcctccgggcagaagataccgctgtttattattgcacgagacgggtgccaataagactggactattgggggcaagggactcttgtcaccgtcagttcaacgcgtatccagaaccctgatcctgccgtgtaccagctgcgggatagcaagagcagcgacaagagcgtgtgtctgttcaccgacttcgacagccagaccaacgtgtcccagagcaaggactccgacgtgtacatcaccgataagtgcgtgctggacatgcggagcatggacttcaagagcaactccgccgtggcctggtccaacaagtccgatttcgcctgcgccaacgccttcaacaacagcattatccccgaggacacattcttcccaagccccgagagcagctgcgacgtgaagctggtggaaaagagcttcgagacagacaccaacctgaacttccagaacctgagcgtgatcggcttcagaatcctgctgctgaaagtggccggctttaacctgctgatgaccctgcggctgtggtccagctaa

SEQ ID NO: 4920 - DNA, 2235 bp, synthetic construct
  source 1..2235: mol_type = other DNA
atggccttaccagtgaccgccttgctcctgccgctggccttgctgctccacgccgccaggccggacatccagatgacacagagccctagcagcctgtctgccagcgtgggagacagagtgaccatcacatgcaaggccagcgaccacatcaacaactggctggcctggtatcagcagaagcctggacaggcccctaagctgctgatctacggcgctaccacactggaaacaggcgtgcccagcagattttctggcagcggctctggcaccgactacaccctgacaatatccagcctccagcctgaggacttcgccacctactactgtcagcagagctggaacaccccttggacattcggccagggcaccaagctggaaatcaagagaggcggaggcggaagtggaggcggaggatctggcggcggaggctctcaagttcagcttcaacagcctggcgctgagctggtcaaacctggcgcttctgtgaagatgagctgcaaagccagcggctacgccttcagcagctactggatcaactggatgaagcagaaacccggccagggactcgaatggatcggccaaatctatcccggcgacggcgacaccaactacaacggcaagttcaagggcagagccacactgaccgccgatacctctagcagcacagcctacatgcagctgagcagcctgaccagcgaagatagcgccgtgtacttctgtgcccggtccatcacaacagtcgtgggctgcgctatggactattggggccagggaacaagcgtgaccgtgtctagtacgcgtaccacgacgccagcgccgcgaccaccaacaccggcgcccaccatcgcgtcgcagcccctgtccctgcgcccagaggcgtgccggccagcggcggggggcgcagtgcacacgagggggctggacttcgcctgtgacatctacatctgggcgcccttggccgggacttgtggggtccttctcctgtcactggttatcaccctttactgcaaacggggcagaaagaaactcctgtatatattcaaacaaccatttatgagaccagtacaaactactcaagaggaagatggctgtagctgccgatttccagaagaagaagaaggaggatgtgaactgagagtgaagttcagcaggagcgcagacgcccccgcgtaccagcagggccagaaccagctctataacgagctgaatctaggacgaagagaggagtacgatgttttggacaagagacgtggccgggaccctgagatggggggaaagccgagaaggaagaaccctcaggaaggcctgtacaatgaactgcagaaagataagatggcggaggcctacagtgagattgggatgaaaggcgagcgccggaggggcaaggggcacgatggcctttaccagggtctcagtacagccaccaaggacacctacgacgcccttcacatgcaggccctgccccctcgctctagagccaagcgatctggatctggagcaacaaacttctcactactcaaacaagcaggtgacgtggaggagaatcccgggcctgggatccacaccatgtaccggatgcagctgctgagctgtatcgccctgtctctggccctggtcacaaatagcgcaagaagtgaagatcgctacaggaaccctaaggggtcaggaggaagcaactgggttaacgtgatctccgacctgaagaagatcgaggacctgatccagtccatgcacatcgacgccacactgtacaccgagagcgacgtgcaccctagctgtaaagtgaccgccatgaagtgctttctgctggaactgcaagtgatctccctggaaagcggcgacgccagcatccacgacaccgtgaagaacctgattatcctggctaacaacagcctgagcagcaacggcaacgtgaccgagtccggctgtaaagagtgcgaggaactggaagagaagaatatcaaagagttcctccagagcttcgtgcacatcgtgcagatgttcatcaacaccagcaagatcgaagtgatgtaccctcctccttacctggacaacgagaagtccaacggcaccatcatccacgtgaagggcaagcacctgtgtccttctccactgttccccggacctagcaagcctttctgggtgctcgttgttgttggcggcgtgctggcctgttacagcctgctggttaccgtggccttcatcatcttttgggtccgaagcaagcggagctaa

SEQ ID NO: 4921 - DNA, 2079 bp, synthetic construct
  source 1..2079: mol_type = other DNA
atggccttaccagtgaccgccttgctcctgccgctggccttgctgctccacgccgccaggccggacatccagatgacacagagccctagcagcctgtctgccagcgtgggagacagagtgaccatcacatgcaaggccagcgaccacatcaacaactggctggcctggtatcagcagaagcctggacaggcccctaagctgctgatctacggcgctaccacactggaaacaggcgtgcccagcagattttctggcagcggctctggcaccgactacaccctgacaatatccagcctccagcctgaggacttcgccacctactactgtcagcagagctggaacaccccttggacattcggccagggcaccaagctggaaatcaagagaggcggaggcggaagtggaggcggaggatctggcggcggaggctctcaagttcagcttcaacagcctggcgctgagctggtcaaacctggcgcttctgtgaagatgagctgcaaagccagcggctacgccttcagcagctactggatcaactggatgaagcagaaacccggccagggactcgaatggatcggccaaatctatcccggcgacggcgacaccaactacaacggcaagttcaagggcagagccacactgaccgccgatacctctagcagcacagcctacatgcagctgagcagcctgaccagcgaagatagcgccgtgtacttctgtgcccggtccatcacaacagtcgtgggctgcgctatggactattggggccagggaacaagcgtgaccgtgtctagtacgcgtaccacgacgccagcgccgcgaccaccaacaccggcgcccaccatcgcgtcgcagcccctgtccctgcgcccagaggcgtgccggccagcggcggggggcgcagtgcacacgagggggctggacttcgcctgtgacatctacatctgggcgcccttggccgggacttgtggggtccttctcctgtcactggttatcaccctttactgcaaacggggcagaaagaaactcctgtatatattcaaacaaccatttatgagaccagtacaaactactcaagaggaagatggctgtagctgccgatttccagaagaagaagaaggaggatgtgaactgagagtgaagttcagcaggagcgcagacgcccccgcgtaccagcagggccagaaccagctctataacgagctgaatctaggacgaagagaggagtacgatgttttggacaagagacgtggccgggaccctgagatggggggaaagccgagaaggaagaaccctcaggaaggcctgtacaatgaactgcagaaagataagatggcggaggcctacagtgagattgggatgaaaggcgagcgccggaggggcaaggggcacgatggcctttaccagggtctcagtacagccaccaaggacacctacgacgcccttcacatgcaggccctgccccctcgctctagagccaagcgatctggatctggagcaacaaacttctcactactcaaacaagcaggtgacgtggaggagaatcccgggcctgggatccacaccatgtaccggatgcagaccttcaagttctacatgcccaagaaggccaccgagctgaagcacctccagtgcctggaagaggaactgaagcccctggaagaagtgctgaatctggcccagagcaagaacttccacctgaggccaagggacctgatctccaacatcaacgtgatcgtgctggaactgaaaggcagcgagacaaccttcatgtgcgagtacgccgacgagacagctaccatcgtggaatttctgaatcggtggatcaccttctgccagagcatcatcagcaccctgacagccaagcctacaacaacccctgctcctagacctcctacaccagctcctacaatcgccagccagcctctgtctctcagacccgaagcctgtagaccagctgctggcggagctgtgcataccagaggactggatttcgcctgcgacatctacatctgggctcctctggctggcacatgtggcgttctgctgctgtccctggtcatcaccctgtactgttaa

SEQ ID NO: 4922 - DNA, 2079 bp, synthetic construct
  source 1..2079: mol_type = other DNA
atggccttaccagtgaccgccttgctcctgccgctggccttgctgctccacgccgccaggccggacatccagatgacacagagccctagcagcctgtctgccagcgtgggagacagagtgaccatcacatgcaaggccagcgaccacatcaacaactggctggcctggtatcagcagaagcctggacaggcccctaagctgctgatctacggcgctaccacactggaaacaggcgtgcccagcagattttctggcagcggctctggcaccgactacaccctgacaatatccagcctccagcctgaggacttcgccacctactactgtcagcagagctggaacaccccttggacattcggccagggcaccaagctggaaatcaagagaggcggaggcggaagtggaggcggaggatctggcggcggaggctctcaagttcagcttcaacagcctggcgctgagctggtcaaacctggcgcttctgtgaagatgagctgcaaagccagcggctacgccttcagcagctactggatcaactggatgaagcagaaacccggccagggactcgaatggatcggccaaatctatcccggcgacggcgacaccaactacaacggcaagttcaagggcagagccacactgaccgccgatacctctagcagcacagcctacatgcagctgagcagcctgaccagcgaagatagcgccgtgtacttctgtgcccggtccatcacaacagtcgtgggctgcgctatggactattggggccagggaacaagcgtgaccgtgtctagtacgcgtaccacgacgccagcgccgcgaccaccaacaccggcgcccaccatcgcgtcgcagcccctgtccctgcgcccagaggcgtgccggccagcggcggggggcgcagtgcacacgagggggctggacttcgcctgtgacatctacatctgggcgcccttggccgggacttgtggggtccttctcctgtcactggttatcaccctttactgcaaacggggcagaaagaaactcctgtatatattcaaacaaccatttatgagaccagtacaaactactcaagaggaagatggctgtagctgccgatttccagaagaagaagaaggaggatgtgaactgagagtgaagttcagcaggagcgcagacgcccccgcgtaccagcagggccagaaccagctctataacgagctgaatctaggacgaagagaggagtacgatgttttggacaagagacgtggccgggaccctgagatggggggaaagccgagaaggaagaaccctcaggaaggcctgtacaatgaactgcagaaagataagatggcggaggcctacagtgagattgggatgaaaggcgagcgccggaggggcaaggggcacgatggcctttaccagggtctcagtacagccaccaaggacacctacgacgcccttcacatgcaggccctgccccctcgctctagagccaagcgatctggatctggagcaacaaacttctcactactcaaacaagcaggtgacgtggaggagaatcccgggcctgggatccacaccatgtaccggatgctgaccttcaagttctacatgcccaagaaggccaccgagctgaagcacctccagtgcctggaagaggaactgaagcccctggaagaagtgctgaatctggcccagagcaagaacttccacctgaggccaagggacctgatctccaacatcaacgtgatcgtgctggaactgaaaggcagcgagacaaccttcatgtgcgagtacgccgacgagacagctaccatcgtggaatttctgaatcggtggatcaccttctgccagagcatcatcagcaccctgacagccaagcctacaacaacccctgctcctagacctcctacaccagctcctacaatcgccagccagcctctgtctctcagacccgaagcctgtagaccagctgctggcggagctgtgcataccagaggactggatttcgcctgcgacatctacatctgggctcctctggctggcacatgtggcgttctgctgctgtccctggtcatcaccctgtactgttaa

SEQ ID NO: 4923 - DNA, 1848 bp, synthetic construct; identical to SEQ ID NO: 4903
  source 1..1848: mol_type = other DNA

SEQ ID NO: 4924 - DNA, 669 bp, synthetic construct
  source 1..669: mol_type = other DNA
atgtaccggatgcagctgctgagctgtatcgccctgtctctggccctggtcacaaatagcgcaagaagtgaagatcgctacaggaaccctaaggggtcaggaggaagcaactgggttaacgtgatctccgacctgaagaagatcgaggacctgatccagtccatgcacatcgacgccacactgtacaccgagagcgacgtgcaccctagctgtaaagtgaccgccatgaagtgctttctgctggaactgcaagtgatctccctggaaagcggcgacgccagcatccacgacaccgtgaagaacctgattatcctggctaacaacagcctgagcagcaacggcaacgtgaccgagtccggctgtaaagagtgcgaggaactggaagagaagaatatcaaagagttcctccagagcttcgtgcacatcgtgcagatgttcatcaacaccagcaagatcgaagtgatgtaccctcctccttacctggacaacgagaagtccaacggcaccatcatccacgtgaagggcaagcacctgtgtccttctccactgttccccggacctagcaagcctttctgggtgctcgttgttgttggcggcgtgctggcctgttacagcctgctggttaccgtggccttcatcatcttttgggtccgaagcaagcggagctaa

SEQ ID NO: 4925 - DNA, 1848 bp, synthetic construct; identical to SEQ ID NO: 4903
  source 1..1848: mol_type = other DNA

SEQ ID NO: 4926 - DNA, 726 bp, synthetic construct
  source 1..726: mol_type = other DNA
atgtaccggatgcagctgctgagctgtatcgccctgtctctggccctggtcacaaatagcgcccctaccagcagcagcaccaagaaaacccagctgcaactggaacacctcctgctggacctccagatgatcctgaacggcatcaacaactacaagaaccccaagctgacccggatgctgaccttcaagttctacatgcccaagaaggccaccgagctgaagcacctccagtgcctggaagaggaactgaagcccctggaagaagtgctgaatctggcccagagcaagaacttccacctgaggccaagggacctgatctccaacatcaacgtgatcgtgctggaactgaaaggcagcgagacaaccttcatgtgcgagtacgccgacgagacagctaccatcgtggaatttctgaatcggtggatcaccttctgccagagcatcatcagcaccctgacagcaagaagtgaagaccgttacaggaaccccaaaggcagcggcggcagcgccaagcctacaacaacccctgctcctagacctcctacaccagctcctacaatcgccagccagcctctgtctctcagacccgaagcctgtagaccagctgctggcggagctgtgcataccagaggactggatttcgcctgcgacatctacatctgggctcctctggctggcacatgtggcgttctgctgctgtccctggtcatcaccctgtactgttaa

SEQ ID NO: 4927 - DNA, 1455 bp, synthetic construct
  source 1..1455: mol_type = other DNA
atggccttaccagtgaccgccttgctcctgccgctggccttgctgctccacgccgccaggccggacatccagatgacacagagccctagcagcctgtctgccagcgtgggagacagagtgaccatcacatgcaaggccagccaggatgtgggcacagccgtggattggtatcagcagaagcctggcaaggcccctaagctgctgatctactgggccagcacaagacacacaggcgtgcccagcagattttctggcagcggctctggcaccgacttcaccctgacaatatccagcctccagcctgaggacttcgccacctactactgccagcagtacaacagctaccctctgaccttcggccagggcaccaaggtggaaatcaaaagaggcggaggcggatctggcggcggaggtagcggtggcggaggatctgaagtgcagctggttgaatcaggtggcggcctggttcaacctggcggatctctgagactgagctgtgccgccagcggctacacctttaccgagtacacaatccactgggtccgacaggcccctggcaaaggacttgagtgggtcgccaacatcaaccccaacaatggcggcaccacctacaaccagaagttcgaggacagattcaccatcagccgggacaacagcaagaacaccctgtacctccagatgaactccctgagagccgaggacaccgccgtgtactattgtgccagaggctggaacttcgactactggggccagggaacactggtcaccgttagctctacgcgtaccacgacgccagcgccgcgaccaccaacaccggcgcccaccatcgcgtcgcagcccctgtccctgcgcccagaggcgtgccggccagcggcggggggcgcagtgcacacgagggggctggacttcgcctgtgacatctacatctgggcgcccttggccgggacttgtggggtccttctcctgtcactggttatcaccctttactgcaaacggggcagaaagaaactcctgtatatattcaaacaaccatttatgagaccagtacaaactactcaagaggaagatggctgtagctgccgatttccagaagaagaagaaggaggatgtgaactgagagtgaagttcagcaggagcgcagacgcccccgcgtaccagcagggccagaaccagctctataacgagctgaatctaggacgaagagaggagtacgatgttttggacaagagacgtggccgggaccctgagatggggggaaagccgagaaggaagaaccctcaggaaggcctgtacaatgaactgcagaaagataagatggcggaggcctacagtgagattgggatgaaaggcgagcgccggaggggcaaggggcacgatggcctttaccagggtctcagtacagccaccaaggacacctacgacgcccttcacatgcaggccctgccccctcgctaa

SEQ ID NO: 4928 - DNA, 669 bp, synthetic construct; identical to SEQ ID NO: 4924
  source 1..669: mol_type = other DNA

SEQ ID NO: 4929 - DNA, 2358 bp, synthetic construct
  source 1..2358: mol_type = other DNA
atggccttaccagtgaccgccttgctcctgccgctggccttgctgctccacgccgccaggccggacatccagatgacacagagccctagcagcctgtctgccagcgtgggagacagagtgaccatcacatgcaaggccagcgaccacatcaacaactggctggcctggtatcagcagaagcctggacaggcccctaagctgctgatctacggcgctaccacactggaaacaggcgtgcccagcagattttctggcagcggctctggcaccgactacaccctgacaatatccagcctccagcctgaggacttcgccacctactactgtcagcagagctggaacaccccttggacattcggccagggcaccaagctggaaatcaagagaggcggaggcggaagtggaggcggaggatctggcggcggaggctctcaagttcagcttcaacagcctggcgctgagctggtcaaacctggcgcttctgtgaagatgagctgcaaagccagcggctacgccttcagcagctactggatcaactggatgaagcagaaacccggccagggactcgaatggatcggccaaatctatcccggcgacggcgacaccaactacaacggcaagttcaagggcagagccacactgaccgccgatacctctagcagcacagcctacatgcagctgagcagcctgaccagcgaagatagcgccgtgtacttctgtgcccggtccatcacaacagtcgtgggctgcgctatggactattggggccagggaacaagcgtgaccgtgtctagtacgcgtaccacgacgccagcgccgcgaccaccaacaccggcgcccaccatcgcgtcgcagcccctgtccctgcgcccagaggcgtgccggccagcggcggggggcgcagtgcacacgagggggctggacttcgcctgtgacatctacatctgggcgcccttggccgggacttgtggggtccttctcctgtcactggttatcaccctttactgcaaacggggcagaaagaaactcctgtatatattcaaacaaccatttatgagaccagtacaaactactcaagaggaagatggctgtagctgccgatttccagaagaagaagaaggaggatgtgaactgagagtgaagttcagcaggagcgcagacgcccccgcgtaccagcagggccagaaccagctctataacgagctgaatctaggacgaagagaggagtacgatgttttggacaagagacgtggccgggaccctgagatggggggaaagccgagaaggaagaaccctcaggaaggcctgtacaatgaactgcagaaagataagatggcggaggcctacagtgagattgggatgaaaggcgagcgccggaggggcaaggggcacgatggcctttaccagggtctcagtacagccaccaaggacacctacgacgcccttcacatgcaggccctgccccctcgctctagagccaagcgatctggatctggagcaacaaacttctcactactcaaacaagcaggtgacgtggaggagaatcccgggcctgggatccacaccatgtaccggatgcagctgctgagctgtatcgccctgtctctggccctggtcacaaatagcaactgggttaacgtgatctccgacctgaagaagatcgaggacctgatccagtccatgcacatcgacgccacactgtacaccgagagcgacgtgcaccctagctgtaaagtgaccgccatgaagtgctttctgctggaactgcaagtgatctccctggaaagcggcgacgccagcatccacgacaccgtggaaaacctgattatcctggctaacaacagcctgagcagcaacggcaacgtgaccgagtccggctgtaaagagtgcgaggaactggaagagaagaatatcaaagagttcctccagagcttcgtgcacatcgtgcagatgttcatcaacaccagcgcaagaagtgaagaccgttacaggaaccccaaaggcagcggcggcagcgaacttcctacacagggcaccttcagcaacgtgtccaccaatgtgtccccagccaagcctaccaccacagcctgtgccagatctgaggaccggtatcggaaccctaaaggctctggcggctctaagatcgaagtgatgtaccctcctccttacctggacaacgagaagtccaacggcaccatcatccacgtgaagggcaagcacctgtgtccttctccactgttccccggacctagcaagcctttctgggtgctcgttgttgttggcggcgtgctggcctgttacagcctgctggttaccgtggccttcatcatcttttgggtccgaagcaagcggagctaa

SEQ ID NO: 4930 - DNA, 2235 bp, synthetic construct
  source 1..2235: mol_type = other DNA
atggccttaccagtgaccgccttgctcctgccgctggccttgctgctccacgccgccaggccggacatccagatgacacagagccctagcagcctgtctgccagcgtgggagacagagtgaccatcacatgcaaggccagcgaccacatcaacaactggctggcctggtatcagcagaagcctggacaggcccctaagctgctgatctacggcgctaccacactggaaacaggcgtgcccagcagattttctggcagcggctctggcaccgactacaccctgacaatatccagcctccagcctgaggacttcgccacctactactgtcagcagagctggaacaccccttggacattcggccagggcaccaagctggaaatcaagagaggcggaggcggaagtggaggcggaggatctggcggcggaggctctcaagttcagcttcaacagcctggcgctgagctggtcaaacctggcgcttctgtgaagatgagctgcaaagccagcggctacgccttcagcagctactggatcaactggatgaagcagaaacccggccagggactcgaatggatcggccaaatctatcccggcgacggcgacaccaactacaacggcaagttcaagggcagagccacactgaccgccgatacctctagcagcacagcctacatgcagctgagcagcctgaccagcgaagatagcgccgtgtacttctgtgcccggtccatcacaacagtcgtgggctgcgctatggactattggggccagggaacaagcgtgaccgtgtctagtacgcgtaccacgacgccagcgccgcgaccaccaacaccggcgcccaccatcgcgtcgcagcccctgtccctgcgcccagaggcgtgccggccagcggcggggggcgcagtgcacacgagggggctggacttcgcctgtgacatctacatctgggcgcccttggccgggacttgtggggtccttctcctgtcactggttatcaccctttactgcaaacggggcagaaagaaactcctgtatatattcaaacaaccatttatgagaccagtacaaactactcaagaggaagatggctgtagctgccgatttccagaagaagaagaaggaggatgtgaactgagagtgaagttcagcaggagcgcagacgcccccgcgtaccagcagggccagaaccagctctataacgagctgaatctaggacgaagagaggagtacgatgttttggacaagagacgtggccgggaccctgagatggggggaaagccgagaaggaagaaccctcaggaaggcctgtacaatgaactgcagaaagataagatggcggaggcctacagtgagattgggatgaaaggcgagcgccggaggggcaaggggcacgatggcctttaccagggtctcagtacagccaccaaggacacctacgacgcccttcacatgcaggccctgccccctcgctctagagccaagcgatctggatctggagcaacaaacttctcactactcaaacaagcaggtgacgtggaggagaatcccgggcctgggatccacaccatgtaccggatgcagctgctgagctgtatcgccctgtctctggccctggtcacaaatagcaactgggttaacgtgatctccgacctgaagaagatcgaggacctgatccagtccatgcacatcgacgccacactgtacaccgagagcgacgtgcaccctagctgtaaagtgaccgccatgaagtgctttctgctggaactgcaagtgatctccctggaaagcggcgacgccagcatccacgacaccgtggaaaacctgattatcctggctaacaacagcctgagcagcaacggcaacgtgaccgagtccggctgtaaagagtgcgaggaactggaagagaagaatatcaaagagttcctccagagcttcgtgcacatcgtgcagatgttcatcaacaccagcgcaagaagtgaagaccgttacaggaaccccaaaggcagcggcggcagcaagatcgaagtgatgtaccctcctccttacctggacaacgagaagtccaacggcaccatcatccacgtgaagggcaagcacctgtgtccttctccactgttccccggacctagcaagcctttctgggtgctcgttgttgttggcggcgtgctggcctgttacagcctgctggttaccgtggccttcatcatcttttgggtccgaagcaagcggagctaa

SEQ ID NO: 4931 - DNA, 1455 bp, synthetic construct; identical to SEQ ID NO: 4927
  source 1..1455: mol_type = other DNA

SEQ ID NO: 4932 - DNA, 792 bp, synthetic construct
  source 1..792: mol_type = other DNA
atgtaccggatgcagctgctgagctgtatcgccctgtctctggccctggtcacaaatagcaactgggttaacgtgatctccgacctgaagaagatcgaggacctgatccagtccatgcacatcgacgccacactgtacaccgagagcgacgtgcaccctagctgtaaagtgaccgccatgaagtgctttctgctggaactgcaagtgatctccctggaaagcggcgacgccagcatccacgacaccgtggaaaacctgattatcctggctaacaacagcctgagcagcaacggcaacgtgaccgagtccggctgtaaagagtgcgaggaactggaagagaagaatatcaaagagttcctccagagcttcgtgcacatcgtgcagatgttcatcaacaccagcgcaagaagtgaagaccgttacaggaaccccaaaggcagcggcggcagcgaacttcctacacagggcaccttcagcaacgtgtccaccaatgtgtccccagccaagcctaccaccacagcctgtgccagatctgaggaccggtatcggaaccctaaaggctctggcggctctaagatcgaagtgatgtaccctcctccttacctggacaacgagaagtccaacggcaccatcatccacgtgaagggcaagcacctgtgtccttctccactgttccccggacctagcaagcctttctgggtgctcgttgttgttggcggcgtgctggcctgttacagcctgctggttaccgtggccttcatcatcttttgggtccgaagcaagcggagctaa

SEQ ID NO: 4933 - DNA, 1848 bp, synthetic construct; identical to SEQ ID NO: 4903
  source 1..1848: mol_type = other DNA

SEQ ID NO: 4934 - DNA, 792 bp, synthetic construct; identical to SEQ ID NO: 4932
  source 1..792: mol_type = other DNA

SEQ ID NO: 4935 - DNA, 1455 bp, synthetic construct; identical to SEQ ID NO: 4927
  source 1..1455: mol_type = other DNA

SEQ ID NO: 4936 - DNA, 669 bp, synthetic construct
  source 1..669: mol_type = other DNA
atgtaccggatgcagctgctgagctgtatcgccctgtctctggccctggtcacaaatagcaactgggttaacgtgatctccgacctgaagaagatcgaggacctgatccagtccatgcacatcgacgccacactgtacaccgagagcgacgtgcaccctagctgtaaagtgaccgccatgaagtgctttctgctggaactgcaagtgatctccctggaaagcggcgacgccagcatccacgacaccgtggaaaacctgattatcctggctaacaacagcctgagcagcaacggcaacgtgaccgagtccggctgtaaagagtgcgaggaactggaagagaagaatatcaaagagttcctccagagcttcgtgcacatcgtgcagatgttcatcaacaccagcgcaagaagtgaagaccgttacaggaaccccaaaggcagcggcggcagcaagatcgaagtgatgtaccctcctccttacctggacaacgagaagtccaacggcaccatcatccacgtgaagggcaagcacctgtgtccttctccactgttccccggacctagcaagcctttctgggtgctcgttgttgttggcggcgtgctggcctgttacagcctgctggttaccgtggccttcatcatcttttgggtccgaagcaagcggagctaa

SEQ ID NO: 4937 - DNA, 1848 bp, synthetic construct; identical to SEQ ID NO: 4903
  source 1..1848: mol_type = other DNA

SEQ ID NO: 4938 - DNA, 3171 bp, synthetic construct
  source 1..3171: mol_type = other DNA
atggccttaccagtgaccgccttgctcctgccgctggccttgctgctccacgccgccaggccggacatccagatgacacagagccctagcagcctgtctgccagcgtgggagacagagtgaccatcacatgcaaggccagccaggatgtgggcacagccgtggattggtatcagcagaagcctggcaaggcccctaagctgctgatctactgggccagcacaagacacacaggcgtgcccagcagattttctggcagcggctctggcaccgacttcaccctgacaatatccagcctccagcctgaggacttcgccacctactactgccagcagtacaacagctaccctctgaccttcggccagggcaccaaggtggaaatcaaaagactcgaggacctgaagaacgtgttcccacctgaggtggccgtgttcgagcctagcgaggccgagatcagccacacccagaaagccaccctcgtgtgcctggctaccggcttctaccccgaccatgtggaactgtcttggtgggtcaacggcaaagaggtgcacagcggcgtgtctaccgacccccagccactgaaagaacagcccgccctgaacgacagccggtactgcctgagcagcagactgagagtgtccgccaccttctggcagaacccccggaaccacttcagatgccaggtgcagttctacggcctgagcgagaacgacgagtggacccaggacagagccaagcccgtgacccagatcgtgtctgccgaagcctggggcagagccgattgcggatcccagagcttcggcctgctggaccccaagctgtgctacctgctggatggcatcctgttcatctacggcgtgatcctgaccgccctgttcctgagagtgaagttcagcagaagcgccgacgcccctgcctaccagcagggacagaaccaactgtacaacgagctgaacctgggcagacgggaagagtacgacgtgctggacaagcggagaggcagggaccctgagatgggcggaaagccccagcggagaaagaacccccaggaaggactgtataacgaactccagaaagacaagatggccgaagcctacagcgagatcggcatgaagggcgagcggagaagaggcaagggccacgatggcctgtaccagggcctgagcaccgccaccaaggacacctatgacgccctgcacatgcaggccctgcctccaagaagggccaagcgatctggatctggagcaacaaacttctcactactcaaacaagcaggtgacgtggaggagaatcccgggcctactagtatggactggatttggcgcatccttttccttgtcggcgctgctaccggcgcgcattccttcgaagtgcagctggttgaatcaggtggcggcctggttcaacctggcggatctctgagactgagctgtgccgccagcggctacacctttaccgagtacacaatccactgggtccgacaggcccctggcaaaggacttgagtgggtcgccaacatcaaccccaacaatggcggcaccacctacaaccagaagttcgaggacagattcaccatcagccgggacaacagcaagaacaccctgtacctccagatgaactccctgagagccgaggacaccgccgtgtactattgtgccagaggctggaacttcgactactggggccagggaacactggtcaccgttagctctacgcgtatccagaaccctgatcctgccgtgtaccagctgcgggatagcaagagcagcgacaagagcgtgtgtctgttcaccgacttcgacagccagaccaacgtgtcccagagcaaggactccgacgtgtacatcaccgataagaccgtgctggacatgcggagcatggacttcaagagcaactccgccgtggcctggtccaacaagtccgatttcgcctgcgccaacgccttcaacaacagcattatccccgaggacacattcttcccaagccccgagagcagctgcggtacccagagttttgggttgttggaccctaaattgtgctatctgttggacggaatcctgttcatttacggagtgatcctgaccgcattgttcctgcgggttaagttttccagatccgcagacgcacccgcttaccaacaagggcagaaccaactctacaatgaacttaatttggggcggagggaagagtacgacgttctggacaaaaggaggggacgagatcccgagatgggcggaaagcctcgaaggaagaatccgcaagaggggctttataacgaactccagaaagataaaatggcagaagcctatagtgagattgggatgaagggagaaaggaggaggggtaaaggtcacgatgggttgtaccaaggattgagcacagccactaaagatacctatgatgcgctccacatgcaggccctgccgccaagacgcgccaagagaagcggatctggcgtgaagcagaccctgaatttcgacctgctgaagctggctggcgacgtggaatccaacccaggcccttctagaatgagaatcagcaagccccacctgagatccatcagcatccagtgctacctgtgcctgctgctgaacagccactttctgacagaggccggcatccacgtgttcatcctgggctgtttttctgccggcctgcctaagaccgaggccaactgggttaacgtgatctccgacctgaagaagatcgaggacctgatccagtccatgcacatcgacgccacactgtacaccgagagcgacgtgcaccctagctgtaaagtgaccgccatgaagtgctttctgctggaactgcaagtgatctccctggaaagcggcgacgccagcatccacgacaccgtggaaaacctgattatcctggctaacaacagcctgagcagcaacggcaacgtgaccgagtccggctgtaaagagtgcgaggaactggaagagaagaatatcaaagagttcctccagagcttcgtgcacatcgtgcagatgttcatcaacaccagcgccagaagcgaggacagatacagaaaccccaagggcttcagcacactggcccagctgaaacagcggaacaccctgaaggacggcatcattatgatccagacactgctcatcatcctgtttattatcgtgcccatcttcctgctgctcgacaaggactaa

SEQ ID NO: 4939 - DNA, 3063 bp, synthetic construct
  source 1..3063: mol_type = other DNA
atggccttaccagtgaccgccttgctcctgccgctggccttgctgctccacgccgccaggccggacatccagatgacacagagccctagcagcctgtctgccagcgtgggagacagagtgaccatcacatgcaaggccagccaggatgtgggcacagccgtggattggtatcagcagaagcctggcaaggcccctaagctgctgatctactgggccagcacaagacacacaggcgtgcccagcagattttctggcagcggctctggcaccgacttcaccctgacaatatccagcctccagcctgaggacttcgccacctactactgccagcagtacaacagctaccctctgaccttcggccagggcaccaaggtggaaatcaaaagactcgaggacctgaagaacgtgttcccacctgaggtggccgtgttcgagcctagcgaggccgagatcagccacacccagaaagccaccctcgtgtgcctggctaccggcttctaccccgaccatgtggaactgtcttggtgggtcaacggcaaagaggtgcacagcggcgtgtctaccgacccccagccactgaaagaacagcccgccctgaacgacagccggtactgcctgagcagcagactgagagtgtccgccaccttctggcagaacccccggaaccacttcagatgccaggtgcagttctacggcctgagcgagaacgacgagtggacccaggacagagccaagcccgtgacccagatcgtgtctgccgaagcctggggcagagccgattgcggatcccagagcttcggcctgctggaccccaagctgtgctacctgctggatggcatcctgttcatctacggcgtgatcctgaccgccctgttcctgagagtgaagttcagcagaagcgccgacgcccctgcctaccagcagggacagaaccaactgtacaacgagctgaacctgggcagacgggaagagtacgacgtgctggacaagcggagaggcagggaccctgagatgggcggaaagccccggagaaagaacccccaggaaggactgtataacgaactccagaaagacaagatggccgaagcctacagcgagatcggcatgaagggcgagcggagaagaggcaagggccacgatggcctgtaccagggcctgagcaccgccaccaaggacacctatgacgccctgcacatgcaggccctgcctccaagaagggccaagcgatctggatctggagcaacaaacttctcactactcaaacaagcaggtgacgtggaggagaatcccgggcctactagtatggactggatttggcgcatccttttccttgtcggcgctgctaccggcgcgcattccttcgaagtgcagctggttgaatcaggtggcggcctggttcaacctggcggatctctgagactgagctgtgccgccagcggctacacctttaccgagtacacaatccactgggtccgacaggcccctggcaaaggacttgagtgggtcgccaacatcaaccccaacaatggcggcaccacctacaaccagaagttcgaggacagattcaccatcagccgggacaacagcaagaacaccctgtacctccagatgaactccctgagagccgaggacaccgccgtgtactattgtgccagaggctggaacttcgactactggggccagggaacactggtcaccgttagctctacgcgtatccagaaccctgatcctgccgtgtaccagctgcgggatagcaagagcagcgacaagagcgtgtgtctgttcaccgacttcgacagccagaccaacgtgtcccagagcaaggactccgacgtgtacatcaccgataagaccgtgctggacatgcggagcatggacttcaagagcaactccgccgtggcctggtccaacaagtccgatttcgcctgcgccaacgccttcaacaacagcattatccccgaggacacattcttcccaagccccgagagcagctgcggtaccatcactcaaggtttggcagtgtcaaccatctcatcattctttccacctggctaccaagtgtccttctgcctggtcatggtgctgctgttcgccgtggataccggcctgtacttcagcgtcaagaccaacatccggtccagcaccagagactggaaggaccacaagttcaagtggcggaaggaccctcaggacaagaagagaggccggaagaagctgctgtacatcttcaagcagcctttcatgcggcccgtgcagaccacccaggaagaggacggctgctcctgccggttccccgaggaagaagaaggcggctgcgagctgcgcgccaagagaagcggatctggcgtgaagcagaccctgaatttcgacctgctgaagctggctggcgacgtggaatccaacccaggcccttctagaatgagaatcagcaagccccacctgagatccatcagcatccagtgctacctgtgcctgctgctgaacagccactttctgacagaggccggcatccacgtgttcatcctgggctgtttttctgccggcctgcctaagaccgaggccaactgggttaacgtgatctccgacctgaagaagatcgaggacctgatccagtccatgcacatcgacgccacactgtacaccgagagcgacgtgcaccctagctgtaaagtgaccgccatgaagtgctttctgctggaactgcaagtgatctccctggaaagcggcgacgccagcatccacgacaccgtggaaaacctgattatcctggctaacaacagcctgagcagcaacggcaacgtgaccgagtccggctgtaaagagtgcgaggaactggaagagaagaatatcaaagagttcctccagagcttcgtgcacatcgtgcagatgttcatcaacaccagcgccagaagcgaggacagatacagaaaccccaagggcttcagcacactggcccagctgaaacagcggaacaccctgaaggacggcatcattatgatccagacactgctcatcatcctgtttattatcgtgcccatcttcctgctgctcgacaaggactaa

SEQ ID NO: 4940 - DNA, 2514 bp, synthetic construct
  source 1..2514: mol_type = other DNA
atggccttaccagtgaccgccttgctcctgccgctggccttgctgctccacgccgccaggccggacatccagctgacacagagccctagcacactgagcgccagcatgggcgacagagtgaccatcacatgtagcgcctctagcagcgtgcggttcatccactggtatcagcagaagcctggcaaggcccctaagcggctgatctacgataccagcaaactggcctctggcgtgcccagcagattttctggctctggcagcggcaccgacttcaccctgacaatatctagcctccagcctgaggacttcgccacctactactgtcagcagtggggcagcagccctttcacctttggacagggcaccaaggtggaaatcaagctcgaggacaagcagctggacgccgacgtgtcccccaagcctaccatcttcctgccctctatcgccgagacaaagctccagaaggccggcacctacctgtgcctgctggaaaagttcttcccagatgtgattaagatccactggcaggaaaagaagtccaacaccatcctgggcagccaggaaggcaacaccatgaagaccaacgacacctacatgaagttcagctggctgaccgtgcccgagaagtccctggacaaagaacacagatgcatcgtgcggcacgaaaacaacaagaacggcgtggaccaggaaatcatcttcccacccatcaagaccgatgtgattacaatggaccccaaggacaactgctccaaggacgccaacgataccctgctgctccagctgaccaacaccagcgccaccatcctgtacgagatcctgctgggcaaggccaccctgtacgccgtgctggtgtctgccctggtgctgatggctatggtcaagcggaaggacagccggggaagggccaagcgatctggatctggagcaacaaacttctcactactcaaacaagcaggtgacgtggaggagaatcccgggcctactagtatggactggatttggcgcatccttttccttgtcggcgctgctaccggcgcgcattccttcgaagtgcagctggttgagtacggtggcggactggttcaacctggcggtagcctgagactgtcttgtgccgccagcggcttcaacatcaaggactactatatccactgggtccgacaggccccaggcaaaggacttgaatgggttgcctggatcgaccccgagaacggcgataccgagttcgtgcccaagtttcagggcagagccaccatgagcgccgacacctctaagaacacagcctacctccagatgaacagcctgagagccgaggacaccgccgtgtactactgtaaaaccggcggcttttggggccagggcacactggtcacagtcagctctacgcgtatccagaaccctgatcctgccgtgtaccagctgcgggatagcaagagcagcgacaagagcgtgtgtctgttcaccgacttcgacagccagaccaacgtgtcccagagcaaggactccgacgtgtacatcaccgataagtgcgtgctggacatgcggagcatggacttcaagagcaactccgccgtggcctggtccaacaagtccgatttcgcctgcgccaacgccttcaacaacagcattatccccgaggacacattcttcccaagccccgagagcagctgcgacgtgaagctggtggaaaagagcttcgagacagacaccaacctgaacttccagaacctgagcgtgatcggcttcagaatcctgctgctgaaagtggccggctttaacctgctgatgaccctgcggctgtggtccagccgcgccaagagaagcggatctggcgtgaagcagaccctgaatttcgacctgctgaagctggctggcgacgtggaatccaacccaggcccttctagaggccatatgaccgagtacaagcccacggtgcgcctcgccacccgcgacgacgtccccagggccgtacgcaccctcgccgccgcgttcgccgactaccccgccacgcgccacaccgtcgatccggaccgccacatcgagcgggtcaccgagctgcaagaactcttcctcacgcgcgtcgggctcgacatcggcaaggtgtgggtcgcggacgacggcgccgcggtggcggtctggaccacgccggagagcgtcgaagcgggggcggtgttcgccgagatcggcccgcgcatggccgagttgagcggttcccggctggccgcgcagcaacagatggaaggcctcctggcgccgcaccggcccaaggagcccgcgtggttcctggccaccgtcggcgtctcgcccgaccaccagggcaagggtctgggcagcgccgtcgtgctccccggagtggaggcggccgagcgcgccggggtgcccgccttcctggagacctccgcgccccgcaacctccccttctacgagcggctcggcttcaccgtcaccgccgacgtcgaggtgcccgaaggaccgcgcacctggtgcatgacccgcaagcccggtgcctga

SEQ ID NO: 4941 - DNA, 2520 bp, synthetic construct
  source 1..2520: mol_type = other DNA
atggccttaccagtgaccgccttgctcctgccgctggccttgctgctccacgccgccaggccggacatccagctgacacagagccctagcacactgagcgccagcatgggcgacagagtgaccatcacatgtagcgcctctagcagcgtgcggttcatccactggtatcagcagaagcctggcaaggcccctaagcggctgatctacgataccagcaaactggcctctggcgtgcccagcagattttctggctctggcagcggcaccgacttcaccctgacaatatctagcctccagcctgaggacttcgccacctactactgtcagcagtggggcagcagccctttcacctttggacagggcaccaaggtggaaatcaagctcgagggacagcctaaggccaatcctaccgtgacactgttccctccaagcagcgaagaactccaggccaacaaggccacacttgtgtgcctgatctccgacttctaccctggggctgtgacagtggcttggaaggccgatggatctcctgtgaaagccggcgtggaaaccaccaagccatccaagcagagcaacaacaaatacgccgccagctcctacctgagcctgacacctgagcagtggaagtcccacagatcctacagctgccaagtgacccacgaaggcagcaccgtggaaaagacagtggcccctacagagtgcagcggatcccccatcaagaccgatgtgattacaatggaccccaaggacaactgctccaaggacgccaacgataccctgctgctccagctgaccaacaccagcgcctactacatgtacgagatcctgctgggcaaggccaccctgtacgccgtgctggtgtctgccctggtgctgatggctatggtcaagcggaaggacagccggggaagggccaagcgatctggatctggagcaacaaacttctcactactcaaacaagcaggtgacgtggaggagaatcccgggcctactagtatggactggatttggcgcatccttttccttgtcggcgctgctaccggcgcgcattccttcgaagtgcagctggttgagtacggtggcggactggttcaacctggcggtagcctgagactgtcttgtgccgccagcggcttcaacatcaaggactactatatccactgggtccgacaggccccaggcaaaggacttgaatgggttgcctggatcgaccccgagaacggcgataccgagttcgtgcccaagtttcagggcagagccaccatgagcgccgacacctctaagaacacagcctacctccagatgaacagcctgagagccgaggacaccgccgtgtactactgtaaaaccggcggcttttggggccagggcacactggtcacagtcagctctacgcgtatccagaaccctgatcctgccgtgtaccagctgcgggatagcaagagcagcgacaagagcgtgtgtctgttcaccgacttcgacagccagaccaacgtgtcccagagcaaggactccgacgtgtacatcaccgataagtgcgtgctggacatgcggagcatggacttcaagagcaactccgccgtggcctggtccaacaagtccgatttcgcctgcgccaacgccttcaacaacagcattatccccgaggacacattcttcccaagccccgagagcagctgcgacgtgaagctggtggaaaagagcttcgagacagacaccaacctgaacttccagaacctgagcgtgatcggcttcagaatcctgctgctgaaagtggccggctttaacctgctgatgaccctgcggctgtggtccagccgcgccaagagaagcggatctggcgtgaagcagaccctgaatttcgacctgctgaagctggctggcgacgtggaatccaacccaggcccttctagaggccatatgaccgagtacaagcccacggtgcgcctcgccacccgcgacgacgtccccagggccgtacgcaccctcgccgccgcgttcgccgactaccccgccacgcgccacaccgtcgatccggaccgccacatcgagcgggtcaccgagctgcaagaactcttcctcacgcgcgtcgggctcgacatcggcaaggtgtgggtcgcggacgacggcgccgcggtggcggtctggaccacgccggagagcgtcgaagcgggggcggtgttcgccgagatcggcccgcgcatggccgagttgagcggttcccggctggccgcgcagcaacagatggaaggcctcctggcgccgcaccggcccaaggagcccgcgtggttcctggccaccgtcggcgtctcgcccgaccaccagggcaagggtctgggcagcgccgtcgtgctccccggagtggaggcggccgagcgcgccggggtgcccgccttcctggagacctccgcgccccgcaacctccccttctacgagcggctcggcttcaccgtcaccgccgacgtcgaggtgcccgaaggaccgcgcacctggtgcatgacccgcaagcccggtgcctga

SEQ ID NO: 4942 - DNA, 2520 bp, synthetic construct
  source 1..2520: mol_type = other DNA
atggccttaccagtgaccgccttgctcctgccgctggccttgctgctccacgccgccaggccggacatccagctgacacagagccctagcacactgagcgccagcatgggcgacagagtgaccatcacatgtagcgcctctagcagcgtgcggttcatccactggtatcagcagaagcctggcaaggcccctaagcggctgatctacgataccagcaaactggcctctggcgtgcccagcagattttctggctctggcagcggcaccgacttcaccctgacaatatctagcctccagcctgaggacttcgccacctactactgtcagcagtggggcagcagccctttcacctttggacagggcaccaaggtggaaatcaagctcgagggacagcctaaggccaatcctaccgtgacactgttccctccaagcagcgaagaactccaggccaacaaggccacacttgtgtgcctgatctccgacttctaccctggggctgtgacagtggcttggaaggccgatggatctcctgtgaaagccggcgtggaaaccaccaagccatccaagcagagcaacaacaaatacgccgccagctcctacctgagcctgacacctgagcagtggaagtcccacagatcctacagctgccaagtgacccacgaaggcagcaccgtggaaaagacagtggcccctacagagtgcagcggatcccccatcaagaccgatgtgattacaatggaccccaaggacaactgctccaaggacgccaacgataccctgctgctccagctgaccaacaccagcgccaccatcctgtacgagatcctgctgggcaaggccaccctgtacgccgtgctggtgtctgccctggtgctgatggctatggtcaagcggaaggacagccggggaagggccaagcgatctggatctggagcaacaaacttctcactactcaaacaagcaggtgacgtggaggagaatcccgggcctactagtatggactggatttggcgcatccttttccttgtcggcgctgctaccggcgcgcattccttcgaagtgcagctggttgagtacggtggcggactggttcaacctggcggtagcctgagactgtcttgtgccgccagcggcttcaacatcaaggactactatatccactgggtccgacaggccccaggcaaaggacttgaatgggttgcctggatcgaccccgagaacggcgataccgagttcgtgcccaagtttcagggcagagccaccatgagcgccgacacctctaagaacacagcctacctccagatgaacagcctgagagccgaggacaccgccgtgtactactgtaaaaccggcggcttttggggccagggcacactggtcacagtcagctctacgcgtatccagaaccctgatcctgccgtgtaccagctgcgggatagcaagagcagcgacaagagcgtgtgtctgttcaccgacttcgacagccagaccaacgtgtcccagagcaaggactccgacgtgtacatcaccgataagtgcgtgctggacatgcggagcatggacttcaagagcaactccgccgtggcctggtccaacaagtccgatttcgcctgcgccaacgccttcaacaacagcattatccccgaggacacattcttcccaagccccgagagcagctgcgacgtgaagctggtggaaaagagcttcgagacagacaccaacctgaacttccagaacctgagcgtgatcggcttcagaatcctgctgctgaaagtggccggctttaacctgctgatgaccctgcggctgtggtccagccgcgccaagagaagcggatctggcgtgaagcagaccctgaatttcgacctgctgaagctggctggcgacgtggaatccaacccaggcccttctagaggccatatgaccgagtacaagcccacggtgcgcctcgccacccgcgacgacgtccccagggccgtacgcaccctcgccgccgcgttcgccgactaccccgccacgcgccacaccgtcgatccggaccgccacatcgagcgggtcaccgagctgcaagaactcttcctcacgcgcgtcgggctcgacatcggcaaggtgtgggtcgcggacgacggcgccgcggtggcggtctggaccacgccggagagcgtcgaagcgggggcggtgttcgccgagatcggcccgcgcatggccgagttgagcggttcccggctggccgcgcagcaacagatggaaggcctcctggcgccgcaccggcccaaggagcccgcgtggttcctggccaccgtcggcgtctcgcccgaccaccagggcaagggtctgggcagcgccgtcgtgctccccggagtggaggcggccgagcgcgccggggtgcccgccttcctggagacctccgcgccccgcaacctccccttctacgagcggctcggcttcaccgtcaccgccgacgtcgaggtgcccgaaggaccgcgcacctggtgcatgacccgcaagcccggtgcctga

SEQ ID NO: 4943 - DNA, 2481 bp, synthetic construct
  source 1..2481: mol_type = other DNA
atggccttaccagtgaccgccttgctcctgccgctggccttgctgctccacgccgccaggccggacatccagctgacacagagccctagcacactgagcgccagcatgggcgacagagtgaccatcacatgtagcgcctctagcagcgtgcggttcatccactggtatcagcagaagcctggcaaggcccctaagcggctgatctacgataccagcaaactggcctctggcgtgcccagcagattttctggctctggcagcggcaccgacttcaccctgacaatatctagcctccagcctgaggacttcgccacctactactgtcagcagtggggcagcagccctttcacctttggacagggcaccaaggtggaaatcaagctcgagggacagcctaaggccaatcctaccgtgacactgttccctccaagcagcgaagaactccaggccaacaaggccacacttgtgtgcctgatctccgacttctaccctggggctgtgacagtggcttggaaggccgatggatctcctgtgaaagccggcgtggaaaccaccaagccatccaagcagagcaacaacaaatacgccgccagctcctacctgagcctgacacctgagcagtggaagtcccacagatcctacagctgccaagtgacccacgaaggcagcaccgtggaaaagacagtggcccctacagagtgcagcggatccggcagagccgattgcggctttaccagcgagagctaccagcagggcgtgctgagcgcctactacatgtacttgttgctgctgctgaagtccgtggtgtacttcgccatcatcacatgctgcctgctgatggctatggtcaagcggaaggacagccggggaagggccaagcgatctggatctggagcaacaaacttctcactactcaaacaagcaggtgacgtggaggagaatcccgggcctactagtatggactggatttggcgcatccttttccttgtcggcgctgctaccggcgcgcattccttcgaagtgcagctggttgagtacggtggcggactggttcaacctggcggtagcctgagactgtcttgtgccgccagcggcttcaacatcaaggactactatatccactgggtccgacaggccccaggcaaaggacttgaatgggttgcctggatcgaccccgagaacggcgataccgagttcgtgcccaagtttcagggcagagccaccatgagcgccgacacctctaagaacacagcctacctccagatgaacagcctgagagccgaggacaccgccgtgtactactgtaaaaccggcggcttttggggccagggcacactggtcacagtcagctctacgcgtatccagaaccctgatcctgccgtgtaccagctgcgggatagcaagagcagcgacaagagcgtgtgtctgttcaccgacttcgacagccagaccaacgtgtcccagagcaaggactccgacgtgtacatcaccgataagtgcgtgctggacatgcggagcatggacttcaagagcaactccgccgtggcctggtccaacaagtccgatttcgcctgcgccaacgccttcaacaacagcattatccccgaggacacattcttcccaagccccgagagcagctgcgacgtgaagctggtggaaaagagcttcgagacagacaccaacctgaacttccagaacctgagcgtgatcggcttcagaatcctgctgctgaaagtggccggctttaacctgctgatgaccctgcggctgtggtccagccgcgccaagagaagcggatctggcgtgaagcagaccctgaatttcgacctgctgaagctggctggcgacgtggaatccaacccaggcccttctagaggccatatgaccgagtacaagcccacggtgcgcctcgccacccgcgacgacgtccccagggccgtacgcaccctcgccgccgcgttcgccgactaccccgccacgcgccacaccgtcgatccggaccgccacatcgagcgggtcaccgagctgcaagaactcttcctcacgcgcgtcgggctcgacatcggcaaggtgtgggtcgcggacgacggcgccgcggtggcggtctggaccacgccggagagcgtcgaagcgggggcggtgttcgccgagatcggcccgcgcatggccgagttgagcggttcccggctggccgcgcagcaacagatggaaggcctcctggcgccgcaccggcccaaggagcccgcgtggttcctggccaccgtcggcgtctcgcccgaccaccagggcaagggtctgggcagcgccgtcgtgctccccggagtggaggcggccgagcgcgccggggtgcccgccttcctggagacctccgcgccccgcaacctccccttctacgagcggctcggcttcaccgtcaccgccgacgtcgaggtgcccgaaggaccgcgcacctggtgcatgacccgcaagcccggtgcctga

SEQ ID NO: 4944 - DNA, 2985 bp, synthetic construct
  source 1..2985: mol_type = other DNA
atggccttaccagtgaccgccttgctcctgccgctggccttgctgctccacgccgccaggccggcatgcgaagtgcagctgcttgaaagtggcggcggactgattcagcctggcggatctctgagactgagctgtgccgccagcggcttcaccttttctagccacgccatgacctgggtccgacaggcacctggaaaagggcttgaatgggtgtccgccatcagcggctctggcgattacacacactacgccgacagcgtgaagggcagattcaccatcagcagagacaacagcaagaacaccgtgtacctccagatgaacagcctgagagccgaggacagcgccgtgtattattgcgccaaggatgaggatggcggcagcctgcttggacacagaggacaaggcaccctggtcaccgtttcttccggtaccggcggaggcggatctggcggcggaggtagcggtggcggaggatctgaattcgacatccagatgacacagagccctagcagcctgtctgccagcgtgggagacagagtgaccatcacatgcaaggccagcgaccacatcaacaactggctggcctggtatcagcagaagcctggcaaggcccctaagctgctgatctacggcgctaccacactggaaacaggcgtgcccagcagattttctggcagcggctctggcaccgacttcaccctgacaatatccagcctccagcctgaggacttcgccacctactactgtcagcagagctggaacaccccttggacattcggccagggcaccaaggtggaaatcaagagactcgaggacctgaagaacgtgttcccacctgaggtggccgtgttcgagcctagcgaggccgagatcagccacacccagaaagccaccctcgtgtgcctggctaccggcttctaccccgaccatgtggaactgtcttggtgggtcaacggcaaagaggtgcacagcggcgtgtgtaccgacccccagccactgaaagaacagcccgccctgaacgacagccggtactgcctgagcagcagactgagagtgtccgccaccttctggcagaacccccggaaccacttcagatgccaggtgcagttctacggcctgagcgagaacgacgagtggacccaggacagagccaagcccgtgacccagatcgtgtctgccgaagcctggggcagagccgattgcggctttaccagcgagagctaccagcagggcgtgctgagcgccaccatcctgtacgagatcctgctgggcaaggccaccctgtacgccgtgctggtgtctgccctggtgctgatggctatggtcaagcggaaggacagccggggaagggccaagcgatctggatctggagcaacaaacttctcactactcaaacaagcaggtgacgtggaggagaatcccgggcctactagtatggactggatttggcgcatccttttccttgtcggcgctgctaccggcgcgcattccttcgaagttcagctggttgaatctggcggcggactggttcaacctggcggatctctgagactgagctgtgccgcctctggctacgcctttagcagctactgggtcaactgggttcgacaggcccctggcaaaggactggaatgggtcgcccaaatctatcccggcgacggcgacaccaactacaacggcaagttcaagggcagattcaccatcagccgggacaacagcaagaacaccctgtacctccagatgaactccctgagagccgaggacaccgccgtgtactattgtgccagatccatcaccaccgtcgtgggctgcgctatggattattggggccagggaaccctggtcaccgtgtcctctacgcgtatccagaaccctgatcctgccgtgtaccagctgcgggatagcaagagcagcgacaagagcgtgtgtctgttcaccgacttcgacagccagaccaacgtgtcccagagcaaggactccgacgtgtacatcaccgataagtgcgtgctggacatgcggagcatggacttcaagagcaactccgccgtggcctggtccaacaagtccgatttcgcctgcgccaacgccttcaacaacagcattatccccgaggacacattcttcccaagccccgagagcagctgcgacgtgaagctggtggaaaagagcttcgagacagacaccaacctgaacttccagaacctgagcgtgatcggcttcagaatcctgctgctgaaagtggccggctttaacctgctgatgaccctgcggctgtggtccagccgcgccaagagaagcggatctggcgtgaagcagaccctgaatttcgacctgctgaagctggctggcgacgtggaatccaacccaggcccttctagaggccatatgaccgagtacaagcccacggtgcgcctcgccacccgcgacgacgtccccagggccgtacgcaccctcgccgccgcgttcgccgactaccccgccacgcgccacaccgtcgatccggaccgccacatcgagcgggtcaccgagctgcaagaactcttcctcacgcgcgtcgggctcgacatcggcaaggtgtgggtcgcggacgacggcgccgcggtggcggtctggaccacgccggagagcgtcgaagcgggggcggtgttcgccgagatcggcccgcgcatggccgagttgagcggttcccggctggccgcgcagcaacagatggaaggcctcctggcgccgcaccggcccaaggagcccgcgtggttcctggccaccgtcggcgtctcgcccgaccaccagggcaagggtctgggcagcgccgtcgtgctccccggagtggaggcggccgagcgcgccggggtgcccgccttcctggagacctccgcgccccgcaacctccccttctacgagcggctcggcttcaccgtcaccgccgacgtcgaggtgcccgaaggaccgcgcacctggtgcatgacccgcaagcccggtgcctga

SEQ ID NO: 4945 - DNA, 3900 bp, synthetic construct
  source 1..3900: mol_type = other DNA
atggccttaccagtgaccgccttgctcctgccgctggccttgctgctccacgccgccaggccggacatccagttgacccagtcccccagctcactcagcgccagtgtgggggaccgggtgaccattacctgtaaagccagtcagagtgtggactatgacggggatagcttcctgaattggtatcagcagaagcctggcaaagccccaaagctgctgatctacgctgcatctaatctggagtcaggcgtgccttccaggttctccggtagtgggtctgggaccgatttcacattgaccatttcatccctccaacccgaggatttcgctacatattactgtcagcagtccaatgaggaccctctcacctttggccagggcaccaaagttgaaattaagagactcgaggacctgaagaacgtgttcccacctgaggtggccgtgttcgagcctagcgaggccgagatcagccacacccagaaagccaccctcgtgtgcctggctaccggcttctaccccgaccatgtggaactgtcttggtgggtcaacggcaaagaggtgcacagcggcgtgtgtaccgacccccagccactgaaagaacagcccgccctgaacgacagccggtactgcctgagcagcagactgagagtgtccgccaccttctggcagaacccccggaaccacttcagatgccaggtgcagttctacggcctgagcgagaacgacgagtggacccaggacagagccaagcccgtgacccagatcgtgtctgccgaagcctggggcagagccgattgcggctttaccagcgagagctaccagcagggcgtgctgagcgcctactacatgtacttgttgctgctgctgaagtccgtggtgtacttcgccatcatcacatgctgcctgctgcggagaaccgccttctgctgcaacggcgagaagtctagggccaagcgatctggatctggagcaacaaacttctcactactcaaacaagcaggtgacgtggaggagaatcccgggcctactagtatggactggatttggcgcatccttttccttgtcggcgctgctaccggcgcgcattccttcgaagaagtccaacttgtggagtctggagggggcctggtgcagcccggcggctctctcagactgtcttgtgcggcaagcggctacaccttcacctcttactggatagaatgggtgaggcaggcacctggaaagggactggagtggattggagagattctgccaggagggggagatacaaattacaatgaaatcttcaaggggcgggccaccttttcagcggataccagcaagaatacagcttacctgcagatgaatagcctccgggcagaagataccgctgtttattattgcacgagacgggtgccaataagactggactattgggggcaagggactcttgtcaccgtcagttcaacgcgtcctcacaccaagcccagcgtgttcgtgatgaagaacggcaccaacgtggcctgcctcgtgaaagagttctaccccaaggacatcaggatcaacctggtgtccagcaagaagatcaccgagttcgaccccgccatcgtgatctcccccagcggcaagtacaacgccgtgaagctggggaagtacgaggacagcaacagcgtgacctgctccgtgcagcacgacaacaagaccgtgcacagcaccgactttgaagtgaaaaccgactccaccgaccacgtgaagcccaaagagacagagaacaccaagcagcccagcaagagctgccacaagcccaaggccatcgtgcacaccgagaaagtgaacatgatgagcctgaccgtgctgggcctgcggatgctgttcgccaaaaccgtggccgtgaacttcctgctgaccgccaagctgttcttcctccgcgccaagagaagcggatctggcgtgaagcagaccctgaatttcgacctgctgaagctggctggcgacgtggaatccaacccaggcccttctagcaccatggccttaccagtgaccgccttgctcctgccgctggccttgctgctccacgccgccaggccgcaggttcagctccagcagtctggacctggcctggtcaagcctagccagacactgtctctgacctgtgccatcagcggcgatagcgtgtcctctaatagagccgcctggaactggatcagacagagccctagcagaggactccagtggctgggcagaacctactaccgcagcaagtggtacaacgactacgccgtgtctctgcggagccggatcaccatcaatcccgtgaccagcaagaaccaggtggccctgcacatgaacagcgtgacccctgaagataccgccgtgtactactgtgccagagccggaattgtggtggtgcccggacctgagacattctactactacgaccacggcctggacgtgtggggccagggaacaacagtgactgtctcttctggaggcggtggatctggcggcggaggtagtggtggtggcggatctgacatccagatgacacagagcccctctagcctgtctgccagcgtgggagacagagtgaccatcacctgtagagccagccagagcatcagaaactacctgaactggtatcagcaaaagcccggcaaggcccctgagctgctgattcatgctgcaagcagcctccagagcggcgtgccaagcagattttctggcagcggcagcggaaccgacttcaccctgacaatatctagcctccagcctgaggacttcgccagctactactgccagcagagctacagcgcccctcctatcacctttggacagggcaccagactggaaatcaagacgcgtgcaagaagtgaagatcgctacaggaaccctaaggggtcagcctgcaaaggcggcggaggaagcgaacttcctacacagggcaccttcagcaacgtgtccaccaatgtgtccccagccaagcctaccaccaccgcctgcgcacgcagcgaggacaggtataggaaccccaaaggaagtgcgtgcaagctcgagggaggcagctggagccaccctcagtttgaaaaagactacaaagacgatgacgataagggatcagattacaaggatgatgatgacaaggggtcagattataaagacgacgatgataaagggagcgactacaaggacgacgatgacaaggcctggtcccatccccagttcgagaaacaccatcaccaccaccatcatcacactagtggctccggcgagggcagaggaagtctactaacctgcggagatgtggaagaaaatcctggcccacatatgaccgagtacaagcccacggtgcgcctcgccacccgcgacgacgtccccagggccgtacgcaccctcgccgccgcgttcgccgactaccccgccacgcgccacaccgtcgatccggaccgccacatcgagcgggtcaccgagctgcaagaactcttcctcacgcgcgtcgggctcgacatcggcaaggtgtgggtcgcggacgacggcgccgcggtggcggtctggaccacgccggagagcgtcgaagcgggggcggtgttcgccgagatcggcccgcgcatggccgagttgagcggttcccggctggccgcgcagcaacagatggaaggcctcctggcgccgcaccggcccaaggagcccgcgtggttcctggccaccgtcggcgtctcgcccgaccaccagggcaagggtctgggcagcgccgtcgtgctccccggagtggaggcggccgagcgcgccggggtgcccgccttcctggagacctccgcgccccgcaacctccccttctacgagcggctcggcttcaccgtcaccgccgacgtcgaggtgcccgaaggaccgcgcacctggtgcatgacccgcaagcccggtgcctga

SEQ ID NO: 4946 - DNA, 2673 bp, synthetic construct
  source 1..2673: mol_type = other DNA
atggccttaccagtgaccgccttgctcctgccgctggccttgctgctccacgccgccaggccggacatccagatgacacagagccctagcagcctgtctgccagcgtgggagacagagtgaccatcacatgcaaggccagcgaccacatcaacaactggctggcctggtatcagcagaagcctggacaggcccctaagctgctgatctacggcgctaccacactggaaacaggcgtgcccagcagattttctggcagcggctctggcaccgactacaccctgacaatatccagcctccagcctgaggacttcgccacctactactgtcagcagagctggaacaccccttggacattcggccagggcaccaagctggaaatcaagagactcgaggacctgaagaacgtgttcccacctgaggtggccgtgttcgagcctagcgaggccgagatcagccacacccagaaagccaccctcgtgtgcctggctaccggcttctaccccgaccatgtggaactgtcttggtgggtcaacggcaaagaggtgcacagcggcgtgtgtaccgacccccagccactgaaagaacagcccgccctgaacgacagccggtactgcctgagcagcagactgagagtgtccgccaccttctggcagaacccccggaaccacttcagatgccaggtgcagttctacggcctgagcgagaacgacgagtggacccaggacagagccaagcccgtgacccagatcgtgtctgccgaagcctggggcagagccgattgcggctttaccagcgagagctaccagcagggcgtgctgagcgccaccatcctgtacgagatcctgctgggcaaggccaccctgtacgccgtgctggtgtctgccctggtgctgatggctatggtcaagcggaaggacagccggggaagggccaagcgatctggatctggagcaacaaacttctcactactcaaacaagcaggtgacgtggaggagaatcccgggcctactagtgccaccatggactggatttggcgcatccttttccttgtcggcgctgctaccggcgcccattccgggcccgccagacctgccaagagcgaggatctgtaccccaatcctaaaggatccggcggcggaggatctggcggaggcggatctgggggcggaggctctttcgaacaagttcagcttcaacagcctggcgctgagctggtcaaacctggcgcttctgtgaagatgagctgcaaagccagcggctacgccttcagcagctactggatcaactggatgaagcagaaacccggccagggactcgaatggatcggccaaatctatcccggcgacggcgacaccaactacaacggcaagttcaagggcagagccacactgaccgccgatacctctagcagcacagcctacatgcagctgagcagcctgaccagcgaagatagcgccgtgtacttctgtgcccggtccatcacaacagtcgtgggctgcgctatggactattggggccagggaacaagcgtgaccgtgtctagtacgcgtatccagaaccctgatcctgccgtgtaccagctgcgggatagcaagagcagcgacaagagcgtgtgtctgttcaccgacttcgacagccagaccaacgtgtcccagagcaaggactccgacgtgtacatcaccgataagtgcgtgctggacatgcggagcatggacttcaagagcaactccgccgtggcctggtccaacaagtccgatttcgcctgcgccaacgccttcaacaacagcattatccccgaggacacattcttcccaagccccgagagcagctgcgacgtgaagctggtggaaaagagcttcgagacagacaccaacctgaacttccagaacctgagcgtgatcggcttcagaatcctgctgctgaaagtggccggctttaacctgctgatgaccctgcggctgtggtccagccgcgccaagagaagcggatctggcgtgaagcagaccctgaatttcgacctgctgaagctggctggcgacgtggaatccaacccaggcccttctagaggccatatgaccgagtacaagcccacggtgcgcctcgccacccgcgacgacgtccccagggccgtacgcaccctcgccgccgcgttcgccgactaccccgccacgcgccacaccgtcgatccggaccgccacatcgagcgggtcaccgagctgcaagaactcttcctcacgcgcgtcgggctcgacatcggcaaggtgtgggtcgcggacgacggcgccgcggtggcggtctggaccacgccggagagcgtcgaagcgggggcggtgttcgccgagatcggcccgcgcatggccgagttgagcggttcccggctggccgcgcagcaacagatggaaggcctcctggcgccgcaccggcccaaggagcccgcgtggttcctggccaccgtcggcgtctcgcccgaccaccagggcaagggtctgggcagcgccgtcgtgctccccggagtggaggcggccgagcgcgccggggtgcccgccttcctggagacctccgcgccccgcaacctccccttctacgagcggctcggcttcaccgtcaccgccgacgtcgaggtgcccgaaggaccgcgcacctggtgcatgacccgcaagcccggtgcctga

SEQ ID NO: 4947 - DNA, 1872 bp, synthetic construct; identical to SEQ ID NO: 4898
  source 1..1872: mol_type = other DNA

SEQ ID NO: 4948 - DNA, 3000 bp, synthetic construct
  source 1..3000: mol_type = other DNA
atggccttaccagtgaccgccttgctcctgccgctggccttgctgctccacgccgccaggccggacatccagatgacacagagccctagcagcctgtctgccagcgtgggagacagagtgaccatcacatgcaaggccagcgaccacatcaacaactggctggcctggtatcagcagaagcctggacaggcccctaagctgctgatctacggcgctaccacactggaaacaggcgtgcccagcagattttctggcagcggctctggcaccgactacaccctgacaatatccagcctccagcctgaggacttcgccacctactactgtcagcagagctggaacaccccttggacattcggccagggcaccaagctggaaatcaagagactcgaggacctgaagaacgtgttcccacctgaggtggccgtgttcgagcctagcgaggccgagatcagccacacccagaaagccaccctcgtgtgcctggctaccggcttctaccccgaccatgtggaactgtcttggtgggtcaacggcaaagaggtgcacagcggcgtgtgtaccgacccccagccactgaaagaacagcccgccctgaacgacagccggtactgcctgagcagcagactgagagtgtccgccaccttctggcagaacccccggaaccacttcagatgccaggtgcagttctacggcctgagcgagaacgacgagtggacccaggacagagccaagcccgtgacccagatcgtgtctgccgaagcctggggcagagccgattgcggctttaccagcgagagctaccagcagggcgtgctgagcgcctactacatgtacttgttgctgctgctgaagtccgtggtgtacttcgccatcatcacatgctgcctgctgcggagaaccgccttctgctgcaacggcgagaagtctagggccaagcgatctggatctggagcaacaaacttctcactactcaaacaagcaggtgacgtggaggagaatcccgggcctactagtgccaccatggactggatttggcgcatccttttccttgtcggcgctgctaccggcgcccattccgggccccaggttcagctgcaagagtctggccctggcctggtcaagcctagccaaacactgagcctgacctgtaccgtgtctggcggctctatcaccaccggcgagttctactggaactggttcagacagcctcctggcaaaggactggaatggatgggagccattgccgccagcggcagcacaacatacagccctagcttcgagagccggaccagcatcagcagagacaccagcaagaatcagttcagcctgaagctgagcagcgtgacagccgccgatacagccgtgtattactgcggcagatcctttggagtggccgccgtgacaaccggccagaatagaggacagggcaccctggtcacagtgtctagcggatccggcggcggaggatctggcggaggcggatctgggggcggaggctctttcgaacaagttcagcttcaacagcctggcgctgagctggtcaaacctggcgcttctgtgaagatgagctgcaaagccagcggctacgccttcagcagctactggatcaactggatgaagcagaaacccggccagggactcgaatggatcggccaaatctatcccggcgacggcgacaccaactacaacggcaagttcaagggcagagccacactgaccgccgatacctctagcagcacagcctacatgcagctgagcagcctgaccagcgaagatagcgccgtgtacttctgtgcccggtccatcacaacagtcgtgggctgcgctatggactattggggccagggaacaagcgtgaccgtgtctagtacgcgtatccagaaccctgatcctgccgtgtaccagctgcgggatagcaagagcagcgacaagagcgtgtgtctgttcaccgacttcgacagccagaccaacgtgtcccagagcaaggactccgacgtgtacatcaccgataagtgcgtgctggacatgcggagcatggacttcaagagcaactccgccgtggcctggtccaacaagtccgatttcgcctgcgccaacgccttcaacaacagcattatccccgaggacacattcttcccaagccccgagagcagctgcgacgtgaagctggtggaaaagagcttcgagacagacaccaacctgaacttccagaacctgagcgtgatcggcttcagaatcctgctgctgaaagtggccggctttaacctgctgatgaccctgcggctgtggtccagccgcgccaagagaagcggatctggcgtgaagcagaccctgaatttcgacctgctgaagctggctggcgacgtggaatccaacccaggcccttctagaggccatatgaccgagtacaagcccacggtgcgcctcgccacccgcgacgacgtccccagggccgtacgcaccctcgccgccgcgttcgccgactaccccgccacgcgccacaccgtcgatccggaccgccacatcgagcgggtcaccgagctgcaagaactcttcctcacgcgcgtcgggctcgacatcggcaaggtgtgggtcgcggacgacggcgccgcggtggcggtctggaccacgccggagagcgtcgaagcgggggcggtgttcgccgagatcggcccgcgcatggccgagttgagcggttcccggctggccgcgcagcaacagatggaaggcctcctggcgccgcaccggcccaaggagcccgcgtggttcctggccaccgtcggcgtctcgcccgaccaccagggcaagggtctgggcagcgccgtcgtgctccccggagtggaggcggccgagcgcgccggggtgcccgccttcctggagacctccgcgccccgcaacctccccttctacgagcggctcggcttcaccgtcaccgccgacgtcgaggtgcccgaaggaccgcgcacctggtgcatgacccgcaagcccggtgcctga

SEQ ID NO: 4949 - DNA, 2553 bp, synthetic construct
  source 1..2553: mol_type = other DNA
atggccttaccagtgaccgccttgctcctgccgctggccttgctgctccacgccgccaggccggacgacatccagttgacccagtcccccagctcactcagcgccagtgtgggggaccgggtgaccattacctgtaaagccagtcagagtgtggactatgagggggatagcttcctgaattggtatcagcagaagcctggcaaagccccaaagctgctgatctacgctgcatctaatctggagtcaggcgtgccttctaggttctccggtagtgggtctgggaccgatttcacattgaccatttcatccctccaacccgaggatttcgctacatattactgtcagcagtccaatgaggaccctctcacctttggccagggcaccaaagttgaaattaagagactcgaggacaagcagctggacgccgacgtgtcccccaagcctaccatcttcctgccctctatcgccgagacaaagctccagaaggccggcacctacctgtgcctgctggaaaagttcttcccagatgtgattaagatccactggcaggaaaagaagtccaacaccatcctgggcagccaggaaggcaacaccatgaagaccaacgacacctacatgaagttcagctggctgaccgtgcccgagaagtccctggacaaagaacacagatgcatcgtgcggcacgaaaacaacaagaacggcgtggaccaggaaatcatcttcccacccatcaagaccgatgtgattacaatggaccccaaggacaactgctccaaggacgccaacgataccctgctgctccagctgaccaacaccagcgcctactacatgtacgagatcctgctgggcaaggccaccctgtacgccgtgctggtgtctgccctggtgctgatggctatggtcaagcggaaggacagccggggaagggccaagcgatctggatctggagcaacaaacttctcactactcaaacaagcaggtgacgtggaggagaatcccgggcctactagtatggactggatttggcgcatccttttccttgtcggcgctgctaccggcgcgcattccttcgaagaagtccaacttgtggagtctggagggggcctggtgcagcccggcggctctctcagactgtcttgtgcggcaagcggctacaccttcagctcttactggatagaatgggtgaggcaggcacctggaaagggactggagtggattggagagattctgccaggagggggagatacaaattacaatgaaatcttcaaggggcgggccaccttttcagcggataccagcaagaatacagcttacctgcagatgaatagcctccgggcagaagataccgctgtttattattgcacgagacgggtgccaataagactggactattgggggcaagggactcttgtcaccgtcagttcaacgcgtatccagaaccctgatcctgccgtgtaccagctgcgggatagcaagagcagcgacaagagcgtgtgtctgttcaccgacttcgacagccagaccaacgtgtcccagagcaaggactccgacgtgtacatcaccgataagtgcgtgctggacatgcggagcatggacttcaagagcaactccgccgtggcctggtccaacaagtccgatttcgcctgcgccaacgccttcaacaacagcattatccccgaggacacattcttcccaagccccgagagcagctgcgacgtgaagctggtggaaaagagcttcgagacagacaccaacctgaacttccagaacctgagcgtgatcggcttcagaatcctgctgctgaaagtggccggctttaacctgctgatgaccctgcggctgtggtccagccgcgccaagagaagcggatctggcgtgaagcagaccctgaatttcgacctgctgaagctggctggcgacgtggaatccaacccaggcccttctagaggccatatgaccgagtacaagcccacggtgcgcctcgccacccgcgacgacgtccccagggccgtacgcaccctcgccgccgcgttcgccgactaccccgccacgcgccacaccgtcgatccggaccgccacatcgagcgggtcaccgagctgcaagaactcttcctcacgcgcgtcgggctcgacatcggcaaggtgtgggtcgcggacgacggcgccgcggtggcggtctggaccacgccggagagcgtcgaagcgggggcggtgttcgccgagatcggcccgcgcatggccgagttgagcggttcccggctggccgcgcagcaacagatggaaggcctcctggcgccgcaccggcccaaggagcccgcgtggttcctggccaccgtcggcgtctcgcccgaccaccagggcaagggtctgggcagcgccgtcgtgctccccggagtggaggcggccgagcgcgccggggtgcccgccttcctggagacctccgcgccccgcaacctccccttctacgagcggctcggcttcaccgtcaccgccgacgtcgaggtgcccgaaggaccgcgcacctggtgcatgacccgcaagcccggtgcctga

SEQ ID NO: 4950 - DNA, 1875 bp, synthetic construct
  source 1..1875: mol_type = other DNA
atggccttaccagtgaccgccttgctcctgccgctggccttgctgctccacgccgccaggccggacgacttcgtgatgacccagacacctctgagcctgcctgtgacacctggcgaacctgccagcatcagctgtagaagcagccagagcatcgtgcaccacgacggcaacacctacctggaatggtatctccagaagcctggacagagccccaagctgctgatctacaaggtgtccaacagattcagcggcgtgcccgacagattttctggcagcggctctggcaccgacttcaccctgaagattagcagagtggaagccgaggacgtgggcgtgtactactgcttccaaggcagccatgttccttggacctttggcggaggcaccaaggtggaaatcaagagactcgaggacctgaagaacgtgttcccacctgaggtggccgtgttcgagcctagcgaggccgagatcagccacacccagaaagccaccctcgtgtgcctggctaccggcttctaccccgaccatgtggaactgtcttggtgggtcaacggcaaagaggtgcacagcggcgtgtgtaccgacccccagccactgaaagaacagcccgccctgaacgacagccggtactgcctgagcagcagactgagagtgtccgccaccttctggcagaacccccggaaccacttcagatgccaggtgcagttctacggcctgagcgagaacgacgagtggacccaggacagagccaagcccgtgacccagatcgtgtctgccgaagcctggggcagagccgattgcggctttaccagcgagagctaccagcagggcgtgctgagcgccaccatcctgtacgagatcctgctgggcaaggccaccctgtacgccgtgctggtgtctgccctggtgctgatggctatggtcaagcggaaggacagccggggaagggccaagcgatctggatctggagcaacaaacttctcactactcaaacaagcaggtgacgtggaggagaatcccgggcctactagtatggactggatttggcgcatccttttccttgtcggcgctgctaccggcgcgcattccttcgaagaagtccaacttgtggagtctggagggggcctggtgcagcccggcggctctctcagactgtcttgtgcggcaagcggctacaccttcacctcttactggatagaatgggtgaggcaggcacctggaaagggactggagtggattggagagattctgccaggagggggagatacaaattacaatgaaatcttcaaggggcgggccaccttttcagcggataccagcaagaatacagcttacctgcagatgaatagcctccgggcagaagataccgctgtttattattgcacgagacgggtgccaataagactggactattgggggcaagggactcttgtcaccgtcagttcaacgcgtatccagaaccctgatcctgccgtgtaccagctgcgggatagcaagagcagcgacaagagcgtgtgtctgttcaccgacttcgacagccagaccaacgtgtcccagagcaaggactccgacgtgtacatcaccgataagtgcgtgctggacatgcggagcatggacttcaagagcaactccgccgtggcctggtccaacaagtccgatttcgcctgcgccaacgccttcaacaacagcattatccccgaggacacattcttcccaagccccgagagcagctgcgacgtgaagctggtggaaaagagcttcgagacagacaccaacctgaacttccagaacctgagcgtgatcggcttcagaatcctgctgctgaaagtggccggctttaacctgctgatgaccctgcggctgtggtccagctaa

SEQ ID NO: 4951 - DNA, 2670 bp, synthetic construct
  source 1..2670: mol_type = other DNA
atggccttaccagtgaccgccttgctcctgccgctggccttgctgctccacgccgccaggccggacatccagatgacacagactacatcctccctgtctgcctctctgggagacagagtcaccatcagttgcagggcaagtcaggacattagtaagtacctgaactggtatcagcagaaaccagatggaactgttaaactcctgatctaccatacatcaagattacactcaggagtcccatcaaggttcagtggcagtgggtctggaacagattattctctcaccattagcaacctggagcaagaagatattgccacttacttttgccaacagggtaatacgcttccgtacacgttcggaggggggaccaagctggagatcacactcgaggacctgaagaacgtgttcccacctgaggtggccgtgttcgagcctagcgaggccgagatcagccacacccagaaagccaccctcgtgtgcctggctaccggcttctaccccgaccatgtggaactgtcttggtgggtcaacggcaaagaggtgcacagcggcgtgtgtaccgacccccagccactgaaagaacagcccgccctgaacgacagccggtactgcctgagcagcagactgagagtgtccgccaccttctggcagaacccccggaaccacttcagatgccaggtgcagttctacggcctgagcgagaacgacgagtggacccaggacagagccaagcccgtgacccagatcgtgtctgccgaagcctggggcagagccgattgcggctttaccagcgagagctaccagcagggcgtgctgagcgccaccatcctgtacgagatcctgctgggcaaggccaccctgtacgccgtgctggtgtctgccctggtgctgatggctatggtcaagcggaaggacagccggggaagggccaagcgatctggatctggagcaacaaacttctcactactcaaacaagcaggtgacgtggaggagaatcccgggcctactagtgccaccatggactggatttggcgcatccttttccttgtcggcgctgctaccggcgcccattccgggcccgccagaagcgaggacagatacagaaaccccaaaggatccggcggcggaggatctggcggaggcggatctgggggcggaggctctttcgaagtgaaactgcaggagtcaggacctggcctggtggcgccctcacagagcctgtccgtcacatgcactgtctcaggggtctcattacccgactatggtgtaagctggattcgccagcctccacgaaagggtctggagtggctgggagtaatatggggtagtgaaaccacatactataattcagctctcaaatccagactgaccatcatcaaggacaactccaagagccaagttttcttaaaaatgaacagtctgcaaactgatgacacagccatttactactgtgccaaacattattactacggtggtagctatgctatggactactggggccaaggaacctcagtcaccgtctcctcaacgcgtatccagaaccctgatcctgccgtgtaccagctgcgggatagcaagagcagcgacaagagcgtgtgtctgttcaccgacttcgacagccagaccaacgtgtcccagagcaaggactccgacgtgtacatcaccgataagtgcgtgctggacatgcggagcatggacttcaagagcaactccgccgtggcctggtccaacaagtccgatttcgcctgcgccaacgccttcaacaacagcattatccccgaggacacattcttcccaagccccgagagcagctgcgacgtgaagctggtggaaaagagcttcgagacagacaccaacctgaacttccagaacctgagcgtgatcggcttcagaatcctgctgctgaaagtggccggctttaacctgctgatgaccctgcggctgtggtccagccgcgccaagagaagcggatctggcgtgaagcagaccctgaatttcgacctgctgaagctggctggcgacgtggaatccaacccaggcccttctagaatgtaccggatgcagctgctgagctgtatcgccctgtctctggccctggtcacaaatagcaactgggttaacgtgatctccgacctgaagaagatcgaggacctgatccagtccatgcacatcgacgccacactgtacaccgagagcgacgtgcaccctagctgtaaagtgaccgccatgaagtgctttctgctggaactgcaagtgatctccctggaaagcggcgacgccagcatccacgacaccgtgaagaacctgattatcctggctaacaacagcctgagcagcaacggcaacgtgaccgagtccggctgtaaagagtgcgaggaactggaagagaagaatatcaaagagttcctccagagcttcgtgcacatcgtgcagatgttcatcaacaccagcaagatcgaagtgatgtaccctcctccttacctggacaacgagaagtccaacggcaccatcatccacgtgaagggcaagcacctgtgtccttctccactgttccccggacctagcaagcctttctgggtgctcgttgttgttggcggcgtgctggcctgttacagcctgctggttaccgtggccttcatcatcttttgggtccgaagcaagcggagctaa

SEQ ID NO: 4952 - DNA, 2670 bp, synthetic construct
  source 1..2670: mol_type = other DNA
atggccttaccagtgaccgccttgctcctgccgctggccttgctgctccacgccgccaggccggacatccagatgacacagactacatcctccctgtctgcctctctgggagacagagtcaccatcagttgcagggcaagtcaggacattagtaagtacctgaactggtatcagcagaaaccagatggaactgttaaactcctgatctaccatacatcaagattacactcaggagtcccatcaaggttcagtggcagtgggtctggaacagattattctctcaccattagcaacctggagcaagaagatattgccacttacttttgccaacagggtaatacgcttccgtacacgttcggaggggggaccaagctggagatcacactcgaggacctgaagaacgtgttcccacctgaggtggccgtgttcgagcctagcgaggccgagatcagccacacccagaaagccaccctcgtgtgcctggctaccggcttctaccccgaccatgtggaactgtcttggtgggtcaacggcaaagaggtgcacagcggcgtgtgtaccgacccccagccactgaaagaacagcccgccctgaacgacagccggtactgcctgagcagcagactgagagtgtccgccaccttctggcagaacccccggaaccacttcagatgccaggtgcagttctacggcctgagcgagaacgacgagtggacccaggacagagccaagcccgtgacccagatcgtgtctgccgaagcctggggcagagccgattgcggctttaccagcgagagctaccagcagggcgtgctgagcgccaccatcctgtacgagatcctgctgggcaaggccaccctgtacgccgtgctggtgtctgccctggtgctgatggctatggtcaagcggaaggacagccggggaagggccaagcgatctggatctggagcaacaaacttctcactactcaaacaagcaggtgacgtggaggagaatcccgggcctactagtgccaccatggactggatttggcgcatccttttccttgtcggcgctgctaccggcgcccattccgggcccgccagaagcgaggacagatacagaaaccccaaaggatccggcggcggaggatctggcggaggcggatctgggggcggaggctctttcgaagtgaaactgcaggagtcaggacctggcctggtggcgccctcacagagcctgtccgtcacatgcactgtctcaggggtctcattacccgactatggtgtaagctggattcgccagcctccacgaaagggtctggagtggctgggagtaatatggggtagtgaaaccacatactataattcagctctcaaatccagactgaccatcatcaaggacaactccaagagccaagttttcttaaaaatgaacagtctgcaaactgatgacacagccatttactactgtgccaaacattattactacggtggtagctatgctatggactactggggccaaggaacctcagtcaccgtctcctcaacgcgtatccagaaccctgatcctgccgtgtaccagctgcgggatagcaagagcagcgacaagagcgtgtgtctgttcaccgacttcgacagccagaccaacgtgtcccagagcaaggactccgacgtgtacatcaccgataagtgcgtgctggacatgcggagcatggacttcaagagcaactccgccgtggcctggtccaacaagtccgatttcgcctgcgccaacgccttcaacaacagcattatccccgaggacacattcttcccaagccccgagagcagctgcgacgtgaagctggtggaaaagagcttcgagacagacaccaacctgaacttccagaacctgagcgtgatcggcctgcggatgctgttcgccaaaaccgtggccgtgaacttcctgctgaccgccaagctgttcttcctccgcgccaagagaagcggatctggcgtgaagcagaccctgaatttcgacctgctgaagctggctggcgacgtggaatccaacccaggcccttctagaatgtaccggatgcagctgctgagctgtatcgccctgtctctggccctggtcacaaatagcaactgggttaacgtgatctccgacctgaagaagatcgaggacctgatccagtccatgcacatcgacgccacactgtacaccgagagcgacgtgcaccctagctgtaaagtgaccgccatgaagtgctttctgctggaactgcaagtgatctccctggaaagcggcgacgccagcatccacgacaccgtgaagaacctgattatcctggctaacaacagcctgagcagcaacggcaacgtgaccgagtccggctgtaaagagtgcgaggaactggaagagaagaatatcaaagagttcctccagagcttcgtgcacatcgtgcagatgttcatcaacaccagcaagatcgaagtgatgtaccctcctccttacctggacaacgagaagtccaacggcaccatcatccacgtgaagggcaagcacctgtgtccttctccactgttccccggacctagcaagcctttctgggtgctcgttgttgttggcggcgtgctggcctgttacagcctgctggttaccgtggccttcatcatcttttgggtccgaagcaagcggagctaa

SEQ ID NO: 4953 - DNA, 2670 bp, synthetic construct
  source 1..2670: mol_type = other DNA
atggccttaccagtgaccgccttgctcctgccgctggccttgctgctccacgccgccaggccggacatccagatgacacagactacatcctccctgtctgcctctctgggagacagagtcaccatcagttgcagggcaagtcaggacattagtaagtacctgaactggtatcagcagaaaccagatggaactgttaaactcctgatctaccatacatcaagattacactcaggagtcccatcaaggttcagtggcagtgggtctggaacagattattctctcaccattagcaacctggagcaagaagatattgccacttacttttgccaacagggtaatacgcttccgtacacgttcggaggggggaccaagctggagatcacactcgaggacctgaagaacgtgttcccacctgaggtggccgtgttcgagcctagcgaggccgagatcagccacacccagaaagccaccctcgtgtgcctggctaccggcttctaccccgaccatgtggaactgtcttggtgggtcaacggcaaagaggtgcacagcggcgtgtgtaccgacccccagccactgaaagaacagcccgccctgaacgacagccggtactgcctgagcagcagactgagagtgtccgccaccttctggcagaacccccggaaccacttcagatgccaggtgcagttctacggcctgagcgagaacgacgagtggacccaggacagagccaagcccgtgacccagatcgtgtctgccgaagcctggggcagagccgattgcggctttaccagcgagagctaccagcagggcgtgctgagcgccaccatcctgtacgagatcctgctgggcaaggccaccctgtacgccgtgctggtgtctgccctggtgctgatggctatggtcaagcggaaggacagccggggaagggccaagcgatctggatctggagcaacaaacttctcactactcaaacaagcaggtgacgtggaggagaatcccgggcctactagtgccaccatggactggatttggcgcatccttttccttgtcggcgctgctaccggcgcccattccgggcccgccagaagcgaggacagatacagaaaccccaaaggatccggcggcggaggatctggcggaggcggatctgggggcggaggctctttcgaagtgaaactgcaggagtcaggacctggcctggtggcgccctcacagagcctgtccgtcacatgcactgtctcaggggtctcattacccgactatggtgtaagctggattcgccagcctccacgaaagggtctggagtggctgggagtaatatggggtagtgaaaccacatactataattcagctctcaaatccagactgaccatcatcaaggacaactccaagagccaagttttcttaaaaatgaacagtctgcaaactgatgacacagccatttactactgtgccaaacattattactacggtggtagctatgctatggactactggggccaaggaacctcagtcaccgtctcctcaacgcgtatccagaaccctgatcctgccgtgtaccagctgcgggatagcaagagcagcgacaagagcgtgtgtctgttcaccgacttcgacagccagaccaacgtgtcccagagcaaggactccgacgtgtacatcaccgataagtgcgtgctggacatgcggagcatggacttcaagagcaactccgccgtggcctggtccaacaagtccgatttcgcctgcgccaacgccttcaacaacagcattatccccgaggacacattcttcccaagccccgagagcagctgcgacgtgaagctggtggaaaagagcttcgagacagacaccaacctgaacttccagaacctgagcgtgctgggcctgcggatgctgttcgccaaaaccgtggccgtgaacttcctgctgaccgccaagctgttcttcctccgcgccaagagaagcggatctggcgtgaagcagaccctgaatttcgacctgctgaagctggctggcgacgtggaatccaacccaggcccttctagaatgtaccggatgcagctgctgagctgtatcgccctgtctctggccctggtcacaaatagcaactgggttaacgtgatctccgacctgaagaagatcgaggacctgatccagtccatgcacatcgacgccacactgtacaccgagagcgacgtgcaccctagctgtaaagtgaccgccatgaagtgctttctgctggaactgcaagtgatctccctggaaagcggcgacgccagcatccacgacaccgtgaagaacctgattatcctggctaacaacagcctgagcagcaacggcaacgtgaccgagtccggctgtaaagagtgcgaggaactggaagagaagaatatcaaagagttcctccagagcttcgtgcacatcgtgcagatgttcatcaacaccagcaagatcgaagtgatgtaccctcctccttacctggacaacgagaagtccaacggcaccatcatccacgtgaagggcaagcacctgtgtccttctccactgttccccggacctagcaagcctttctgggtgctcgttgttgttggcggcgtgctggcctgttacagcctgctggttaccgtggccttcatcatcttttgggtccgaagcaagcggagctaa

SEQ ID NO: 4954 - DNA, 2577 bp, synthetic construct
  source 1..2577: mol_type = other DNA
atggccttaccagtgaccgccttgctcctgccgctggccttgctgctccacgccgccaggccggacatccagatgacacagactacatcctccctgtctgcctctctgggagacagagtcaccatcagttgcagggcaagtcaggacattagtaagtacctgaactggtatcagcagaaaccagatggaactgttaaactcctgatctaccatacatcaagattacactcaggagtcccatcaaggttcagtggcagtgggtctggaacagattattctctcaccattagcaacctggagcaagaagatattgccacttacttttgccaacagggtaatacgcttccgtacacgttcggaggggggaccaagctggagatcacactcgaggacctgaagaacgtgttcccacctgaggtggccgtgttcgagcctagcgaggccgagatcagccacacccagaaagccaccctcgtgtgcctggctaccggcttctaccccgaccatgtggaactgtcttggtgggtcaacggcaaagaggtgcacagcggcgtgtgtaccgacccccagccactgaaagaacagcccgccctgaacgacagccggtactgcctgagcagcagactgagagtgtccgccaccttctggcagaacccccggaaccacttcagatgccaggtgcagttctacggcctgagcgagaacgacgagtggacccaggacagagccaagcccgtgacccagatcgtgtctgccgaagcctggggcagagccgattgcggctttaccagcgagagctaccagcagggcgtgctgagcgcctactacatgtacttgttgctgctgctgaagtccgtggtgtacttcgccatcatcacatgctgcctgctgcggagaaccgccttctgctgcaacggcgagaagtctagggccaagcgatctggatctggagcaacaaacttctcactactcaaacaagcaggtgacgtggaggagaatcccgggcctactagtatggactggatttggcgcatccttttccttgtcggcgctgctaccggcgcgcattccttcgaagtgaaactgcaggagtcaggacctggcctggtggcgccctcacagagcctgtccgtcacatgcactgtctcaggggtctcattacccgactatggtgtaagctggattcgccagcctccacgaaagggtctggagtggctgggagtaatatggggtagtgaaaccacatactataattcagctctcaaatccagactgaccatcatcaaggacaactccaagagccaagttttcttaaaaatgaacagtctgcaaactgatgacacagccatttactactgtgccaaacattattactacggtggtagctatgctatggactactggggccaaggaacctcagtcaccgtctcctcaacgcgtatccagaaccctgatcctgccgtgtaccagctgcgggatagcaagagcagcgacaagagcgtgtgtctgttcaccgacttcgacagccagaccaacgtgtcccagagcaaggactccgacgtgtacatcaccgataagtgcgtgctggacatgcggagcatggacttcaagagcaactccgccgtggcctggtccaacaagtccgatttcgcctgcgccaacgccttcaacaacagcattatccccgaggacacattcttcccaagccccgagagcagctgcgacgtgaagctggtggaaaagagcttcgagacagacaccaacctgaacttccagaacctgagcgtgatcggcctgcggatgctgttcgccaaaaccgtggccgtgaacttcctgctgaccgccaagctgttcttcctccgcgccaagagaagcggatctggcgtgaagcagaccctgaatttcgacctgctgaagctggctggcgacgtggaatccaacccaggcccttctagaatgtaccggatgcagctgctgagctgtatcgccctgtctctggccctggtcacaaatagcaactgggttaacgtgatctccgacctgaagaagatcgaggacctgatccagtccatgcacatcgacgccacactgtacaccgagagcgacgtgcaccctagctgtaaagtgaccgccatgaagtgctttctgctggaactgcaagtgatctccctggaaagcggcgacgccagcatccacgacaccgtgaagaacctgattatcctggctaacaacagcctgagcagcaacggcaacgtgaccgagtccggctgtaaagagtgcgaggaactggaagagaagaatatcaaagagttcctccagagcttcgtgcacatcgtgcagatgttcatcaacaccagcaagatcgaagtgatgtaccctcctccttacctggacaacgagaagtccaacggcaccatcatccacgtgaagggcaagcacctgtgtccttctccactgttccccggacctagcaagcctttctgggtgctcgttgttgttggcggcgtgctggcctgttacagcctgctggttaccgtggccttcatcatcttttgggtccgaagcaagcggagctaa

SEQ ID NO: 4955 - DNA, 2586 bp, synthetic construct
  source 1..2586: mol_type = other DNA
atggccttaccagtgaccgccttgctcctgccgctggccttgctgctccacgccgccaggccggacatccagatgacacagactacatcctcactgtctgcctctctgggagacagagtcaccatcagttgcagggcaagtcaggacattagtaagtacctgaactggtatcagcagaaaccagatggaactgttaaactcctgatctaccatacatcaagattacactcaggagtcccatcaaggttcagtggcagtgggtctggaacagattattctctcaccattagcaacctggagcaagaagatattgccacttacttttgccaacagggtaatacgcttccgtacacgttcggaggggggaccaagctggagatcacactcgagatccagaaccctgatcctgccgtgtaccagctgcgggatagcaagagcagcgacaagagcgtgtgtctgttcaccgacttcgacagccagaccaacgtgtcccagagcaaggactccgacgtgtacatcaccgataagtgcgtgctggacatgcggagcatggacttcaagagcaactccgccgtggcctggtccaacaagtccgatttcgcctgcgccaacgccttcaacaacagcattatccccgaggacacattcttcccaagccccgagagcagctgcgacgtgaagctggtggaaaagagcttcgagacagacaccaacctgaacttccagaacctgagcgtgatcggcttcagaatcctgctgctgaaagtggccggctttaacctgctgatgaccctgcggctgtggtccagctctagtcgcgccaagagaagcggatctggcgtgaagcagaccctgaatttcgacctgctgaagctggctggcgacgtggaatccaacccaggccctactagtatggactggatttggcgcatccttttccttgtcggcgctgctaccggcgcgcattccttcgaagtgaaactgcaggagtcaggacctggcctggtggcgccctcacagagcctgtccgtcacatgcactgtctcaggggtctcattacccgactatggtgtaagctggattcgccagcctccacgaaagggtctggagtggctgggagtaatatggggtagtgaaaccacatactataattcagctctcaaatccagactgaccatcatcaaggacaactccaagagccaagttttcttaaaaatgaacagtctgcaaactgatgacacagccatttactactgtgccaaacattattactacggtggtagctatgctatggactactggggccaaggaacctcagtcaccgtctcctcaacgcgtgaggacctgaagaacgtgttcccacctgaggtggccgtgttcgagcctagcgaggccgagatcagccacacccagaaagccaccctcgtgtgcctggctaccggcttctaccccgaccatgtggaactgtcttggtgggtcaacggcaaagaggtgcacagcggcgtgtgtaccgacccccagccactgaaagaacagcccgccctgaacgacagccggtactgcctgagcagcagactgagagtgtccgccaccttctggcagaacccccggaaccacttcagatgccaggtgcagttctacggcctgagcgagaacgacgagtggacccaggacagagccaagcccgtgacccagatcgtgtctgccgaagcctggggcagagccgattgcggctttaccagcgagagctaccagcagggcgtgctgagcgcctactacatgtacttgttgctgctgctgaagtccgtggtgtacttcgccatcatcacatgctgcctgctgcggagaaccgccttctgctgcaacggcgagaagtctagggccaagcgatctggatctggagcaacaaacttctcactactcaaacaagcaggtgacgtggaggagaatcccgggccttctagaatgtaccggatgcagctgctgagctgtatcgccctgtctctggccctggtcacaaatagcaactgggttaacgtgatctccgacctgaagaagatcgaggacctgatccagtccatgcacatcgacgccacactgtacaccgagagcgacgtgcaccctagctgtaaagtgaccgccatgaagtgctttctgctggaactgcaagtgatctccctggaaagcggcgacgccagcatccacgacaccgtgaagaacctgattatcctggctaacaacagcctgagcagcaacggcaacgtgaccgagtccggctgtaaagagtgcgaggaactggaagagaagaatatcaaagagttcctccagagcttcgtgcacatcgtgcagatgttcatcaacaccagcaagatcgaagtgatgtaccctcctccttacctggacaacgagaagtccaacggcaccatcatccacgtgaagggcaagcacctgtgtccttctccactgttccccggacctagcaagcctttctgggtgctcgttgttgttggcggcgtgctggcctgttacagcctgctggttaccgtggccttcatcatcttttgggtccgaagcaagcggagctaa

SEQ ID NO: 4956 - DNA, 2682 bp, synthetic construct
  source 1..2682: mol_type = other DNA
atggccttaccagtgaccgccttgctcctgccgctggccttgctgctccacgccgccaggccgagctacgtgctgacacagcctccatccgtgtctgtggctccaggacagaccgccagaatcacatgcggcggcaacaacatcggcggcaagagcgtgcactggtatcagcagccacctggacaggctccagtggtggtggtgtacgacgacagcgatagacctagcggcatccccgagagattcagcggcagcaattccggcaataccgccacactgaccatcagcagagtggaagctggcgacgaggccgtgtactactgccaagtgtgggacagcagcagcgatcacgtggtgtttggcggcggaacaaagctgacagtgcttctcgaggacctgaagaacgtgttcccacctgaggtggccgtgttcgagcctagcgaggccgagatcagccacacccagaaagccaccctcgtgtgcctggctaccggcttctaccccgaccatgtggaactgtcttggtgggtcaacggcaaagaggtgcacagcggcgtgtgtaccgacccccagccactgaaagaacagcccgccctgaacgacagccggtactgcctgagcagcagactgagagtgtccgccaccttctggcagaacccccggaaccacttcagatgccaggtgcagttctacggcctgagcgagaacgacgagtggacccaggacagagccaagcccgtgacccagatcgtgtctgccgaagcctggggcagagccgattgcggctttaccagcgagagctaccagcagggcgtgctgagcgccaccatcctgtacgagatcctgctgggcaaggccaccctgtacgccgtgctggtgtctgccctggtgctgatggctatggtcaagcggaaggacagccggggaagggccaagcgatctggatctggagcaacaaacttctcactactcaaacaagcaggtgacgtggaggagaatcccgggcctactagtgccaccatggactggatttggcgcatccttttccttgtcggcgctgctaccggcgcccattccgggcccgccagaagcgaggacagatacagaaaccccaaaggatccggcggcggaggatctggcggaggcggatctgggggcggaggctctttcgaacaactccagctgcaagagtctggccctggcctggtcaagcctagcgaaacactgagcctgacctgtaccgtgtctggcggctctatcagctccagcagctatttctggggctggatcagacaacctcctggcaaaggactggaatggatcggctccatctactacagcggcatcacctactacaaccccagcctgaagtccagagtgaccatctccgtggacaccagcaagaaccagttctccctgaagctgagcagcgtgacagccgccgataccgccgtgtattattgtgccagacatgacggcgctgtggccggcctgtttgattattggggacagggcaccctggtcaccgtgtcatctgctacgcgtatccagaaccctgatcctgccgtgtaccagctgcgggatagcaagagcagcgacaagagcgtgtgtctgttcaccgacttcgacagccagaccaacgtgtcccagagcaaggactccgacgtgtacatcaccgataagtgcgtgctggacatgcggagcatggacttcaagagcaactccgccgtggcctggtccaacaagtccgatttcgcctgcgccaacgccttcaacaacagcattatccccgaggacacattcttcccaagccccgagagcagctgcgacgtgaagctggtggaaaagagcttcgagacagacaccaacctgaacttccagaacctgagcgtgatcggcctgcggatgctgttcgccaaaaccgtggccgtgaacttcctgctgaccgccaagctgttcttcctccgcgccaagagaagcggatctggcgtgaagcagaccctgaatttcgacctgctgaagctggctggcgacgtggaatccaacccaggcccttctagaatgtaccggatgcagctgctgagctgtatcgccctgtctctggccctggtcacaaatagcaactgggttaacgtgatctccgacctgaagaagatcgaggacctgatccagtccatgcacatcgacgccacactgtacaccgagagcgacgtgcaccctagctgtaaagtgaccgccatgaagtgctttctgctggaactgcaagtgatctccctggaaagcggcgacgccagcatccacgacaccgtgaagaacctgattatcctggctaacaacagcctgagcagcaacggcaacgtgaccgagtccggctgtaaagagtgcgaggaactggaagagaagaatatcaaagagttcctccagagcttcgtgcacatcgtgcagatgttcatcaacaccagcaagatcgaagtgatgtaccctcctccttacctggacaacgagaagtccaacggcaccatcatccacgtgaagggcaagcacctgtgtccttctccactgttccccggacctagcaagcctttctgggtgctcgttgttgttggcggcgtgctggcctgttacagcctgctggttaccgtggccttcatcatcttttgggtccgaagcaagcggagctaa

SEQ ID NO: 4957 - DNA, 2592 bp, synthetic construct
  source 1..2592: mol_type = other DNA
atggccttaccagtgaccgccttgctcctgccgctggccttgctgctccacgccgccaggccggcatgcgctagaagcgaagatcggtatcggaaccccaaggaattcgacatccagatgacacagagccctagcagcctgtctgccagcgtgggagacagagtgaccatcacatgcaaggccagccaggatgtgggcacagccgtggattggtatcagcagaagcctggcaaggcccctaagctgctgatctactgggccagcacaagacacacaggcgtgcccagcagattttctggcagcggctctggcaccgacttcaccctgacaatatccagcctccagcctgaggacttcgccacctactactgccagcagtacaacagctaccctctgaccttcggccagggcaccaaggtggaaatcaaaagactcgaggacctgaagaacgtgttcccacctgaggtggccgtgttcgagcctagcgaggccgagatcagccacacccagaaagccaccctcgtgtgcctggctaccggcttctaccccgaccatgtggaactgtcttggtgggtcaacggcaaagaggtgcacagcggcgtgtgtaccgacccccagccactgaaagaacagcccgccctgaacgacagccggtactgcctgagcagcagactgagagtgtccgccaccttctggcagaacccccggaaccacttcagatgccaggtgcagttctacggcctgagcgagaacgacgagtggacccaggacagagccaagcccgtgacccagatcgtgtctgccgaagcctggggcagagccgattgcggctttaccagcgagagctaccagcagggcgtgctgagcgccaccatcctgtacgagatcctgctgggcaaggccaccctgtacgccgtgctggtgtctgccctggtgctgatggctatggtcaagcggaaggacagccggggaagggccaagcgatctggatctggagcaacaaacttctcactactcaaacaagcaggtgacgtggaggagaatcccgggcctactagtatggactggatttggcgcatccttttccttgtcggcgctgctaccggcgcgcattccttcgaagtgcagctggttgaatcaggtggcggcctggttcaacctggcggatctctgagactgagctgtgccgccagcggctacacctttaccgagtacacaatccactgggtccgacaggcccctggcaaaggacttgagtgggtcgccaacatcaaccccaacaatggcggcaccacctacaaccagaagttcgaggacagattcaccatcagccgggacaacagcaagaacaccctgtacctccagatgaactccctgagagccgaggacaccgccgtgtactattgtgccagaggctggaacttcgactactggggccagggaacactggtcaccgttagctctacgcgtatccagaaccctgatcctgccgtgtaccagctgcgggatagcaagagcagcgacaagagcgtgtgtctgttcaccgacttcgacagccagaccaacgtgtcccagagcaaggactccgacgtgtacatcaccgataagtgcgtgctggacatgcggagcatggacttcaagagcaactccgccgtggcctggtccaacaagtccgatttcgcctgcgccaacgccttcaacaacagcattatccccgaggacacattcttcccaagccccgagagcagctgcgacgtgaagctggtggaaaagagcttcgagacagacaccaacctgaacttccagaacctgagcgtgatcggcttcagaatcctgctgctgaaagtggccggctttaacctgctgatgaccctgcggctgtggtccagccgcgccaagagaagcggatctggcgtgaagcagaccctgaatttcgacctgctgaagctggctggcgacgtggaatccaacccaggcccttctagaggccatatgaccgagtacaagcccacggtgcgcctcgccacccgcgacgacgtccccagggccgtacgcaccctcgccgccgcgttcgccgactaccccgccacgcgccacaccgtcgatccggaccgccacatcgagcgggtcaccgagctgcaagaactcttcctcacgcgcgtcgggctcgacatcggcaaggtgtgggtcgcggacgacggcgccgcggtggcggtctggaccacgccggagagcgtcgaagcgggggcggtgttcgccgagatcggcccgcgcatggccgagttgagcggttcccggctggccgcgcagcaacagatggaaggcctcctggcgccgcaccggcccaaggagcccgcgtggttcctggccaccgtcggcgtctcgcccgaccaccagggcaagggtctgggcagcgccgtcgtgctccccggagtggaggcggccgagcgcgccggggtgcccgccttcctggagacctccgcgccccgcaacctccccttctacgagcggctcggcttcaccgtcaccgccgacgtcgaggtgcccgaaggaccgcgcacctggtgcatgacccgcaagcccggtgcctga

SEQ ID NO: 4958 - DNA, 1851 bp, synthetic construct
  source 1..1851: mol_type = other DNA
atggccttaccagtgaccgccttgctcctgccgctggccttgctgctccacgccgccaggccggacatcgtgctgacacagagccctccatctctggccgtgtctctgggacagagagccaccatcagctgtagagccagcgagagcgtggacagctacggcaagaccttcatgcactggcaccagcagaagccaggccagcctcctaagctgctgatctaccgggtgtccaacctggaaagcggcatccctgccagattttctggcagcggcagcagaaccgacttcaccctgaccatcaatcccgtggaagccgacgacgtggcaacctactactgccagcagagcaacgaggaccccttcacatttggcggaggcaccaagctggaaatcaagagactcgaggacctgaagaacgtgttcccacctgaggtggccgtgttcgagcctagcgaggccgagatcagccacacccagaaagccaccctcgtgtgcctggctaccggcttctaccccgaccatgtggaactgtcttggtgggtcaacggcaaagaggtgcacagcggcgtgtgtaccgacccccagccactgaaagaacagcccgccctgaacgacagccggtactgcctgagcagcagactgagagtgtccgccaccttctggcagaacccccggaaccacttcagatgccaggtgcagttctacggcctgagcgagaacgacgagtggacccaggacagagccaagcccgtgacccagatcgtgtctgccgaagcctggggcagagccgattgcggctttaccagcgagagctaccagcagggcgtgctgagcgccaccatcctgtacgagatcctgctgggcaaggccaccctgtacgccgtgctggtgtctgccctggtgctgatggctatggtcaagcggaaggacagccggggaagggccaagcgatctggatctggagcaacaaacttctcactactcaaacaagcaggtgacgtggaggagaatcccgggcctactagtatggactggatttggcgcatccttttccttgtcggcgctgctaccggcgcgcattccttcgaagttcagctgcaagagtctggccctggcctggtcaagcctagccaaagcctgagcctgacctgtaccgtgaccggctacagcatcaccagcgactacgcctggaactggatcagacagttccccggcaacaaactggaatggatgggcaacatctggtacagcggctccaccacctacaatcccagcctgaagtcccggatctccatcaccagagataccagcaagaaccagttcttcctgcaactgaacagcgtgaccagcgaggacaccgccacctactattgcagccggatggatttttggggccagggcaccacactgaccgtgtcatctacgcgtatccagaaccctgatcctgccgtgtaccagctgcgggatagcaagagcagcgacaagagcgtgtgtctgttcaccgacttcgacagccagaccaacgtgtcccagagcaaggactccgacgtgtacatcaccgataagtgcgtgctggacatgcggagcatggacttcaagagcaactccgccgtggcctggtccaacaagtccgatttcgcctgcgccaacgccttcaacaacagcattatccccgaggacacattcttcccaagccccgagagcagctgcgacgtgaagctggtggaaaagagcttcgagacagacaccaacctgaacttccagaacctgagcgtgatcggcttcagaatcctgctgctgaaagtggccggctttaacctgctgatgaccctgcggctgtggtccagctaa

SEQ ID NO: 4959 - DNA, 1854 bp, synthetic construct
  source 1..1854: mol_type = other DNA
atggccttaccagtgaccgccttgctcctgccgctggccttgctgctccacgccgccaggccggacatcgtgctgacacagagccctccatctctggccgtgtctctgggacagagagccaccatcagctgtagagccagcgagagcgtggacagctacggcaagaccttcatgcactggcaccagcagaagccaggccagcctcctaagctgctgatctaccgggtgtccaacctggaaagcggcatccctgccagattttctggcagcggcagcagaaccgacttcaccctgaccatcaatcccgtggaagccgacgacgtggcaacctactactgccagcagagcaacgaggaccccttcacatttggcggaggcaccaagctggaaatcaagagactcgaggacctgaagaacgtgttcccacctgaggtggccgtgttcgagcctagcgaggccgagatcagccacacccagaaagccaccctcgtgtgcctggctaccggcttctaccccgaccatgtggaactgtcttggtgggtcaacggcaaagaggtgcacagcggcgtgtgtaccgacccccagccactgaaagaacagcccgccctgaacgacagccggtactgcctgagcagcagactgagagtgtccgccaccttctggcagaacccccggaaccacttcagatgccaggtgcagttctacggcctgagcgagaacgacgagtggacccaggacagagccaagcccgtgacccagatcgtgtctgccgaagcctggggcagagccgattgcggctttaccagcgagagctaccagcagggcgtgctgagcgcctactacatgtacttgttgctgctgctgaagtccgtggtgtacttcgccatcatcacatgctgcctgctgcggagaaccgccttctgctgcaacggcgagaagtctagggccaagcgatctggatctggagcaacaaacttctcactactcaaacaagcaggtgacgtggaggagaatcccgggcctactagtatggactggatttggcgcatccttttccttgtcggcgctgctaccggcgcgcattccttcgaagttcagctgcaagagtctggccctggcctggtcaagcctagccaaagcctgagcctgacctgtaccgtgaccggctacagcatcaccagcgactacgcctggaactggatcagacagttccccggcaacaaactggaatggatgggcaacatctggtacagcggctccaccacctacaatcccagcctgaagtcccggatctccatcaccagagataccagcaagaaccagttcttcctgcaactgaacagcgtgaccagcgaggacaccgccacctactattgcagccggatggatttttggggccagggcaccacactgaccgtgtcatctacgcgtatccagaaccctgatcctgccgtgtaccagctgcgggatagcaagagcagcgacaagagcgtgtgtctgttcaccgacttcgacagccagaccaacgtgtcccagagcaaggactccgacgtgtacatcaccgataagtgcgtgctggacatgcggagcatggacttcaagagcaactccgccgtggcctggtccaacaagtccgatttcgcctgcgccaacgccttcaacaacagcattatccccgaggacacattcttcccaagccccgagagcagctgcgacgtgaagctggtggaaaagagcttcgagacagacaccaacctgaacttccagaacctgagcgtgatcggcttcagaatcctgctgctgaaagtggccggctttaacctgctgatgaccctgcggctgtggtccagctaa

SEQ ID NO: 4960 - DNA, 2277 bp, synthetic construct
  source 1..2277: mol_type = other DNA
atggccttaccagtgaccgccttgctcctgccgctggccttgctgctccacgccgccaggccggacatccagatgacacagagccctagcagcctgtctgccagcgtgggagacagagtgaccatcacatgcaaggccagcgaccacatcaacaactggctggcctggtatcagcagaagcctggcaaggcccctaagctgctgatctacggcgctaccacactggaaacaggcgtgcccagcagattttctggcagcggctctggcaccgacttcaccctgacaatatccagcctccagcctgaggacttcgccacctactactgtcagcagagctggaacaccccttggacattcggccagggcaccaaggtggaaatcaagagactcgaggacctgaagaacgtgttcccacctgaggtggccgtgttcgagcctagcgaggccgagatcagccacacccagaaagccaccctcgtgtgcctggctaccggcttctaccccgaccatgtggaactgtcttggtgggtcaacggcaaagaggtgcacagcggcgtgtgtaccgacccccagccactgaaagaacagcccgccctgaacgacagccggtactgcctgagcagcagactgagagtgtccgccaccttctggcagaacccccggaaccacttcagatgccaggtgcagttctacggcctgagcgagaacgacgagtggacccaggacagagccaagcccgtgacccagatcgtgtctgccgaagcctggggcagagccgattgcggctttaccagcgagagctaccagcagggcgtgctgagcgccaccatcctgtacgagatcctgctgggcaaggccaccctgtacgccgtgctggtgtctgccctggtgctgatggctatggtcaagcggaaggacagccggggaagggccaagcgatctggatctggagcaacaaacttctcactactcaaacaagcaggtgacgtggaggagaatcccgggcctactagtgccaccatggactggatttggcgcatccttttccttgtcggcgctgctaccggcgcccattccgggcccgaagtgcagctggttgaatctggcggaggactggttcaggctggcggatctctgagactgtcttgtgccgccagcggcagaacctttagcatgggctggtttagacaggcccctggcaaagagagagagttcgtcgccgccatcacatactctggcggcagcccttactacgccgactctgtgaagggcagattcaccatcagccgggacaacgccaagaacaccgtgtacctccagatgaacagcctgaagcctgaggacaccgccgtgtactactgcgccgccaatccaacatacggcagcgactggaacgccgagaattggggccagggaacccaagtgacagtgtctagcggatccgcacgcagcgaggacaggtataggaaccccaaaggaagtttcgaagttcagctggttgaatctggcggcggactggttcaacctggcggatctctgagactgagctgtgccgcctctggctacgcctttagcagctactgggtcaactgggttcgacaggcccctggcaaaggactggaatgggtcgcccaaatctatcccggcgacggcgacaccaactacaacggcaagttcaagggcagattcaccatcagccgggacaacagcaagaacaccctgtacctccagatgaactccctgagagccgaggacaccgccgtgtactattgtgccagatccatcaccaccgtcgtgggctgcgctatggattattggggccagggaaccctggtcaccgtgtcctctacgcgtatccagaaccctgatcctgccgtgtaccagctgcgggatagcaagagcagcgacaagagcgtgtgtctgttcaccgacttcgacagccagaccaacgtgtcccagagcaaggactccgacgtgtacatcaccgataagtgcgtgctggacatgcggagcatggacttcaagagcaactccgccgtggcctggtccaacaagtccgatttcgcctgcgccaacgccttcaacaacagcattatccccgaggacacattcttcccaagccccgagagcagctgcgacgtgaagctggtggaaaagagcttcgagacagacaccaacctgaacttccagaacctgagcgtgatcggcttcagaatcctgctgctgaaagtggccggctttaacctgctgatgaccctgcggctgtggtccagctaa

SEQ ID NO: 4961 - DNA, 2553 bp, synthetic construct
  source 1..2553: mol_type = other DNA
atggccttaccagtgaccgccttgctcctgccgctggccttgctgctccacgccgccaggccggacatcgtgctgacacagagccctccatctctggccgtgtctctgggacagagagccaccatcagctgtagagccagcgagagcgtggacagctacggcaagaccttcatgcactggcaccagcagaagccaggccagcctcctaagctgctgatctaccgggtgtccaacctggaaagcggcatccctgccagattttctggcagcggcagcagaaccgacttcaccctgaccatcaatcccgtggaagccgacgacgtggcaacctactactgccagcagagcaacgaggaccccttcacatttggcggaggcaccaagctggaaatcaagagactcgaggacctgaagaacgtgttcccacctgaggtggccgtgttcgagcctagcgaggccgagatcagccacacccagaaagccaccctcgtgtgcctggctaccggcttctaccccgaccatgtggaactgtcttggtgggtcaacggcaaagaggtgcacagcggcgtgtgtaccgacccccagccactgaaagaacagcccgccctgaacgacagccggtactgcctgagcagcagactgagagtgtccgccaccttctggcagaacccccggaaccacttcagatgccaggtgcagttctacggcctgagcgagaacgacgagtggacccaggacagagccaagcccgtgacccagatcgtgtctgccgaagcctggggcagagccgattgcggctttaccagcgagagctaccagcagggcgtgctgagcgcctactacatgtacttgttgctgctgctgaagtccgtggtgtacttcgccatcatcacatgctgcctgctgcggagaaccgccttctgctgcaacggcgagaagtctagggccaagcgatctggatctggagcaacaaacttctcactactcaaacaagcaggtgacgtggaggagaatcccgggcctactagtatggactggatttggcgcatccttttccttgtcggcgctgctaccggcgcgcattccttcgaagttcagctgcaagagtctggccctggcctggtcaagcctagccaaagcctgagcctgacctgtaccgtgaccggctacagcatcaccagcgactacgcctggaactggatcagacagttccccggcaacaaactggaatggatgggcaacatctggtacagcggctccaccacctacaatcccagcctgaagtcccggatctccatcaccagagataccagcaagaaccagttcttcctgcaactgaacagcgtgaccagcgaggacaccgccacctactattgcagccggatggatttttggggccagggcaccacactgaccgtgtcatctacgcgtatccagaaccctgatcctgccgtgtaccagctgcgggatagcaagagcagcgacaagagcgtgtgtctgttcaccgacttcgacagccagaccaacgtgtcccagagcaaggactccgacgtgtacatcaccgataagtgcgtgctggacatgcggagcatggacttcaagagcaactccgccgtggcctggtccaacaagtccgatttcgcctgcgccaacgccttcaacaacagcattatccccgaggacacattcttcccaagccccgagagcagctgcgacgtgaagctggtggaaaagagcttcgagacagacaccaacctgaacttccagaacctgagcgtgatcggcttcagaatcctgctgctgaaagtggccggctttaacctgctgatgaccctgcggctgtggtccagccgcgccaagagaagcggatctggcgtgaagcagaccctgaatttcgacctgctgaagctggctggcgacgtggaatccaacccaggcccttctagaggccatatgaccgagtacaagcccacggtgcgcctcgccacccgcgacgacgtccccagggccgtacgcaccctcgccgccgcgttcgccgactaccccgccacgcgccacaccgtcgatccggaccgccacatcgagcgggtcaccgagctgcaagaactcttcctcacgcgcgtcgggctcgacatcggcaaggtgtgggtcgcggacgacggcgccgcggtggcggtctggaccacgccggagagcgtcgaagcgggggcggtgttcgccgagatcggcccgcgcatggccgagttgagcggttcccggctggccgcgcagcaacagatggaaggcctcctggcgccgcaccggcccaaggagcccgcgtggttcctggccaccgtcggcgtctcgcccgaccaccagggcaagggtctgggcagcgccgtcgtgctccccggagtggaggcggccgagcgcgccggggtgcccgccttcctggagacctccgcgccccgcaacctccccttctacgagcggctcggcttcaccgtcaccgccgacgtcgaggtgcccgaaggaccgcgcacctggtgcatgacccgcaagcccggtgcctga

SEQ ID NO: 4962 - DNA, 1905 bp, synthetic construct
  source 1..1905: mol_type = other DNA
atggccttaccagtgaccgccttgctcctgccgctggccttgctgctccacgccgccaggccggctagaagcgaagatcggtatcggaaccccaaggaattcgacatccagctgacacagagccctagcacactgagcgccagcatgggcgacagagtgaccatcacatgtagcgcctctagcagcgtgcggttcatccactggtatcagcagaagcctggcaaggcccctaagcggctgatctacgataccagcaaactggcctctggcgtgcccagcagattttctggctctggcagcggcaccgacttcaccctgacaatatctagcctccagcctgaggacttcgccacctactactgtcagcagtggggcagcagccctttcacctttggacagggcaccaaggtggaaatcaagctcgaggacctgaagaacgtgttcccacctgaggtggccgtgttcgagcctagcgaggccgagatcagccacacccagaaagccaccctcgtgtgcctggctaccggcttctaccccgaccatgtggaactgtcttggtgggtcaacggcaaagaggtgcacagcggcgtgtgtaccgacccccagccactgaaagaacagcccgccctgaacgacagccggtactgcctgagcagcagactgagagtgtccgccaccttctggcagaacccccggaaccacttcagatgccaggtgcagttctacggcctgagcgagaacgacgagtggacccaggacagagccaagcccgtgacccagatcgtgtctgccgaagcctggggcagagccgattgcggctttaccagcgagagctaccagcagggcgtgctgagcgccaccatcctgtacgagatcctgctgggcaaggccaccctgtacgccgtgctggtgtctgccctggtgctgatggctatggtcaagcggaaggacagccggggaagggccaagcgatctggatctggagcaacaaacttctcactactcaaacaagcaggtgacgtggaggagaatcccgggcctactagtatggactggatttggcgcatccttttccttgtcggcgctgctaccggcgcgcattccttcgaagtgcagctggttgagtacggtggcggactggttcaacctggcggtagcctgagactgtcttgtgccgccagcggcttcaacatcaaggactactatatccactgggtccgacaggccccaggcaaaggacttgaatgggttgcctggatcgaccccgagaacggcgataccgagttcgtgcccaagtttcagggcagagccaccatgagcgccgacacctctaagaacacagcctacctccagatgaacagcctgagagccgaggacaccgccgtgtactactgtaaaaccggcggcttttggggccagggcacactggtcacagtcagctctacgcgtgccagaagcgaggacagatacagaaaccccaaaatccagaaccctgatcctgccgtgtaccagctgcgggatagcaagagcagcgacaagagcgtgtgtctgttcaccgacttcgacagccagaccaacgtgtcccagagcaaggactccgacgtgtacatcaccgataagtgcgtgctggacatgcggagcatggacttcaagagcaactccgccgtggcctggtccaacaagtccgatttcgcctgcgccaacgccttcaacaacagcattatccccgaggacacattcttcccaagccccgagagcagctgcgacgtgaagctggtggaaaagagcttcgagacagacaccaacctgaacttccagaacctgagcgtgatcggcttcagaatcctgctgctgaaagtggccggctttaacctgctgatgaccctgcggctgtggtccagctaa

SEQ ID NO: 4963 - DNA, 1848 bp, synthetic construct; identical to SEQ ID NO: 4903
  source 1..1848: mol_type = other DNA

SEQ ID NO: 4964 - DNA, 690 bp, synthetic construct
  source 1..690: mol_type = other DNA
atggctagactggccctgtctcctgtgcctagccattggatggttgccctgctgctgctcctgtctgctgaacctgttcctgccgccagaagcgaggacagatacagaaaccccaagggcagcgcctgctccagaatctggcaaagccccagattcattgcccggaagaggggcttcaccgtgaagatgcactgctacatgaacagcgccagcggcaacgtttcctggctgtggaagcaagagatggacgagaaccctcagcagctgaagctggaaaagggccgcatggaagagagccagaacgagtctctggccacactgaccatccagggcatcagattcgaggacaacggcatctacttttgccagcagaagtgcaacaacaccagcgaggtgtaccaaggctgtggcaccgagctgagagtgatgggctttagcacactggcccagctgaaacagcggaacaccctgaaggacggcatcattatgatccagacactgctcatcatcctgtttattatcgtgcccatcttcctgctgctcgacaaggacgatagcaaggccggcatggaagaggaccacacctacgaaggactggacatcgaccagaccgccacatacgaggacatcgtgaccctgagaaccggcgaagtgaagtggagcgtgggagagcaccctggacaagaataa

SEQ ID NO: 4965 - DNA, 2277 bp, synthetic construct
  source 1..2277: mol_type = other DNA
atggccttaccagtgaccgccttgctcctgccgctggccttgctgctccacgccgccaggccggacatccagatgacacagagccctagcagcctgtctgccagcgtgggagacagagtgaccatcacatgcaaggccagcgaccacatcaacaactggctggcctggtatcagcagaagcctggcaaggcccctaagctgctgatctacggcgctaccacactggaaacaggcgtgcccagcagattttctggcagcggctctggcaccgacttcaccctgacaatatccagcctccagcctgaggacttcgccacctactactgtcagcagagctggaacaccccttggacattcggccagggcaccaaggtggaaatcaagagactcgaggacctgaagaacgtgttcccacctgaggtggccgtgttcgagcctagcgaggccgagatcagccacacccagaaagccaccctcgtgtgcctggctaccggcttctaccccgaccatgtggaactgtcttggtgggtcaacggcaaagaggtgcacagcggcgtgtgtaccgacccccagccactgaaagaacagcccgccctgaacgacagccggtactgcctgagcagcagactgagagtgtccgccaccttctggcagaacccccggaaccacttcagatgccaggtgcagttctacggcctgagcgagaacgacgagtggacccaggacagagccaagcccgtgacccagatcgtgtctgccgaagcctggggcagagccgattgcggctttaccagcgagagctaccagcagggcgtgctgagcgccaccatcctgtacgagatcctgctgggcaaggccaccctgtacgccgtgctggtgtctgccctggtgctgatggctatggtcaagcggaaggacagccggggaagggccaagcgatctggatctggagcaacaaacttctcactactcaaacaagcaggtgacgtggaggagaatcccgggcctactagtgccaccatggactggatttggcgcatccttttccttgtcggcgctgctaccggcgcccattccgggccccagctccagctgcaagagtctggacctggcctggtcaagcctagcgagacactgagcctgacctgtaccgtgtccggcgatagcatcagcagcggcgattactactggggctggatcagacagcctcctggcaaaggactggaatggatcggccacatctactacagcggcatcagctactacaaccccagcctgaagtccagagtgaccatcagcgtggacaccagccggaaccagttctccctgaagctgtctagcgtgacagccgccgataccgccgtgtactactgcaccagagaggacagcagcaactggcggagtagaggccagggaacactggtcacagttagctctggatccgcacgcagcgaggacaggtataggaaccccaaaggaagtttcgaagttcagctggttgaatctggcggcggactggttcaacctggcggatctctgagactgagctgtgccgcctctggctacgcctttagcagctactgggtcaactgggttcgacaggcccctggcaaaggactggaatgggtcgcccaaatctatcccggcgacggcgacaccaactacaacggcaagttcaagggcagattcaccatcagccgggacaacagcaagaacaccctgtacctccagatgaactccctgagagccgaggacaccgccgtgtactattgtgccagatccatcaccaccgtcgtgggctgcgctatggattattggggccagggaaccctggtcaccgtgtcctctacgcgtatccagaaccctgatcctgccgtgtaccagctgcgggatagcaagagcagcgacaagagcgtgtgtctgttcaccgacttcgacagccagaccaacgtgtcccagagcaaggactccgacgtgtacatcaccgataagtgcgtgctggacatgcggagcatggacttcaagagcaactccgccgtggcctggtccaacaagtccgatttcgcctgcgccaacgccttcaacaacagcattatccccgaggacacattcttcccaagccccgagagcagctgcgacgtgaagctggtggaaaagagcttcgagacagacaccaacctgaacttccagaacctgagcgtgatcggcttcagaatcctgctgctgaaagtggccggctttaacctgctgatgaccctgcggctgtggtccagctaa

SEQ ID NO: 4966 - DNA, 16 bp, synthetic construct
  source 1..16: mol_type = other DNA
gggggggggggggggg

SEQ ID NO: 4967 - DNA, 3150 bp, synthetic construct
  source 1..3150: mol_type = other DNA
atggccttaccagtgaccgccttgctcctgccgctggccttgctgctccacgccgccaggccggacatccagatgacacagagccctagcagcctgtctgccagcgtgggagacagagtgaccatcacatgcaaggccagccaggatgtgggcacagccgtggattggtatcagcagaagcctggcaaggcccctaagctgctgatctactgggccagcacaagacacacaggcgtgcccagcagattttctggcagcggctctggcaccgacttcaccctgacaatatccagcctccagcctgaggacttcgccacctactactgccagcagtacaacagctaccctctgaccttcggccagggcaccaaggtggaaatcaaaagactcgaggacctgaagaacgtgttcccacctgaggtggccgtgttcgagcctagcgaggccgagatcagccacacccagaaagccaccctcgtgtgcctggctaccggcttctaccccgaccatgtggaactgtcttggtgggtcaacggcaaagaggtgcacagcggcgtgtctaccgacccccagccactgaaagaacagcccgccctgaacgacagccggtactgcctgagcagcagactgagagtgtccgccaccttctggcagaacccccggaaccacttcagatgccaggtgcagttctacggcctgagcgagaacgacgagtggacccaggacagagccaagcccgtgacccagatcgtgtctgccgaagcctggggcagagccgattgcctcgaggacctgaagaacgtgttcccacctgaggtggccgtgttcgagcctagcgaggccgagatcagccacacccagaaagccaccctcgtgtgcctggctaccggcttctaccccgaccatgtggaactgtcttggtgggtcaacggcaaagaggtgcacagcggcgtgtctaccgacccccagccactgaaagaacagcccgccctgaacgacagccggtactgcctgagcagcagactgagagtgtccgccaccttctggcagaacccccggaaccacttcagatgccaggtgcagttctacggcctgagcgagaacgacgagtggacccaggacagagccaagcccgtgacccagatcgtgtctgccgaagcctggggcagagccgattgcggatcccagagcttcggcctgctggaccccaagctgtgctacctgctggatggcatcctgttcatctacggcgtgatcctgaccgccctgttcctgagagtgaagttcagcagaagcgccgacgcccctgcctaccagcagggacagaaccaactgtacaacgagctgaacctgggcagacgggaagagtacgacgtgctggacaagcggagaggcagggaccctgagatgggcggaaagccccggagaaagaacccccaggaaggactgtataacgaactccagaaagacaagatggccgaagcctacagcgagatcggcatgaagggcgagcggagaagaggcaagggccacgatggcctgtaccagggcctgagcaccgccaccaaggacacctatgacgccctgcacatgcaggccctgcctccaagaagggccaagcgatctggatctggagcaacaaacttctcactactcaaacaagcaggtgacgtggaggagaatcccgggcctactagtatggactggatttggcgcatccttttccttgtcggcgctgctaccggcgcgcattccttcgaagtgcagctggttgaatcaggtggcggcctggttcaacctggcggatctctgagactgagctgtgccgccagcggctacacctttaccgagtacacaatccactgggtccgacaggcccctggcaaaggacttgagtgggtcgccaacatcaaccccaacaatggcggcaccacctacaaccagaagttcgaggacagattcaccatcagccgggacaacagcaagaacaccctgtacctccagatgaactccctgagagccgaggacaccgccgtgtactattgtgccagaggctggaacttcgactactggggccagggaacactggtcaccgttagctctacgcgtatccagaaccctgatcctgccgtgtaccagctgcgggatagcaagagcagcgacaagagcgtgtgtctgttcaccgacttcgacagccagaccaacgtgtcccagagcaaggactccgacgtgtacatcaccgataagaccgtgctggacatgcggagcatggacttcaagagcaactccgccgtggcctggtccaacaagtccgatttcgcctgcgccaacgccttcaacaacagcattatccccgaggacacattcttcccaagccccgagagcagctgcggtaccatcactcaaggtttggcagtgtcaaccatctcatcattctttccacctggctaccaagtgtccttctgcctggtcatggtgctgctgttcgccgtggataccggcctgtacttcagcgtcaagaccaacatccggtccagcaccagagactggaaggaccacaagttcaagtggcggaaggaccctcaggacaagagggccaagcgatctggatctggagcaacaaacttctcactactcaaacaagcaggtgacgtggaggagaatcccgggccttctagaatggccctgcctgtgacagctctgctgctgcctctggcactgctgctgcacgccgccagacctgccagacctgccaagagcgaggatctgtaccccaatcctaaagaacttcctacacagggcaccttcagcaacgtgtccaccaatgtgtccccagccaagcctaccaccaccgcctgcgccaagtctgaggacctgtatcctaatccaaaaggcggatctcctgctcctagacctcctacaccagctcctacaatcgccagccagcctctgtctctcagacccgaagcctgtagacctgctgctggcggagctgtgcataccagaggactggatttcgcctgcgacatctacatctgggctcctctggctggcacatgtggcgttctgctgctgagcctggtcatcaccctgtactgcaaccaccggaacaggcggagagtgtgcaagtgccctagacctgtggtttaa

SEQ ID NO: 4968 - DNA, 2262 bp, synthetic construct
  source 1..2262: mol_type = other DNA
atggccttaccagtgaccgccttgctcctgccgctggccttgctgctccacgccgccaggccggacatccagatgacacagagccctagcagcctgtctgccagcgtgggagacagagtgaccatcacatgcaaggccagcgaccacatcaacaactggctggcctggtatcagcagaagcctggacaggcccctaagctgctgatctacggcgctaccacactggaaacaggcgtgcccagcagattttctggcagcggctctggcaccgactacaccctgacaatatccagcctccagcctgaggacttcgccacctactactgtcagcagagctggaacaccccttggacattcggccagggcaccaagctggaaatcaagagaggcggaggcggaagtggaggcggaggatctggcggcggaggctctcaagttcagcttcaacagcctggcgctgagctggtcaaacctggcgcttctgtgaagatgagctgcaaagccagcggctacgccttcagcagctactggatcaactggatgaagcagaaacccggccagggactcgaatggatcggccaaatctatcccggcgacggcgacaccaactacaacggcaagttcaagggcagagccacactgaccgccgatacctctagcagcacagcctacatgcagctgagcagcctgaccagcgaagatagcgccgtgtacttctgtgcccggtccatcacaacagtcgtgggctgcgctatggactattggggccagggaacaagcgtgaccgtgtctagtacgcgtaccacgacgccagcgccgcgaccaccaacaccggcgcccaccatcgcgtcgcagcccctgtccctgcgcccagaggcgtgccggccagcggcggggggcgcagtgcacacgagggggctggacttcgcctgtgacatctacatctgggcgcccttggccgggacttgtggggtccttctcctgtcactggttatcaccctttactgcaaacggggcagaaagaaactcctgtatatattcaaacaaccatttatgagaccagtacaaactactcaagaggaagatggctgtagctgccgatttccagaagaagaagaaggaggatgtgaactgagagtgaagttcagcaggagcgcagacgcccccgcgtaccagcagggccagaaccagctctataacgagctgaatctaggacgaagagaggagtacgatgttttggacaagagacgtggccgggaccctgagatggggggaaagccgagaaggaagaaccctcaggaaggcctgtacaatgaactgcagaaagataagatggcggaggcctacagtgagattgggatgaaaggcgagcgccggaggggcaaggggcacgatggcctttaccagggtctcagtacagccaccaaggacacctacgacgcccttcacatgcaggccctgccccctcgctctagagccaagcgatctggatctggagcaacaaacttctcactactcaaacaagcaggtgacgtggaggagaatcccgggcctgggatccacaccatggctagactggccctgtctcctgtgtctagccactggctggttgctctgctgctgcttctgtctgccgctgaacctgtgcctgccgccaaaagcgaggatctgtaccccaatcctaagggcagcgcctgctccagaatctggcagagccctcggtttatcgcccggaagaggggcttcaccgtgaagatgcactgctacgtgaccaacagcaccttcagcatcgtgtcctggctgcggaagcgggaaaccgacaaagaaccccagcaagtgaacctggaacagggccacatgcaccagacacagaacagctccgtgaccacactgattatccaggacatccgcttcgaggacaacgggatctacttctgccagcaagagtgcagcaagaccagcgaggtgtacagaggctgtggcaccgagctgagagtgatgggctttagcacactggcccagctgaagcagcggaacacactgaaggacggcatcattatgatccagacgctgctcatcatcctgtttattatcgtgcccatcttcctgctgctggacaaggacgatagcaaggccggcatggaagaggaccacacctacgaaggactggacatcgaccagaccgccacatacgaggacatcgtgaccctgagaaccggcgaagtgaagtggagcgtgggagagcaccctggacaagaataa

SEQ ID NO: 4969 - DNA, 18 bp, synthetic construct
  source 1..18: mol_type = other DNA
gggggggggggggggggg

SEQ ID NO: 4970 - DNA, 1455 bp, synthetic construct; identical to SEQ ID NO: 4927
  source 1..1455: mol_type = other DNA

SEQ ID NO: 4971 - DNA, 690 bp, synthetic construct; identical to SEQ ID NO: 4964
  source 1..690: mol_type = other DNA

SEQ ID NO: 4972 - DNA, 1455 bp, synthetic construct; identical to SEQ ID NO: 4927
  source 1..1455: mol_type = other DNA

SEQ ID NO: 4973 - DNA, 696 bp, synthetic construct
  source 1..696: mol_type = other DNA
atggctagactggccctgtctcctgtgtctagccactggctggttgctctgctgctgcttctgtctgccgctgaacctgtgcctgccgccaaaagcgaggatctgtaccccaatcctaagggcagcgcctgctccagaatctggcagagccctcggtttatcgcccggaagaggggcttcaccgtgaagatgcactgctacgtgaccaacagcaccttcagcatcgtgtcctggctgcggaagcgggaaaccgacaaagaaccccagcaagtgaacctggaacagggccacatgcaccagacacagaacagctccgtgaccacactgattatccaggacatccgcttcgaggacaacgggatctacttctgccagcaagagtgcagcaagaccagcgaggtgtacagaggctgtggcaccgagctgagagtgatgggctttagcacactggcccagctgaagcagcggaacacactgaaggacggcatcattatgatccagacgctgctcatcatcctgtttattatcgtgcccatcttcctgctgctggacaaggacgatagcaaggccggcatggaagaggaccacacctacgaaggactggacatcgaccagaccgccacatacgaggacatcgtgaccctgagaaccggcgaagtgaagtggagcgtgggagagcaccctggacaagaataa

SEQ ID NO: 4974 - DNA, 1455 bp, synthetic construct; identical to SEQ ID NO: 4927
  source 1..1455: mol_type = other DNA

SEQ ID NO: 4975 - DNA, 378 bp, synthetic construct
  source 1..378: mol_type = other DNA
atggctagactggccctgtctcctgtgcctagccattggatggttgccctgctgctgctcctgtctgctgaacctgttcctgccgccagaagcgaggacagatacagaaaccccaagggcttcagcacactggcccagctgaaacagcggaacaccctgaaggacggcatcattatgatccagacactgctcatcatcctgtttattatcgtgcccatcttcctgctgctcgacaaggacgatagcaaggccggcatggaagaggaccacacctacgaaggactggacatcgaccagaccgccacatacgaggacatcgtgaccctgagaaccggcgaagtgaagtggagcgtgggagagcaccctggacaagaataa

SEQ ID NO: 4976 - DNA, 3375 bp, synthetic construct
  source 1..3375: mol_type = other DNA
atggccttaccagtgaccgccttgctcctgccgctggccttgctgctccacgccgccaggccggacatccagatgacacagagccctagcagcctgtctgccagcgtgggagacagagtgaccatcacatgcaaggccagccaggatgtgggcacagccgtggattggtatcagcagaagcctggcaaggcccctaagctgctgatctactgggccagcacaagacacacaggcgtgcccagcagattttctggcagcggctctggcaccgacttcaccctgacaatatccagcctccagcctgaggacttcgccacctactactgccagcagtacaacagctaccctctgaccttcggccagggcaccaaggtggaaatcaaaagactcgaggacctgaagaacgtgttcccacctgaggtggccgtgttcgagcctagcgaggccgagatcagccacacccagaaagccaccctcgtgtgcctggctaccggcttctaccccgaccatgtggaactgtcttggtgggtcaacggcaaagaggtgcacagcggcgtgtctaccgacccccagccactgaaagaacagcccgccctgaacgacagccggtactgcctgagcagcagactgagagtgtccgccaccttctggcagaacccccggaaccacttcagatgccaggtgcagttctacggcctgagcgagaacgacgagtggacccaggacagagccaagcccgtgacccagatcgtgtctgccgaagcctggggcagagccgattgcctcgaggacctgaagaacgtgttcccacctgaggtggccgtgttcgagcctagcgaggccgagatcagccacacccagaaagccaccctcgtgtgcctggctaccggcttctaccccgaccatgtggaactgtcttggtgggtcaacggcaaagaggtgcacagcggcgtgtctaccgacccccagccactgaaagaacagcccgccctgaacgacagccggtactgcctgagcagcagactgagagtgtccgccaccttctggcagaacccccggaaccacttcagatgccaggtgcagttctacggcctgagcgagaacgacgagtggacccaggacagagccaagcccgtgacccagatcgtgtctgccgaagcctggggcagagccgattgcggatcccagagcttcggcctgctggaccccaagctgtgctacctgctggatggcatcctgttcatctacggcgtgatcctgaccgccctgttcctgagagtgaagttcagcagaagcgccgacgcccctgcctaccagcagggacagaaccaactgtacaacgagctgaacctgggcagacgggaagagtacgacgtgctggacaagcggagaggcagggaccctgagatgggcggaaagccccggagaaagaacccccaggaaggactgtataacgaactccagaaagacaagatggccgaagcctacagcgagatcggcatgaagggcgagcggagaagaggcaagggccacgatggcctgtaccagggcctgagcaccgccaccaaggacacctatgacgccctgcacatgcaggccctgcctccaagaagggccaagcgatctggatctggagcaacaaacttctcactactcaaacaagcaggtgacgtggaggagaatcccgggcctactagtatggactggatttggcgcatccttttccttgtcggcgctgctaccggcgcgcattccttcgaagtgcagctggttgaatcaggtggcggcctggttcaacctggcggatctctgagactgagctgtgccgccagcggctacacctttaccgagtacacaatccactgggtccgacaggcccctggcaaaggacttgagtgggtcgccaacatcaaccccaacaatggcggcaccacctacaaccagaagttcgaggacagattcaccatcagccgggacaacagcaagaacaccctgtacctccagatgaactccctgagagccgaggacaccgccgtgtactattgtgccagaggctggaacttcgactactggggccagggaacactggtcaccgttagctctacgcgtatccagaaccctgatcctgccgtgtaccagctgcgggatagcaagagcagcgacaagagcgtgtgtctgttcaccgacttcgacagccagaccaacgtgtcccagagcaaggactccgacgtgtacatcaccgataagaccgtgctggacatgcggagcatggacttcaagagcaactccgccgtggcctggtccaacaagtccgatttcgcctgcgccaacgccttcaacaacagcattatccccgaggacacattcttcccaagccccgagagcagctgcggtaccatcactcaaggtttggcagtgtcaaccatctcatcattctttccacctggctaccaagtgtccttctgcctggtcatggtgctgctgttcgccgtggataccggcctgtacttcagcgtcaagaccaacatccggtccagcaccagagactggaaggaccacaagttcaagtggcggaaggaccctcaggacaagagggccaagcgatctggatctggagcaacaaacttctcactactcaaacaagcaggtgacgtggaggagaatcccgggccttctagaatggctagactggccctgtctcctgtgtctagccactggctggttgctctgctgctgcttctgtctgccgctgaacctgtgcctgccgccaaaagcgaggatctgtaccccaatcctaagggcagcgcctgctccagaatctggcagagccctcggtttatcgcccggaagaggggcttcaccgtgaagatgcactgctacgtgaccaacagcaccttcagcatcgtgtcctggctgcggaagcgggaaaccgacaaagaaccccagcaagtgaacctggaacagggccacatgcaccagacacagaacagctccgtgaccacactgattatccaggacatccgcttcgaggacaacgggatctacttctgccagcaagagtgcagcaagaccagcgaggtgtacagaggctgtggcaccgagctgagagtgatgggctttagcacactggcccagctgaagcagcggaacacactgaaggacggcatcattatgatccagacgctgctcatcatcctgtttattatcgtgcccatcttcctgctgctggacaaggacgatagcaaggccggcatggaagaggaccacacctacgaaggactggacatcgaccagaccgccacatacgaggacatcgtgaccctgagaaccggcgaagtgaagtggagcgtgggagagcaccctggacaagaataa

SEQ ID NO: 4977 - DNA, 1872 bp, synthetic construct
  source 1..1872: mol_type = other DNA
atggccttaccagtgaccgccttgctcctgccgctggccttgctgctccacgccgccaggccggacatcgtgctgacacagagccctccatctctggccgtgtctctgggacagagagccaccatcagctgtagagccagcgagagcgtggacagctacggcaagaccttcatgcactggcaccagcagaagccaggccagcctcctaagctgctgatctaccgggtgtccaacctggaaagcggcatccctgccagattttctggcagcggcagcagaaccgacttcaccctgaccatcaatcccgtggaagccgacgacgtggcaacctactactgccagcagagcaacgaggaccccttcacatttggcggaggcaccaagctggaaatcaagagactcgaggacctgaagaacgtgttcccacctgaggtggccgtgttcgagcctagcgaggccgagatcagccacacccagaaagccaccctcgtgtgcctggctaccggcttctaccccgaccatgtggaactgtcttggtgggtcaacggcaaagaggtgcacagcggcgtgtgtaccgacccccagccactgaaagaacagcccgccctgaacgacagccggtactgcctgagcagcagactgagagtgtccgccaccttctggcagaacccccggaaccacttcagatgccaggtgcagttctacggcctgagcgagaacgacgagtggacccaggacagagccaagcccgtgacccagatcgtgtctgccgaagcctggggcagagccgattgcggctttaccagcgagagctaccagcagggcgtgctgagcgcctactacatgtacttgttgctgctgctgaagtccgtggtgtacttcgccatcatcacatgctgcctgctgcggagaaccgccttctgctgcaacggcgagaagtctagggccaagcgatctggatctggagcaacaaacttctcactactcaaacaagcaggtgacgtggaggagaatcccgggcctactagtatggactggatttggcgcatccttttccttgtcggcgctgctaccggcgcgcattccttcgaagaagtccaacttgtggagtctggagggggcctggtgcagcccggcggctctctcagactgtcttgtgcggcaagcggctacaccttcacctcttactggatagaatgggtgaggcaggcacctggaaagggactggagtggattggagagattctgccaggagggggagatacaaattacaatgaaatcttcaaggggcgggccaccttttcagcggataccagcaagaatacagcttacctgcagatgaatagcctccgggcagaagataccgctgtttattattgcacgagacgggtgccaataagactggactattgggggcaagggactcttgtcaccgtcagttcaacgcgtatccagaaccctgatcctgccgtgtaccagctgcgggatagcaagagcagcgacaagagcgtgtgtctgttcaccgacttcgacagccagaccaacgtgtcccagagcaaggactccgacgtgtacatcaccgataagtgcgtgctggacatgcggagcatggacttcaagagcaactccgccgtggcctggtccaacaagtccgatttcgcctgcgccaacgccttcaacaacagcattatccccgaggacacattcttcccaagccccgagagcagctgcgacgtgaagctggtggaaaagagcttcgagacagacaccaacctgaacttccagaacctgagcgtgatcggcttcagaatcctgctgctgaaagtggccggctttaacctgctgatgaccctgcggctgtggtccagctaa

SEQ ID NO: 4978 - DNA, 1848 bp, synthetic construct; identical to SEQ ID NO: 4903
  source 1..1848: mol_type = other DNA

SEQ ID NO: 4979 - DNA, 726 bp, synthetic construct; identical to SEQ ID NO: 4926
  source 1..726: mol_type = other DNA

SEQ ID NO: 4980 - DNA, 3324 bp, synthetic construct
  source 1..3324: mol_type = other DNA
atggccttaccagtgaccgccttgctcctgccgctggccttgctgctccacgccgccaggccggacatccagatgacacagagccctagcagcctgtctgccagcgtgggagacagagtgaccatcacatgcaaggccagccaggatgtgggcacagccgtggattggtatcagcagaagcctggcaaggcccctaagctgctgatctactgggccagcacaagacacacaggcgtgcccagcagattttctggcagcggctctggcaccgacttcaccctgacaatatccagcctccagcctgaggacttcgccacctactactgccagcagtacaacagctaccctctgaccttcggccagggcaccaaggtggaaatcaaaagactcgaggacctgaagaacgtgttcccacctgaggtggccgtgttcgagcctagcgaggccgagatcagccacacccagaaagccaccctcgtgtgcctggctaccggcttctaccccgaccatgtggaactgtcttggtgggtcaacggcaaagaggtgcacagcggcgtgtctaccgacccccagccactgaaagaacagcccgccctgaacgacagccggtactgcctgagcagcagactgagagtgtccgccaccttctggcagaacccccggaaccacttcagatgccaggtgcagttctacggcctgagcgagaacgacgagtggacccaggacagagccaagcccgtgacccagatcgtgtctgccgaagcctggggcagagccgattgcctcgaggacctgaagaacgtgttcccacctgaggtggccgtgttcgagcctagcgaggccgagatcagccacacccagaaagccaccctcgtgtgcctggctaccggcttctaccccgaccatgtggaactgtcttggtgggtcaacggcaaagaggtgcacagcggcgtgtctaccgacccccagccactgaaagaacagcccgccctgaacgacagccggtactgcctgagcagcagactgagagtgtccgccaccttctggcagaacccccggaaccacttcagatgccaggtgcagttctacggcctgagcgagaacgacgagtggacccaggacagagccaagcccgtgacccagatcgtgtctgccgaagcctggggcagagccgattgcggatcccagagcttcggcctgctggaccccaagctgtgctacctgctggatggcatcctgttcatctacggcgtgatcctgaccgccctgttcctgagagtgaagttcagcagaagcgccgacgcccctgcctaccagcagggacagaaccaactgtacaacgagctgaacctgggcagacgggaagagtacgacgtgctggacaagcggagaggcagggaccctgagatgggcggaaagccccggagaaagaacccccaggaaggactgtataacgaactccagaaagacaagatggccgaagcctacagcgagatcggcatgaagggcgagcggagaagaggcaagggccacgatggcctgtaccagggcctgagcaccgccaccaaggacacctatgacgccctgcacatgcaggccctgcctccaagaagggccaagcgatctggatctggagcaacaaacttctcactactcaaacaagcaggtgacgtggaggagaatcccgggcctactagtatggactggatttggcgcatccttttccttgtcggcgctgctaccggcgcgcattccttcgaagtgcagctggttgaatcaggtggcggcctggttcaacctggcggatctctgagactgagctgtgccgccagcggctacacctttaccgagtacacaatccactgggtccgacaggcccctggcaaaggacttgagtgggtcgccaacatcaaccccaacaatggcggcaccacctacaaccagaagttcgaggacagattcaccatcagccgggacaacagcaagaacaccctgtacctccagatgaactccctgagagccgaggacaccgccgtgtactattgtgccagaggctggaacttcgactactggggccagggaacactggtcaccgttagctctacgcgtatccagaaccctgatcctgccgtgtaccagctgcgggatagcaagagcagcgacaagagcgtgtgtctgttcaccgacttcgacagccagaccaacgtgtcccagagcaaggactccgacgtgtacatcaccgataagaccgtgctggacatgcggagcatggacttcaagagcaactccgccgtggcctggtccaacaagtccgatttcgcctgcgccaacgccttcaacaacagcattatccccgaggacacattcttcccaagccccgagagcagctgcggtaccatcactcaaggtttggcagtgtcaaccatctcatcattctttccacctggctaccaagtgtccttctgcctggtcatggtgctgctgttcgccgtggataccggcctgtacttcagcgtcaagaccaacatccggtccagcaccagagactggaaggaccacaagttcaagtggcggaaggaccctcaggacaagagggccaagcgatctggatctggagcaacaaacttctcactactcaaacaagcaggtgacgtggaggagaatcccgggccttctagaatgagaatcagcaagccccacctgagatccatcagcatccagtgctacctgtgcctgctgctgaacagccactttctgacagaggccggcatccacgtgttcatcctgggctgtttttctgccggcctgcctaagaccgaggccaactgggttaacgtgatctccgacctgaagaagatcgaggacctgatccagtccatgcacatcgacgccacactgtacaccgagagcgacgtgcaccctagctgtaaagtgaccgccatgaagtgctttctgctggaactgcaagtgatctccctggaaagcggcgacgccagcatccacgacaccgtggaaaacctgattatcctggctaacaacagcctgagcagcaacggcaacgtgaccgagtccggctgtaaagagtgcgaggaactggaagagaagaatatcaaagagttcctccagagcttcgtgcacatcgtgcagatgttcatcaacaccagcgccagaagcgaggacagatacagaaaccccaagggcttcagcacactggcccagctgaaacagcggaacaccctgaaggacggcatcattatgatccagacactgctcatcatcctgtttattatcgtgcccatcttcctgctgctcgacaaggactaa

SEQ ID NO: 4981 - DNA, 2469 bp, synthetic construct
  source 1..2469: mol_type = other DNA
gctagcaccatggccttaccagtgaccgccttgctcctgccgctggccttgctgctccacgccgccaggccggacatccagatgacacagagccctagcagcctgtctgccagcgtgggagacagagtgaccatcacatgcaaggccagccaggatgtgggcacagccgtggattggtatcagcagaagcctggcaaggcccctaagctgctgatctactgggccagcacaagacacacaggcgtgcccagcagattttctggcagcggctctggcaccgacttcaccctgacaatatccagcctccagcctgaggacttcgccacctactactgccagcagtacaacagctaccctctgaccttcggccagggcaccaaggtggaaatcaaaagaggcggaggcggatctggcggcggaggtagcggtggcggaggatctgaagtgcagctggttgaatcaggtggcggcctggttcaacctggcggatctctgagactgagctgtgccgccagcggctacacctttaccgagtacacaatccactgggtccgacaggcccctggcaaaggacttgagtgggtcgccaacatcaaccccaacaatggcggcaccacctacaaccagaagttcgaggacagattcaccatcagccgggacaacagcaagaacaccctgtacctccagatgaactccctgagagccgaggacaccgccgtgtactattgtgccagaggctggaacttcgactactggggccagggaacactggtcaccgttagctctacgcgtaccacgacgccagcgccgcgaccaccaacaccggcgcccaccatcgcgtcgcagcccctgtccctgcgcccagaggcgtgccggccagcggcggggggcgcagtgcacacgagggggctggacttcgcctgtgacatctacatctgggcgcccttggccgggacttgtggggtccttctcctgtcactggttatcaccctttactgcaaacggggcagaaagaaactcctgtatatattcaaacaaccatttatgagaccagtacaaactactcaagaggaagatggctgtagctgccgatttccagaagaagaagaaggaggatgtgaactgagagtgaagttcagcaggagcgcagacgcccccgcgtaccagcagggccagaaccagctctataacgagctgaatctaggacgaagagaggagtacgatgttttggacaagagacgtggccgggaccctgagatggggggaaagccgagaaggaagaaccctcaggaaggcctgtacaatgaactgcagaaagataagatggcggaggcctacagtgagattgggatgaaaggcgagcgccggaggggcaaggggcacgatggcctttaccagggtctcagtacagccaccaaggacacctacgacgcccttcacatgcaggccctgccccctcgctaagtcgagtaatctagaggctccggtgcccgtcagtgggcagagcgcacatcgcccacagtccccgagaagttggggggaggggtcggcaattgaaccggtgcctagagaaggtggcgcggggtaaactgggaaagtgatgtcgtgtactggctccgcctttttcccgagggtgggggagaaccgtatataagtgcagtagtcgccgtgaacgttctttttcgcaacgggtttgccgccagaacacaggtacgatgtaccggatgcagctgctgagctgtatcgccctgtctctggccctggtcacaaatagcgcccctaccagcagcagcaccaagaaaacccagctgcaactggaacacctcctgctggacctccagatgatcctgaacggcatcaacaactacaagaaccccaagctgacccggatgctgaccttcaagttctacatgcccaagaaggccaccgagctgaagcacctccagtgcctggaagaggaactgaagcccctggaagaagtgctgaatctggcccagagcaagaacttccacctgaggccaagggacctgatctccaacatcaacgtgatcgtgctggaactgaaaggcagcgagacaaccttcatgtgcgagtacgccgacgagacagctaccatcgtggaatttctgaatcggtggatcaccttctgccagagcatcatcagcaccctgacagcaagaagtgaagaccgttacaggaaccccaaaggcagcggcggcagcgccaagcctacaacaacccctgctcctagacctcctacaccagctcctacaatcgccagccagcctctgtctctcagacccgaagcctgtagaccagctgctggcggagctgtgcataccagaggactggatttcgcctgcgacatctacatctgggctcctctggctggcacatgtggcgttctgctgctgtccctggtcatcaccctgtactgttaagtcgactgatccgataatcaacctctgg

SEQ ID NO: 4982 - DNA, 726 bp, synthetic construct; identical to SEQ ID NO: 4926
  source 1..726: mol_type = other DNA

SEQ ID NO: 4983 - DNA, 2691 bp, synthetic construct
  source 1..2691: mol_type = other DNA
atggccttaccagtgaccgccttgctcctgccgctggccttgctgctccacgccgccaggccggaagtgcagctggttgaatctggcggaggactggttcaggctggcggatctctgagactgtcttgtgccgccagcggcagaacctttagcatgggctggtttagacaggcccctggcaaagagagagagttcgtcgccgccatcacatactctggcggcagcccttactacgccgactctgtgaagggcagattcaccatcagccgggacaacgccaagaacaccgtgtacctccagatgaacagcctgaagcctgaggacaccgccgtgtactactgcgccgccaatccaacatacggcagcgactggaacgccgagaattggggccagggaacccaagtgacagtgtctagcggtaccgcaagaagtgaagatcgctacaggaaccctaaggggtcagaattcgacatccagatgacacagagccctagcagcctgtctgccagcgtgggagacagagtgaccatcacatgcaaggccagcgaccacatcaacaactggctggcctggtatcagcagaagcctggacaggcccctaagctgctgatctacggcgctaccacactggaaacaggcgtgcccagcagattttctggcagcggctctggcaccgactacaccctgacaatatccagcctccagcctgaggacttcgccacctactactgtcagcagagctggaacaccccttggacattcggccagggcaccaagctggaaatcaagagactcgaggacctgaagaacgtgttcccacctgaggtggccgtgttcgagcctagcgaggccgagatcagccacacccagaaagccaccctcgtgtgcctggctaccggcttctaccccgaccatgtggaactgtcttggtgggtcaacggcaaagaggtgcacagcggcgtgtgtaccgacccccagccactgaaagaacagcccgccctgaacgacagccggtactgcctgagcagcagactgagagtgtccgccaccttctggcagaacccccggaaccacttcagatgccaggtgcagttctacggcctgagcgagaacgacgagtggacccaggacagagccaagcccgtgacccagatcgtgtctgccgaagcctggggcagagccgattgcggctttaccagcgagagctaccagcagggcgtgctgagcgccaccatcctgtacgagatcctgctgggcaaggccaccctgtacgccgtgctggtgtctgccctggtgctgatggctatggtcaagcggaaggacagccggggaagggccaagcgatctggatctggagcaacaaacttctcactactcaaacaagcaggtgacgtggaggagaatcccgggcctactagtgccaccatggactggatttggcgcatccttttccttgtcggcgctgctaccggcgcccattccgggcccgaagtgcaactggttgaatccggtggcggcctggtgcaagcaggcggatctctcagacttagctgtgccgcctccggcagaaccttcacaatgggatggtttaggcaggctccagggaaagagagagagttcgtcgccgccatctctctgtctcccacactggcctactacgccgactctgtgaaaggccggttcaccatctccagagataatgccaagaacaccgtggtgctgcaaatgaactctctgaaacccgaggatacagccctgtactattgtgccgctgaccggaagtccgtgatgagcatcagacccgattactggggacagggcacacaagtcacagtgtcctctggatccggcggcggaggatctggcggaggcggatctgggggcggaggctctttcgaacaagttcagcttcaacagcctggcgctgagctggtcaaacctggcgcttctgtgaagatgagctgcaaagccagcggctacgccttcagcagctactggatcaactggatgaagcagaaacccggccagggactcgaatggatcggccaaatctatcccggcgacggcgacaccaactacaacggcaagttcaagggcagagccacactgaccgccgatacctctagcagcacagcctacatgcagctgagcagcctgaccagcgaagatagcgccgtgtacttctgtgcccggtccatcacaacagtcgtgggctgcgctatggactattggggccagggaacaagcgtgaccgtgtctagtacgcgtatccagaaccctgatcctgccgtgtaccagctgcgggatagcaagagcagcgacaagagcgtgtgtctgttcaccgacttcgacagccagaccaacgtgtcccagagcaaggactccgacgtgtacatcaccgataagtgcgtgctggacatgcggagcatggacttcaagagcaactccgccgtggcctggtccaacaagtccgatttcgcctgcgccaacgccttcaacaacagcattatccccgaggacacattcttcccaagccccgagagcagctgcgacgtgaagctggtggaaaagagcttcgagacagacaccaacctgaacttccagaacctgagcgtgatcggcttcagaatcctgctgctgaaagtggccggctttaacctgctgatgaccctgcggctgtggtccagctaa

SEQ ID NO: 4984 - DNA, 1962 bp, synthetic construct
  source 1..1962: mol_type = other DNA
atggccttaccagtgaccgccttgctcctgccgctggccttgctgctccacgccgccaggccggcatgcgctagaagcgaagatcggtatcggaaccccaagggtaccggcggaggcggatctggcggcggaggtagcggtggcggaggatctgaattcgacatccagatgacacagagccctagcagcctgtctgccagcgtgggagacagagtgaccatcacatgcaaggccagcgaccacatcaacaactggctggcctggtatcagcagaagcctggcaaggcccctaagctgctgatctacggcgctaccacactggaaacaggcgtgcccagcagattttctggcagcggctctggcaccgacttcaccctgacaatatccagcctccagcctgaggacttcgccacctactactgtcagcagagctggaacaccccttggacattcggccagggcaccaaggtggaaatcaagagactcgaggacctgaagaacgtgttcccacctgaggtggccgtgttcgagcctagcgaggccgagatcagccacacccagaaagccaccctcgtgtgcctggctaccggcttctaccccgaccatgtggaactgtcttggtgggtcaacggcaaagaggtgcacagcggcgtgtgtaccgacccccagccactgaaagaacagcccgccctgaacgacagccggtactgcctgagcagcagactgagagtgtccgccaccttctggcagaacccccggaaccacttcagatgccaggtgcagttctacggcctgagcgagaacgacgagtggacccaggacagagccaagcccgtgacccagatcgtgtctgccgaagcctggggcagagccgattgcggctttaccagcgagagctaccagcagggcgtgctgagcgccaccatcctgtacgagatcctgctgggcaaggccaccctgtacgccgtgctggtgtctgccctggtgctgatggctatggtcaagcggaaggacagccggggaagggccaagcgatctggatctggagcaacaaacttctcactactcaaacaagcaggtgacgtggaggagaatcccgggcctactagtatggactggatttggcgcatccttttccttgtcggcgctgctaccggcgcgcattccttcgaagttcagctggttgaatctggcggcggactggttcaacctggcggatctctgagactgagctgtgccgcctctggctacgcctttagcagctactgggtcaactgggttcgacaggcccctggcaaaggactggaatgggtcgcccaaatctatcccggcgacggcgacaccaactacaacggcaagttcaagggcagattcaccatcagccgggacaacagcaagaacaccctgtacctccagatgaactccctgagagccgaggacaccgccgtgtactattgtgccagatccatcaccaccgtcgtgggctgcgctatggattattggggccagggaaccctggtcaccgtgtcctctacgcgtatccagaaccctgatcctgccgtgtaccagctgcgggatagcaagagcagcgacaagagcgtgtgtctgttcaccgacttcgacagccagaccaacgtgtcccagagcaaggactccgacgtgtacatcaccgataagtgcgtgctggacatgcggagcatggacttcaagagcaactccgccgtggcctggtccaacaagtccgatttcgcctgcgccaacgccttcaacaacagcattatccccgaggacacattcttcccaagccccgagagcagctgcgacgtgaagctggtggaaaagagcttcgagacagacaccaacctgaacttccagaacctgagcgtgatcggcttcagaatcctgctgctgaaagtggccggctttaacctgctgatgaccctgcggctgtggtccagctaa

SEQ ID NO: 4985 - DNA, 1464 bp, synthetic construct
  source 1..1464: mol_type = other DNA
atggccttaccagtgaccgccttgctcctgccgctggccttgctgctccacgccgccaggccggacatcgtgatgacccagacccccctgaccctgagcgtgacaatcggacagcctgccagcatctcctgcaagagcagccagagcctgctggacagcgacggcaggacctacctgaactggctgctgcagaggccaggccagagccccgagagactgatctacctggtgtccaagctggactccggcgtgcccgatagattcacaggcagcggctccggcaccgacttcaccctgaagatcagccgggtggaagccgaggacctgggcgtgtactgttgtttccagggcacccacttccctttcaccttcggcggagggaccaaggtggaaatcaagggcggcggaggcggaagtggaggcggaggatctggcggcggaggctctcaggtgcaactgcagcagcctggcgctgaacttgtgcggccaggcgcctctgtgaagctgagctgtaaagccagcggctacaccttcaccagctactggatgaactgggtcaagcagcgcccaggccagggcctggaatggatcggaatgatcgaccccagcgacagcgagacacactacaaccacatcttcaaggacaaggccaccctgaccgtggacaagtccagcagcacagcctacctgcaactgtccagcctgaccagcgaggacagcgccgtgtactactgcgcccggaacctgtatctgtggggccagggaacaagcgtgaccgtgtctagcacgcgtaccacgacgccagcgccgcgaccaccaacaccggcgcccaccatcgcgtcgcagcccctgtccctgcgcccagaggcgtgccggccagcggcggggggcgcagtgcacacgagggggctggacttcgcctgtgacatctacatctgggcgcccttggccgggacttgtggggtccttctcctgtcactggttatcaccctttactgcaaacggggcagaaagaaactcctgtatatattcaaacaaccatttatgagaccagtacaaactactcaagaggaagatggctgtagctgccgatttccagaagaagaagaaggaggatgtgaactgagagtgaagttcagcaggagcgcagacgcccccgcgtaccagcagggccagaaccagctctataacgagctgaatctaggacgaagagaggagtacgatgttttggacaagagacgtggccgggaccctgagatggggggaaagccgagaaggaagaaccctcaggaaggcctgtacaatgaactgcagaaagataagatggcggaggcctacagtgagattgggatgaaaggcgagcgccggaggggcaaggggcacgatggcctttaccagggtctcagtacagccaccaaggacacctacgacgcccttcacatgcaggccctgccccctcgctaa

SEQ ID NO: 4986 - DNA, 669 bp, synthetic construct; identical to SEQ ID NO: 4936
  source 1..669: mol_type = other DNA

SEQ ID NO: 4987 - DNA, 2283 bp, synthetic construct
  source 1..2283: mol_type = other DNA
atggccttaccagtgaccgccttgctcctgccgctggccttgctgctccacgccgccaggccggacatcgtgatgacccagacccccctgaccctgagcgtgacaatcggacagcctgccagcatctcctgcaagagcagccagagcctgctggacagcgacggcaggacctacctgaactggctgctgcagaggccaggccagagccccgagagactgatctacctggtgtccaagctggactccggcgtgcccgatagattcacaggcagcggctccggcaccgacttcaccctgaagatcagccgggtggaagccgaggacctgggcgtgtactgttgtttccagggcacccacttccctttcaccttcggcggagggaccaaggtggaaatcaagggcggcggaggcggaagtggaggcggaggatctggcggcggaggctctcaggtgcaactgcagcagcctggcgctgaacttgtgcggccaggcgcctctgtgaagctgagctgtaaagccagcggctacaccttcaccagctactggatgaactgggtcaagcagcgcccaggccagggcctggaatggatcggaatgatcgaccccagcgacagcgagacacactacaaccacatcttcaaggacaaggccaccctgaccgtggacaagtccagcagcacagcctacctgcaactgtccagcctgaccagcgaggacagcgccgtgtactactgcgcccggaacctgtatctgtggggccagggaacaagcgtgaccgtgtctagcacgcgtaccacgacgccagcgccgcgaccaccaacaccggcgcccaccatcgcgtcgcagcccctgtccctgcgcccagaggcgtgccggccagcggcggggggcgcagtgcacacgagggggctggacttcgcctgtgacatctacatctgggcgcccttggccgggacttgtggggtccttctcctgtcactggttatcaccctttactgcaaacggggcagaaagaaactcctgtatatattcaaacaaccatttatgagaccagtacaaactactcaagaggaagatggctgtagctgccgatttccagaagaagaagaaggaggatgtgaactgagagtgaagttcagcaggagcgcagacgcccccgcgtaccagcagggccagaaccagctctataacgagctgaatctaggacgaagagaggagtacgatgttttggacaagagacgtggccgggaccctgagatggggggaaagccgagaaggaagaaccctcaggaaggcctgtacaatgaactgcagaaagataagatggcggaggcctacagtgagattgggatgaaaggcgagcgccggaggggcaaggggcacgatggcctttaccagggtctcagtacagccaccaaggacacctacgacgcccttcacatgcaggccctgccccctcgctctagagccaagcgatctggatctggagcaacaaacttctcactactcaaacaagcaggtgacgtggaggagaatcccgggcctgggatccacaccatgtaccggatgcagctgctgagctgtatcgccctgtctctggccctggtcacaaatagcgcccctaccagcagcagcaccaagaaaacccagctgcaactggaacacctcctgctggacctccagatgatcctgaacggcatcaacaactacaagaaccccaagctgacccggatgctgaccttcaagttctacatgcccaagaaggccaccgagctgaagcacctccagtgcctggaagaggaactgaagcccctggaagaagtgctgaatctggcccagagcaagaacttccacctgaggccaagggacctgatctccaacatcaacgtgatcgtgctggaactgaaaggcagcgagacaaccttcatgtgcgagtacgccgacgagacagctaccatcgtggaatttctgaatcggtggatcaccttctgccagagcatcatcagcaccctgacagcaagaagtgaagaccgttacaggaaccccaaaggcagcggcggcagcgccaagcctacaacaacccctgctcctagacctcctacaccagctcctacaatcgccagccagcctctgtctctcagacccgaagcctgtagaccagctgctggcggagctgtgcataccagaggactggatttcgcctgcgacatctacatctgggctcctctggctggcacatgtggcgttctgctgctgtccctggtcatcaccctgtactgttaa

SEQ ID NO: 4988 - DNA, 1935 bp, synthetic construct
  source 1..1935: mol_type = other DNA
atggccttaccagtgaccgccttgctcctgccgctggccttgctgctccacgccgccaggccggacatcgtgatgacccagacccccctgaccctgagcgtgacaatcggacagcctgccagcatctcctgcaagagcagccagagcctgctggacagcgacggcaggacctacctgaactggctgctgcagaggccaggccagagccccgagagactgatctacctggtgtccaagctggactccggcgtgcccgatagattcacaggcagcggctccggcaccgacttcaccctgaagatcagccgggtggaagccgaggacctgggcgtgtactgttgtttccagggcacccacttccctttcaccttcggcggagggaccaaggtggaaatcaagggcggcggaggcggaagtggaggcggaggatctggcggcggaggctctcaggtgcaactgcagcagcctggcgctgaacttgtgcggccaggcgcctctgtgaagctgagctgtaaagccagcggctacaccttcaccagctactggatgaactgggtcaagcagcgcccaggccagggcctggaatggatcggaatgatcgaccccagcgacagcgagacacactacaaccacatcttcaaggacaaggccaccctgaccgtggacaagtccagcagcacagcctacctgcaactgtccagcctgaccagcgaggacagcgccgtgtactactgcgcccggaacctgtatctgtggggccagggaacaagcgtgaccgtgtctagcacgcgtaccacgacgccagcgccgcgaccaccaacaccggcgcccaccatcgcgtcgcagcccctgtccctgcgcccagaggcgtgccggccagcggcggggggcgcagtgcacacgagggggctggacttcgcctgtgacatctacatctgggcgcccttggccgggacttgtggggtccttctcctgtcactggttatcaccctttactgcaaacggggcagaaagaaactcctgtatatattcaaacaaccatttatgagaccagtacaaactactcaagaggaagatggctgtagctgccgatttccagaagaagaagaaggaggatgtgaactgagagtgaagttcagcaggagcgcagacgcccccgcgtaccagcagggccagaaccagctctataacgagctgaatctaggacgaagagaggagtacgatgttttggacaagagacgtggccgggaccctgagatggggggaaagccgagaaggaagaaccctcaggaaggcctgtacaatgaactgcagaaagataagatggcggaggcctacagtgagattgggatgaaaggcgagcgccggaggggcaaggggcacgatggcctttaccagggtctcagtacagccaccaaggacacctacgacgcccttcacatgcaggccctgccccctcgctctagagccaagcgatctggatctggagcaacaaacttctcactactcaaacaagcaggtgacgtggaggagaatcccgggcctgggatccacaccatggctagactggccctgtctcctgtgcctagccattggatggttgccctgctgctgctcctgtctgctgaacctgttcctgccgccagaagcgaggacagatacagaaaccccaagggcttcagcacactggcccagctgaaacagcggaacaccctgaaggacggcatcattatgatccagacactgctcatcatcctgtttattatcgtgcccatcttcctgctgctcgacaaggacgatagcaaggccggcatggaagaggaccacacctacgaaggactggacatcgaccagaccgccacatacgaggacatcgtgaccctgagaaccggcgaagtgaagtggagcgtgggagagcaccctggacaagaataa

SEQ ID NO: 4989 - DNA, 2247 bp, synthetic construct
  source 1..2247: mol_type = other DNA
atggccttaccagtgaccgccttgctcctgccgctggccttgctgctccacgccgccaggccggacatcgtgatgacccagacccccctgaccctgagcgtgacaatcggacagcctgccagcatctcctgcaagagcagccagagcctgctggacagcgacggcaggacctacctgaactggctgctgcagaggccaggccagagccccgagagactgatctacctggtgtccaagctggactccggcgtgcccgatagattcacaggcagcggctccggcaccgacttcaccctgaagatcagccgggtggaagccgaggacctgggcgtgtactgttgtttccagggcacccacttccctttcaccttcggcggagggaccaaggtggaaatcaagggcggcggaggcggaagtggaggcggaggatctggcggcggaggctctcaggtgcaactgcagcagcctggcgctgaacttgtgcggccaggcgcctctgtgaagctgagctgtaaagccagcggctacaccttcaccagctactggatgaactgggtcaagcagcgcccaggccagggcctggaatggatcggaatgatcgaccccagcgacagcgagacacactacaaccacatcttcaaggacaaggccaccctgaccgtggacaagtccagcagcacagcctacctgcaactgtccagcctgaccagcgaggacagcgccgtgtactactgcgcccggaacctgtatctgtggggccagggaacaagcgtgaccgtgtctagcacgcgtaccacgacgccagcgccgcgaccaccaacaccggcgcccaccatcgcgtcgcagcccctgtccctgcgcccagaggcgtgccggccagcggcggggggcgcagtgcacacgagggggctggacttcgcctgtgacatctacatctgggcgcccttggccgggacttgtggggtccttctcctgtcactggttatcaccctttactgcaaacggggcagaaagaaactcctgtatatattcaaacaaccatttatgagaccagtacaaactactcaagaggaagatggctgtagctgccgatttccagaagaagaagaaggaggatgtgaactgagagtgaagttcagcaggagcgcagacgcccccgcgtaccagcagggccagaaccagctctataacgagctgaatctaggacgaagagaggagtacgatgttttggacaagagacgtggccgggaccctgagatggggggaaagccgagaaggaagaaccctcaggaaggcctgtacaatgaactgcagaaagataagatggcggaggcctacagtgagattgggatgaaaggcgagcgccggaggggcaaggggcacgatggcctttaccagggtctcagtacagccaccaaggacacctacgacgcccttcacatgcaggccctgccccctcgctctagagccaagcgatctggatctggagcaacaaacttctcactactcaaacaagcaggtgacgtggaggagaatcccgggcctgggatccacaccatggctagactggccctgtctcctgtgcctagccattggatggttgccctgctgctgctcctgtctgctgaacctgttcctgccgccagaagcgaggacagatacagaaaccccaagggcagcgcctgctccagaatctggcaaagccccagattcattgcccggaagaggggcttcaccgtgaagatgcactgctacatgaacagcgccagcggcaacgtttcctggctgtggaagcaagagatggacgagaaccctcagcagctgaagctggaaaagggccgcatggaagagagccagaacgagtctctggccacactgaccatccagggcatcagattcgaggacaacggcatctacttttgccagcagaagtgcaacaacaccagcgaggtgtaccaaggctgtggcaccgagctgagagtgatgggctttagcacactggcccagctgaaacagcggaacaccctgaaggacggcatcattatgatccagacactgctcatcatcctgtttattatcgtgcccatcttcctgctgctcgacaaggacgatagcaaggccggcatggaagaggaccacacctacgaaggactggacatcgaccagaccgccacatacgaggacatcgtgaccctgagaaccggcgaagtgaagtggagcgtgggagagcaccctggacaagaataa

SEQ ID NO: 4990 - DNA, 726 bp, synthetic construct; identical to SEQ ID NO: 4926
  source 1..726: mol_type = other DNA

SEQ ID NO: 4991 - DNA, 1947 bp, synthetic construct
  source 1..1947: mol_type = other DNA
atggccttaccagtgaccgccttgctcctgccgctggccttgctgctccacgccgccaggccgcagatcgtgctgacacagagccctgccatcatgtccgcttctcccggcgagaaagtgaccatgacatgtagcgccagcagcagcgtgtccttcatgcactggtatcagcagaagtccggcacaagccccaagcggtggatctacgataccagcacactggcctctggcgtgccagccagatttggcggatctggcagcggcacatcttacagcctgaccatcagcagcatggaagccgaagatgccgccacctactactgccagcagtggtccagcaatcccctgacatttggagccggcaccaagctggaactgaagagactcgaggacctgaagaacgtgttcccacctgaggtggccgtgttcgagcctagcgaggccgagatcagccacacccagaaagccaccctcgtgtgcctggctaccggcttctaccccgaccatgtggaactgtcttggtgggtcaacggcaaagaggtgcacagcggcgtgtgtaccgacccccagccactgaaagaacagcccgccctgaacgacagccggtactgcctgagcagcagactgagagtgtccgccaccttctggcagaacccccggaaccacttcagatgccaggtgcagttctacggcctgagcgagaacgacgagtggacccaggacagagccaagcccgtgacccagatcgtgtctgccgaagcctggggcagagccgattgcggctttaccagcgagagctaccagcagggcgtgctgagcgccaccatcctgtacgagatcctgctgggcaaggccaccctgtacgccgtgctggtgtctgccctggtgctgatggctatggtcaagcggaaggacagccggggaagggccaagcgatctggatctggagcaacaaacttctcactactcaaacaagcaggtgacgtggaggagaatcccgggcctactagtgccaccatggactggatttggcgcatccttttccttgtcggcgctgctaccggcgcccattccgggcccgccagaagcgaggacagatacagaaaccccaaaggatccggcggcggaggatctggcggaggcggatctgggggcggaggctctttcgaacaagttcagctgcaacagagcggccctgagctggttaagcctggcgcttctgtgcggatctcttgcaaggccagcggctacaccttcaccagctactacatccactgggtcaagcagcggcctggacagggactcgaatggatcggctggatctaccccggcaacctgaacaccaagtacaacgagaagttcaagggcaaagccacactgaccgccgacaagagcagcagcacagcctacatgcagctgagcagcctgacaagcgaggacagcgccgtgtacttctgcgccagatacgactggtacttcgacgtgtggggagccggaaccaccgtgacagtttcttctacgcgtatccagaaccctgatcctgccgtgtaccagctgcgggatagcaagagcagcgacaagagcgtgtgtctgttcaccgacttcgacagccagaccaacgtgtcccagagcaaggactccgacgtgtacatcaccgataagtgcgtgctggacatgcggagcatggacttcaagagcaactccgccgtggcctggtccaacaagtccgatttcgcctgcgccaacgccttcaacaacagcattatccccgaggacacattcttcccaagccccgagagcagctgcgacgtgaagctggtggaaaagagcttcgagacagacaccaacctgaacttccagaacctgagcgtgatcggcttcagaatcctgctgctgaaagtggccggctttaacctgctgatgaccctgcggctgtggtccagctaa

SEQ ID NO: 4992 - DNA, 1965 bp, synthetic construct
  source 1..1965: mol_type = other DNA
atggccttaccagtgaccgccttgctcctgccgctggccttgctgctccacgccgccaggccggacatccagttgacccagtcccccagctcactcagcgccagtgtgggggaccgggtgaccattacctgtaaagccagtcagagtgtggactatgagggggatagcttcctgaattggtatcagcagaagcctggcaaagccccaaagctgctgatctacgctgcatctaatctggagtcaggcgtgccttctaggttctccggtagtgggtctgggaccgatttcacattgaccatttcatccctccaacccgaggatttcgctacatattactgtcagcagtccaatgaggaccctctcacctttggccagggcaccaaagttgaaattaagagactcgaggacctgaagaacgtgttcccacctgaggtggccgtgttcgagcctagcgaggccgagatcagccacacccagaaagccaccctcgtgtgcctggctaccggcttctaccccgaccatgtggaactgtcttggtgggtcaacggcaaagaggtgcacagcggcgtgtgtaccgacccccagccactgaaagaacagcccgccctgaacgacagccggtactgcctgagcagcagactgagagtgtccgccaccttctggcagaacccccggaaccacttcagatgccaggtgcagttctacggcctgagcgagaacgacgagtggacccaggacagagccaagcccgtgacccagatcgtgtctgccgaagcctggggcagagccgattgcggctttaccagcgagagctaccagcagggcgtgctgagcgccaccatcctgtacgagatcctgctgggcaaggccaccctgtacgccgtgctggtgtctgccctggtgctgatggctatggtcaagcggaaggacagccggggaagggccaagcgatctggatctggagcaacaaacttctcactactcaaacaagcaggtgacgtggaggagaatcccgggcctactagtgccaccatggactggatttggcgcatccttttccttgtcggcgctgctaccggcgcccattccgggcccgccagaagcgaggacagatacagaaaccccaaaggatccggcggcggaggatctggcggaggcggatctgggggcggaggctctttcgaagaagtccaacttgtggagtctggagggggcctggtgcagcccggcggctctctcagactgtcttgtgcggcaagcggctacaccttcagctcttactggatagaatgggtgaggcaggcacctggaaagggactggagtggattggagagattctgccaggagggggagatacaaattacaatgaaatcttcaaggggcgggccaccttttcagcggataccagcaagaatacagcttacctgcagatgaatagcctccgggcagaagataccgctgtttattattgcacgagacgggtgccaataagactggactattgggggcaagggactcttgtcaccgtcagttcaacgcgtatccagaaccctgatcctgccgtgtaccagctgcgggatagcaagagcagcgacaagagcgtgtgtctgttcaccgacttcgacagccagaccaacgtgtcccagagcaaggactccgacgtgtacatcaccgataagtgcgtgctggacatgcggagcatggacttcaagagcaactccgccgtggcctggtccaacaagtccgatttcgcctgcgccaacgccttcaacaacagcattatccccgaggacacattcttcccaagccccgagagcagctgcgacgtgaagctggtggaaaagagcttcgagacagacaccaacctgaacttccagaacctgagcgtgatcggcttcagaatcctgctgctgaaagtggccggctttaacctgctgatgaccctgcggctgtggtccagctaa

SEQ ID NO: 4993 - DNA, 2259 bp, synthetic construct
  source 1..2259: mol_type = other DNA
atggccttaccagtgaccgccttgctcctgccgctggccttgctgctccacgccgccaggccggacatccagatgacacagagccctagcagcctgtctgccagcgtgggagacagagtgaccatcacatgcaaggccagcgaccacatcaacaactggctggcctggtatcagcagaagcctggcaaggcccctaagctgctgatctacggcgctaccacactggaaacaggcgtgcccagcagattttctggcagcggctctggcaccgacttcaccctgacaatatccagcctccagcctgaggacttcgccacctactactgtcagcagagctggaacaccccttggacattcggccagggcaccaaggtggaaatcaagagactcgaggacctgaagaacgtgttcccacctgaggtggccgtgttcgagcctagcgaggccgagatcagccacacccagaaagccaccctcgtgtgcctggctaccggcttctaccccgaccatgtggaactgtcttggtgggtcaacggcaaagaggtgcacagcggcgtgtgtaccgacccccagccactgaaagaacagcccgccctgaacgacagccggtactgcctgagcagcagactgagagtgtccgccaccttctggcagaacccccggaaccacttcagatgccaggtgcagttctacggcctgagcgagaacgacgagtggacccaggacagagccaagcccgtgacccagatcgtgtctgccgaagcctggggcagagccgattgcggctttaccagcgagagctaccagcagggcgtgctgagcgccaccatcctgtacgagatcctgctgggcaaggccaccctgtacgccgtgctggtgtctgccctggtgctgatggctatggtcaagcggaaggacagccggggaagggccaagcgatctggatctggagcaacaaacttctcactactcaaacaagcaggtgacgtggaggagaatcccgggcctactagtgccaccatggactggatttggcgcatccttttccttgtcggcgctgctaccggcgcccattccgggcccgaagtgcagctggttgaatctggcggaggactggttcaggctggcggatctctgagactgtcttgtgccgccagcggcagaacctttagcatgggctggtttagacaggcccctggcaaagagagagagttcgtcgccgccatcacatactctggcggcagcccttactacgccgactctgtgaagggcagattcaccatcagccgggacaacgccaagaacaccgtgtacctccagatgaacagcctgaagcctgaggacaccgccgtgtactactgcgccgccaatccaacatacggcagcgactggaacgccgagaattggggccagggaacccaagtgacagtgtctagcggatcccgcagcgaggacaggtataggttcgaagttcagctggttgaatctggcggcggactggttcaacctggcggatctctgagactgagctgtgccgcctctggctacgcctttagcagctactgggtcaactgggttcgacaggcccctggcaaaggactggaatgggtcgcccaaatctatcccggcgacggcgacaccaactacaacggcaagttcaagggcagattcaccatcagccgggacaacagcaagaacaccctgtacctccagatgaactccctgagagccgaggacaccgccgtgtactattgtgccagatccatcaccaccgtcgtgggctgcgctatggattattggggccagggaaccctggtcaccgtgtcctctacgcgtatccagaaccctgatcctgccgtgtaccagctgcgggatagcaagagcagcgacaagagcgtgtgtctgttcaccgacttcgacagccagaccaacgtgtcccagagcaaggactccgacgtgtacatcaccgataagtgcgtgctggacatgcggagcatggacttcaagagcaactccgccgtggcctggtccaacaagtccgatttcgcctgcgccaacgccttcaacaacagcattatccccgaggacacattcttcccaagccccgagagcagctgcgacgtgaagctggtggaaaagagcttcgagacagacaccaacctgaacttccagaacctgagcgtgatcggcttcagaatcctgctgctgaaagtggccggctttaacctgctgatgaccctgcggctgtggtccagctaa

SEQ ID NO: 4994 - DNA, 1950 bp, synthetic construct
  source 1..1950: mol_type = other DNA
atggccttaccagtgaccgccttgctcctgccgctggccttgctgctccacgccgccaggccggcatgcagaagtgaagatcgctacaggggtaccggcggaggcggatctggcggcggaggtagcggtggcggaggatctgaattcgacatccagatgacacagagccctagcagcctgtctgccagcgtgggagacagagtgaccatcacatgcaaggccagcgaccacatcaacaactggctggcctggtatcagcagaagcctggcaaggcccctaagctgctgatctacggcgctaccacactggaaacaggcgtgcccagcagattttctggcagcggctctggcaccgacttcaccctgacaatatccagcctccagcctgaggacttcgccacctactactgtcagcagagctggaacaccccttggacattcggccagggcaccaaggtggaaatcaagagactcgaggacctgaagaacgtgttcccacctgaggtggccgtgttcgagcctagcgaggccgagatcagccacacccagaaagccaccctcgtgtgcctggctaccggcttctaccccgaccatgtggaactgtcttggtgggtcaacggcaaagaggtgcacagcggcgtgtgtaccgacccccagccactgaaagaacagcccgccctgaacgacagccggtactgcctgagcagcagactgagagtgtccgccaccttctggcagaacccccggaaccacttcagatgccaggtgcagttctacggcctgagcgagaacgacgagtggacccaggacagagccaagcccgtgacccagatcgtgtctgccgaagcctggggcagagccgattgcggctttaccagcgagagctaccagcagggcgtgctgagcgccaccatcctgtacgagatcctgctgggcaaggccaccctgtacgccgtgctggtgtctgccctggtgctgatggctatggtcaagcggaaggacagccggggaagggccaagcgatctggatctggagcaacaaacttctcactactcaaacaagcaggtgacgtggaggagaatcccgggcctactagtatggactggatttggcgcatccttttccttgtcggcgctgctaccggcgcgcattccttcgaagttcagctggttgaatctggcggcggactggttcaacctggcggatctctgagactgagctgtgccgcctctggctacgcctttagcagctactgggtcaactgggttcgacaggcccctggcaaaggactggaatgggtcgcccaaatctatcccggcgacggcgacaccaactacaacggcaagttcaagggcagattcaccatcagccgggacaacagcaagaacaccctgtacctccagatgaactccctgagagccgaggacaccgccgtgtactattgtgccagatccatcaccaccgtcgtgggctgcgctatggattattggggccagggaaccctggtcaccgtgtcctctacgcgtatccagaaccctgatcctgccgtgtaccagctgcgggatagcaagagcagcgacaagagcgtgtgtctgttcaccgacttcgacagccagaccaacgtgtcccagagcaaggactccgacgtgtacatcaccgataagtgcgtgctggacatgcggagcatggacttcaagagcaactccgccgtggcctggtccaacaagtccgatttcgcctgcgccaacgccttcaacaacagcattatccccgaggacacattcttcccaagccccgagagcagctgcgacgtgaagctggtggaaaagagcttcgagacagacaccaacctgaacttccagaacctgagcgtgatcggcttcagaatcctgctgctgaaagtggccggctttaacctgctgatgaccctgcggctgtggtccagctaa

SEQ ID NO: 4995 - DNA, 2259 bp, synthetic construct
  source 1..2259: mol_type = other DNA
atggccttaccagtgaccgccttgctcctgccgctggccttgctgctccacgccgccaggccggacatccagatgacacagagccctagcagcctgtctgccagcgtgggagacagagtgaccatcacatgcaaggccagcgaccacatcaacaactggctggcctggtatcagcagaagcctggcaaggcccctaagctgctgatctacggcgctaccacactggaaacaggcgtgcccagcagattttctggcagcggctctggcaccgacttcaccctgacaatatccagcctccagcctgaggacttcgccacctactactgtcagcagagctggaacaccccttggacattcggccagggcaccaaggtggaaatcaagagactcgaggacctgaagaacgtgttcccacctgaggtggccgtgttcgagcctagcgaggccgagatcagccacacccagaaagccaccctcgtgtgcctggctaccggcttctaccccgaccatgtggaactgtcttggtgggtcaacggcaaagaggtgcacagcggcgtgtgtaccgacccccagccactgaaagaacagcccgccctgaacgacagccggtactgcctgagcagcagactgagagtgtccgccaccttctggcagaacccccggaaccacttcagatgccaggtgcagttctacggcctgagcgagaacgacgagtggacccaggacagagccaagcccgtgacccagatcgtgtctgccgaagcctggggcagagccgattgcggctttaccagcgagagctaccagcagggcgtgctgagcgccaccatcctgtacgagatcctgctgggcaaggccaccctgtacgccgtgctggtgtctgccctggtgctgatggctatggtcaagcggaaggacagccggggaagggccaagcgatctggatctggagcaacaaacttctcactactcaaacaagcaggtgacgtggaggagaatcccgggcctactagtgccaccatggactggatttggcgcatccttttccttgtcggcgctgctaccggcgcccattccgggcccgaagtgcaactggttgaatccggtggcggcctggtgcaagcaggcggatctctcagacttagctgtgccgcctccggcagaaccttcacaatgggatggtttaggcaggctccagggaaagagagagagttcgtcgccgccatctctctgtctcccacactggcctactacgccgactctgtgaaaggccggttcaccatctccagagataatgccaagaacaccgtggtgctgcaaatgaactctctgaaacccgaggatacagccctgtactattgtgccgctgaccggaagtccgtgatgagcatcagacccgattactggggacagggcacacaagtcacagtgtcctctggatcccgcagcgaggacaggtataggttcgaagttcagctggttgaatctggcggcggactggttcaacctggcggatctctgagactgagctgtgccgcctctggctacgcctttagcagctactgggtcaactgggttcgacaggcccctggcaaaggactggaatgggtcgcccaaatctatcccggcgacggcgacaccaactacaacggcaagttcaagggcagattcaccatcagccgggacaacagcaagaacaccctgtacctccagatgaactccctgagagccgaggacaccgccgtgtactattgtgccagatccatcaccaccgtcgtgggctgcgctatggattattggggccagggaaccctggtcaccgtgtcctctacgcgtatccagaaccctgatcctgccgtgtaccagctgcgggatagcaagagcagcgacaagagcgtgtgtctgttcaccgacttcgacagccagaccaacgtgtcccagagcaaggactccgacgtgtacatcaccgataagtgcgtgctggacatgcggagcatggacttcaagagcaactccgccgtggcctggtccaacaagtccgatttcgcctgcgccaacgccttcaacaacagcattatccccgaggacacattcttcccaagccccgagagcagctgcgacgtgaagctggtggaaaagagcttcgagacagacaccaacctgaacttccagaacctgagcgtgatcggcttcagaatcctgctgctgaaagtggccggctttaacctgctgatgaccctgcggctgtggtccagctaa

SEQ ID NO: 4996 - DNA, 4404 bp, synthetic construct
  source 1..4404: mol_type = other DNA
atggccttaccagtgaccgccttgctcctgccgctggccttgctgctccacgccgccaggccggacatccagatgacacagagccctagcagcctgtctgccagcgtgggagacagagtgaccatcacatgcaaggccagcgaccacatcaacaactggctggcctggtatcagcagaagcctggacaggcccctaagctgctgatctacggcgctaccacactggaaacaggcgtgcccagcagattttctggcagcggctctggcaccgactacaccctgacaatatccagcctccagcctgaggacttcgccacctactactgtcagcagagctggaacaccccttggacattcggccagggcaccaagctggaaatcaagagactcgaggacctgaagaacgtgttcccacctgaggtggccgtgttcgagcctagcgaggccgagatcagccacacccagaaagccaccctcgtgtgcctggctaccggcttctaccccgaccatgtggaactgtcttggtgggtcaacggcaaagaggtgcacagcggcgtgtgtaccgacccccagccactgaaagaacagcccgccctgaacgacagccggtactgcctgagcagcagactgagagtgtccgccaccttctggcagaacccccggaaccacttcagatgccaggtgcagttctacggcctgagcgagaacgacgagtggacccaggacagagccaagcccgtgacccagatcgtgtctgccgaagcctggggcagagccgattgcggctttaccagcgagagctaccagcagggcgtgctgagcgccaccatcctgtacgagatcctgctgggcaaggccaccctgtacgccgtgctggtgtctgccctggtgctgatggctatggtcaagcggaaggacagccggggaagggccaagcgatctggatctggagcaacaaacttctcactactcaaacaagcaggtgacgtggaggagaatcccgggcctactagtgccaccatggactggatttggcgcatccttttccttgtcggcgctgctaccggcgcccattccgggcccgccagaagcgaggacagatacagaggatccggcggcggaggatctggcggaggcggatctgggggcggaggctctttcgaacaagttcagcttcaacagcctggcgctgagctggtcaaacctggcgcttctgtgaagatgagctgcaaagccagcggctacgccttcagcagctactggatcaactggatgaagcagaaacccggccagggactcgaatggatcggccaaatctatcccggcgacggcgacaccaactacaacggcaagttcaagggcagagccacactgaccgccgatacctctagcagcacagcctacatgcagctgagcagcctgaccagcgaagatagcgccgtgtacttctgtgcccggtccatcacaacagtcgtgggctgcgctatggactattggggccagggaacaagcgtgaccgtgtctagtacgcgtatccagaaccctgatcctgccgtgtaccagctgcgggatagcaagagcagcgacaagagcgtgtgtctgttcaccgacttcgacagccagaccaacgtgtcccagagcaaggactccgacgtgtacatcaccgataagtgcgtgctggacatgcggagcatggacttcaagagcaactccgccgtggcctggtccaacaagtccgatttcgcctgcgccaacgccttcaacaacagcattatccccgaggacacattcttcccaagccccgagagcagctgcgacgtgaagctggtggaaaagagcttcgagacagacaccaacctgaacttccagaacctgagcgtgatcggcttcagaatcctgctgctgaaagtggccggctttaacctgctgatgaccctgcggctgtggtccagccgcgccaagagaagcggatctggcgtgaagcagaccctgaatttcgacctgctgaagctggctggcgacgtggaatccaacccaggcccttctagcggatccaccatggccgacaagaacatcctgtacggccccgagcctttctaccctctggaagatggaacagccggcgagcagatgttcgacgccctgagcagatatgccgccattcctggatgtatcgccctgacaaacgcccacaccaaagaaaacgtgctgtacgaagagttcctgaagctgagctgtcggctggccgagagcttcaagaagtacggcctgaagcagaacgacacaatcgccgtgtgcagcgagaacagcctccagttcttcctgcctgtgatcgccagcctgtacctgggcattattgtggcccctgtgaacgacaagtacatcgagagagagctgatccacagcctgggcatcgtgaagccccggatcgtgttctgctccaagaacaccttccagaaggtgctgaacgtcaagagcaagctgaagtccatcgagacaatcatcatcctggacctgaacgaggacctcggcggctaccagtgcctgaacaacttcatcagccagaacagcgacagcaacctggacgtgaagaagttcaagccctacagcttcaaccgggacgaccaggtggcctccatcatgtttagcagcggcaccaccggactgcccaaaggcgttatgctgacccacaagaatatcgtggcccggttctctatcgctaaggaccccaccttcggcaacgccatcaatcctacaagcgctatcctgacagtgatccccttccaccacggcttcggcatgatgaccacactgggctacttcacctgtggcttcagagtggtgctgatgcacaccttcgaggaaaagctgtttctccagagcctccaggactacaaggtggaaagcaccctgctggtgcctactctgatggccttcctggctaagtctgccctggtcgagaagtacgatctgagccacctgaaagagatcgcctctggcggagcccctctgagcaaagaaatcggcgagatggtcaagaagcggttcaagctgaacttcgtgcggcaaggctatggcctgaccgagacaacaagcgccgtgctgattacccctaagggcgacgccaagcctggcagcacaggcaaaattgtgcctctgcacgccgtgaaggtggtggaccctaccacaggcaagatcctgggacctaatgagcccggcgagctgtacttcaagggacccatgattatgaagggctactacaacaacgaggaagccaccaaggccattatcgacaacgacggctggctgcggagcggcgatattgcctactacgacaatgacggccacttctacatcgtggacagactgaagtccctcatcaagtacaagggctatcaggtggccccagccgagatcgagggtatcctgctgcaacacccctatatcgtggatgccggcgtgacaggcatccctgatgaagctgctggcgaacttccagcagctggcgtggtggttcagaccggcaagtacctgaatgagcagatcgtgcaggactacgtggcctctcaggtgtccacagccaaatggctgagaggcggcgtgaagttcctggacgagatcccaaagggctctaccggcaagatcgacagaaaggtgctgcggcagatgctggaaaagcacaccaatggcctcgagaccgatttctacgactacaaggacgacgatgacaagactagtggctccggcgagggcagaggaagtctactaacctgcggagatgtggaagaaaatcctggcccacatatgaccgagtacaagcccacggtgcgcctcgccacccgcgacgacgtccccagggccgtacgcaccctcgccgccgcgttcgccgactaccccgccacgcgccacaccgtcgatccggaccgccacatcgagcgggtcaccgagctgcaagaactcttcctcacgcgcgtcgggctcgacatcggcaaggtgtgggtcgcggacgacggcgccgcggtggcggtctggaccacgccggagagcgtcgaagcgggggcggtgttcgccgagatcggcccgcgcatggccgagttgagcggttcccggctggccgcgcagcaacagatggaaggcctcctggcgccgcaccggcccaaggagcccgcgtggttcctggccaccgtcggcgtctcgcccgaccaccagggcaagggtctgggcagcgccgtcgtgctccccggagtggaggcggccgagcgcgccggggtgcccgccttcctggagacctccgcgccccgcaacctccccttctacgagcggctcggcttcaccgtcaccgccgacgtcgaggtgcccgaaggaccgcgcacctggtgcatgacccgcaagcccggtgcctga

SEQ ID NO: 4997 - DNA, 1431 bp, synthetic construct
  source 1..1431: mol_type = other DNA
atggccctgcctgtgacagctctgctgctgcctctggcactgctgctgcacgccgccagacctgcaagaagtgaagatcgctacaggaaccctaaggggtcaggaggaagcgaacttcctacacagggcaccttcagcaacgtgtccaccaatgtgtccccagccaagcctaccaccaccgcctgcgcacgcagcgaggacaggtataggaaccccaaaggaagtggcggatctcctgctcctagacctcctacaccagctcctacaatcgccagccagcctctgtctctcagacccgaagcctgtagacctgctgctggcggagctgtgcataccagaggactggatttcgcctgcgacatctacatctgggctcctctggctggcacatgtggcgttctgctgctgagcctggtcatcaccctgtactgcaaccaccggaacaggcggagagtgtgcaagtgccctagacctgtggttggaggctctggagggcccggaggcagctttaacgttctgatggtccaccgccgcagccatacaggcgaaagacctttccaatgcaaccagtgcggggcctcttttacccagaggggaaacctgctgagacacattcggctgcacaccggggaaagacccttcaggtgtcacctgtgtaactatgcctgtcagcggcgggatgctctgacagcttctgctgaagcccgccacatcagagctgagatgggacgcgccaagagaagcggatctggcgtgaagcagaccctgaatttcgacctgctgaagctggctggcgacgtggaatccaacccaggcccttctagaggccatatgaccgagtacaagcccacggtgcgcctcgccacccgcgacgacgtccccagggccgtacgcaccctcgccgccgcgttcgccgactaccccgccacgcgccacaccgtcgatccggaccgccacatcgagcgggtcaccgagctgcaagaactcttcctcacgcgcgtcgggctcgacatcggcaaggtgtgggtcgcggacgacggcgccgcggtggcggtctggaccacgccggagagcgtcgaagcgggggcggtgttcgccgagatcggcccgcgcatggccgagttgagcggttcccggctggccgcgcagcaacagatggaaggcctcctggcgccgcaccggcccaaggagcccgcgtggttcctggccaccgtcggcgtctcgcccgaccaccagggcaagggtctgggcagcgccgtcgtgctccccggagtggaggcggccgagcgcgccggggtgcccgccttcctggagacctccgcgccccgcaacctccccttctacgagcggctcggcttcaccgtcaccgccgacgtcgaggtgcccgaaggaccgcgcacctggtgcatgacccgcaagcccggtgcctga

SEQ ID NO: 4998 - DNA, 1677 bp, synthetic construct
  source 1..1677: mol_type = other DNA
atggccctgcctgtgacagctctgctgctgcctctggcactgctgctgcacgccgccagacctgcaagaagtgaagatcgctacaggaaccctaaggggtcaggaggaagcgcccctaccagcagcagcaccaagaaaacccagctgcaactggaacacctcctgctggacctccagatgatcctgaacggcatcaacaactacaagaaccccaagctgacccggatgctgaccttcaagttctacatgcccaagaaggccaccgagctgaagcacctccagtgcctggaagaggaactgaagcccctggaagaagtgctgaatctggcccagagcaagaacttccacctgaggccaagggacctgatctccaacatcaacgtgatcgtgctggaactgaaaggcagcgagacaaccttcatgtgcgagtacgccgacgagacagctaccatcgtggaatttctgaatcggtggatcaccttctgccagagcatcatcagcaccctgacagccaagcctacaacaacccctgctcctagacctcctacaccagctcctacaatcgccagccagcctctgtctctcagacccgaagcctgtagaccagctgctggcggagctgtgcataccagaggactggatttcgcctgcgacatctacatctgggctcctctggctggcacatgtggcgttctgctgctgtccctggtcatcaccctgtactgtggaggctctggagggcccggaggcagctttaacgttctgatggtccaccgccgcagccatacaggcgaaagacctttccaatgcaaccagtgcggggcctcttttacccagaggggaaacctgctgagacacattcggctgcacaccggggaaagacccttcaggtgtcacctgtgtaactatgcctgtcagcggcgggatgctctgacagcttctgctgaagcccgccacatcagagctgagatgggacgcgccaagagaagcggatctggcgtgaagcagaccctgaatttcgacctgctgaagctggctggcgacgtggaatccaacccaggcccttctagaggccatatgaccgagtacaagcccacggtgcgcctcgccacccgcgacgacgtccccagggccgtacgcaccctcgccgccgcgttcgccgactaccccgccacgcgccacaccgtcgatccggaccgccacatcgagcgggtcaccgagctgcaagaactcttcctcacgcgcgtcgggctcgacatcggcaaggtgtgggtcgcggacgacggcgccgcggtggcggtctggaccacgccggagagcgtcgaagcgggggcggtgttcgccgagatcggcccgcgcatggccgagttgagcggttcccggctggccgcgcagcaacagatggaaggcctcctggcgccgcaccggcccaaggagcccgcgtggttcctggccaccgtcggcgtctcgcccgaccaccagggcaagggtctgggcagcgccgtcgtgctccccggagtggaggcggccgagcgcgccggggtgcccgccttcctggagacctccgcgccccgcaacctccccttctacgagcggctcggcttcaccgtcaccgccgacgtcgaggtgcccgaaggaccgcgcacctggtgcatgacccgcaagcccggtgcctga

SEQ ID NO: 4999 - DNA, 1581 bp, synthetic construct
  source 1..1581: mol_type = other DNA
atgtaccggatgcagctgctgagctgtatcgccctgtctctggccctggtcacaaatagcgcccctaccagcagcagcaccaagaaaacccagctgcaactggaacacctcctgctggacctccagatgatcctgaacggcatcaacaactacaagaaccccaagctgacccggatgctgaccttcaagttctacatgcccaagaaggccaccgagctgaagcacctccagtgcctggaagaggaactgaagcccctggaagaagtgctgaatctggcccagagcaagaacttccacctgaggccaagggacctgatctccaacatcaacgtgatcgtgctggaactgaaaggcagcgagacaaccttcatgtgcgagtacgccgacgagacagctaccatcgtggaatttctgaatcggtggatcaccttctgccagagcatcatcagcaccctgacagcaagaagtgaagaccgttacaggaaccccaaaggcagcggcggcagcgccaagcctacaacaacccctgctcctagacctgtggttggaggctctggagtcgagggaggaggcgtccaagtcgaaaccattagtcccggcgatggcagaacatttcctaaaaggggacaaacatgtgtcgtccattatacaggcatgttggaggacggcaaaaaggtggacagtagtagagatcgcaataaacctttcaaattcatgttgggaaaacaagaagtcattaggggatgggaggagggcgtggctcaaatgtccgtcggccaacgcgctaagctcaccatcagccccgactacgcatacggcgctaccggacatcccggaattattccccctcacgctaccttggtgtttgacgtcgaactgttgaagctcgggactagtagagcaaagcgaagtggtagcggagcaaccaacttttctctgctcaagcaagccggtgacgtggaagagaaccctggtcctcatatgaccgagtacaagcccacggtgcgcctcgccacccgcgacgacgtccccagggccgtacgcaccctcgccgccgcgttcgccgactaccccgccacgcgccacaccgtcgatccggaccgccacatcgagcgggtcaccgagctgcaagaactcttcctcacgcgcgtcgggctcgacatcggcaaggtgtgggtcgcggacgacggcgccgcggtggcggtctggaccacgccggagagcgtcgaagcgggggcggtgttcgccgagatcggcccgcgcatggccgagttgagcggttcccggctggccgcgcagcaacagatggaaggcctcctggcgccgcaccggcccaaggagcccgcgtggttcctggccaccgtcggcgtctcgcccgaccaccagggcaagggtctgggcagcgccgtcgtgctccccggagtggaggcggccgagcgcgccggggtgcccgccttcctggagacctccgcgccccgcaacctccccttctacgagcggctcggcttcaccgtcaccgccgacgtcgaggtgcccgaaggaccgcgcacctggtgcatgacccgcaagcccggtgcctga

SEQ ID NO: 5000 - DNA, 1419 bp, synthetic construct
  source 1..1419: mol_type = other DNA
atggccctgcctgtgacagctctgctgctgcctctggcactgctgctgcacgccgccagacctgccagacctgccaagagcgaggatctgtaccccaatcctaaagaacttcctacacagggcaccttcagcaacgtgtccaccaatgtgtccccagccaagcctaccaccaccgcctgcgccaagtctgaggacctgtatcctaatccaaaaggcggatctcctgctcctagacctcctacaccagctcctacaatcgccagccagcctctgtctctcagacccgaagcctgtagacctgctgctggcggagctgtgcataccagaggactggatttcgcctgcgacatctacatctgggctcctctggctggcacatgtggcgttctgctgctgagcctggtcatcaccctgtactgcaaccaccggaacaggcggagagtgtgcaagtgccctagacctgtggttggaggctctggagggcccggaggcagctttaacgttctgatggtccaccgccgcagccatacaggcgaaagacctttccaatgcaaccagtgcggggcctcttttacccagaggggaaacctgctgagacacattcggctgcacaccggggaaagacccttcaggtgtcacctgtgtaactatgcctgtcagcggcgggatgctctgacagcttctgctgaagcccgccacatcagagctgagatgggacgcgccaagagaagcggatctggcgtgaagcagaccctgaatttcgacctgctgaagctggctggcgacgtggaatccaacccaggcccttctagaggccatatgaccgagtacaagcccacggtgcgcctcgccacccgcgacgacgtccccagggccgtacgcaccctcgccgccgcgttcgccgactaccccgccacgcgccacaccgtcgatccggaccgccacatcgagcgggtcaccgagctgcaagaactcttcctcacgcgcgtcgggctcgacatcggcaaggtgtgggtcgcggacgacggcgccgcggtggcggtctggaccacgccggagagcgtcgaagcgggggcggtgttcgccgagatcggcccgcgcatggccgagttgagcggttcccggctggccgcgcagcaacagatggaaggcctcctggcgccgcaccggcccaaggagcccgcgtggttcctggccaccgtcggcgtctcgcccgaccaccagggcaagggtctgggcagcgccgtcgtgctccccggagtggaggcggccgagcgcgccggggtgcccgccttcctggagacctccgcgccccgcaacctccccttctacgagcggctcggcttcaccgtcaccgccgacgtcgaggtgcccgaaggaccgcgcacctggtgcatgacccgcaagcccggtgcctga

SEQ ID NO: 5001 - DNA, 1800 bp, synthetic construct
  source 1..1800: mol_type = other DNA
atggccctgcctgtgacagctctgctgctgcctctggcactgctgctgcacgccgccagacctgcaagaagtgaagatcgctacaggaaccctaaggggtcaggaggaagcgaacttcctacacagggcaccttcagcaacgtgtccaccaatgtgtccccagccaagcctaccaccaccgcctgcgcacgcagcgaggacaggtataggaaccccaaaggaagtggcggatctgcccctaccagcagcagcaccaagaaaacccagctgcaactggaacacctcctgctggacctccagatgatcctgaacggcatcaacaactacaagaaccccaagctgacccggatgctgaccttcaagttctacatgcccaagaaggccaccgagctgaagcacctccagtgcctggaagaggaactgaagcccctggaagaagtgctgaatctggcccagagcaagaacttccacctgaggccaagggacctgatctccaacatcaacgtgatcgtgctggaactgaaaggcagcgagacaaccttcatgtgcgagtacgccgacgagacagctaccatcgtggaatttctgaatcggtggatcaccttctgccagagcatcatcagcaccctgacagccaagcctacaacaacccctgctcctagacctcctacaccagctcctacaatcgccagccagcctctgtctctcagacccgaagcctgtagaccagctgctggcggagctgtgcataccagaggactggatttcgcctgcgacatctacatctgggctcctctggctggcacatgtggcgttctgctgctgtccctggtcatcaccctgtactgtggaggctctggagggcccggaggcagctttaacgttctgatggtccaccgccgcagccatacaggcgaaagacctttccaatgcaaccagtgcggggcctcttttacccagaggggaaacctgctgagacacattcggctgcacaccggggaaagacccttcaggtgtcacctgtgtaactatgcctgtcagcggcgggatgctctgacagcttctgctgaagcccgccacatcagagctgagatgggacgcgccaagagaagcggatctggcgtgaagcagaccctgaatttcgacctgctgaagctggctggcgacgtggaatccaacccaggcccttctagaggccatatgaccgagtacaagcccacggtgcgcctcgccacccgcgacgacgtccccagggccgtacgcaccctcgccgccgcgttcgccgactaccccgccacgcgccacaccgtcgatccggaccgccacatcgagcgggtcaccgagctgcaagaactcttcctcacgcgcgtcgggctcgacatcggcaaggtgtgggtcgcggacgacggcgccgcggtggcggtctggaccacgccggagagcgtcgaagcgggggcggtgttcgccgagatcggcccgcgcatggccgagttgagcggttcccggctggccgcgcagcaacagatggaaggcctcctggcgccgcaccggcccaaggagcccgcgtggttcctggccaccgtcggcgtctcgcccgaccaccagggcaagggtctgggcagcgccgtcgtgctccccggagtggaggcggccgagcgcgccggggtgcccgccttcctggagacctccgcgccccgcaacctccccttctacgagcggctcggcttcaccgtcaccgccgacgtcgaggtgcccgaaggaccgcgcacctggtgcatgacccgcaagcccggtgcctga

SEQ ID NO: 5002 - DNA, 1674 bp, synthetic construct
  source 1..1674: mol_type = other DNA
atgtaccggatgcagctgctgagctgtatcgccctgtctctggccctggtcacaaatagcgcccctaccagcagcagcaccaagaaaacccagctgcaactggaacacctcctgctggacctccagatgatcctgaacggcatcaacaactacaagaaccccaagctgacccggatgctgaccttcaagttctacatgcccaagaaggccaccgagctgaagcacctccagtgcctggaagaggaactgaagcccctggaagaagtgctgaatctggcccagagcaagaacttccacctgaggccaagggacctgatctccaacatcaacgtgatcgtgctggaactgaaaggcagcgagacaaccttcatgtgcgagtacgccgacgagacagctaccatcgtggaatttctgaatcggtggatcaccttctgccagagcatcatcagcaccctgacagcaagaagtgaagaccgttacaggaaccccaaaggcagcggcggcagcgccaagcctacaacaacccctgctcctagacctcctacaccagctcctacaatcgccagccagcctctgtctctcagacccgaagcctgtagaccagctgctggcggagctgtgcataccagaggactggatttcgcctgcgacatctacatctgggctcctctggctggcacatgtggcgttctgctgctgtccctggtcatcaccctgtactgtggaggctctggagggcccggaggcagctttaacgttctgatggtccaccgccgcagccatacaggcgaaagacctttccaatgcaaccagtgcggggcctcttttacccagaggggaaacctgctgagacacattcggctgcacaccggggaaagacccttcaggtgtcacctgtgtaactatgcctgtcagcggcgggatgctctgacagcttctgctgaagcccgccacatcagagctgagatgggacgcgccaagagaagcggatctggcgtgaagcagaccctgaatttcgacctgctgaagctggctggcgacgtggaatccaacccaggcccttctagaggccatatgaccgagtacaagcccacggtgcgcctcgccacccgcgacgacgtccccagggccgtacgcaccctcgccgccgcgttcgccgactaccccgccacgcgccacaccgtcgatccggaccgccacatcgagcgggtcaccgagctgcaagaactcttcctcacgcgcgtcgggctcgacatcggcaaggtgtgggtcgcggacgacggcgccgcggtggcggtctggaccacgccggagagcgtcgaagcgggggcggtgttcgccgagatcggcccgcgcatggccgagttgagcggttcccggctggccgcgcagcaacagatggaaggcctcctggcgccgcaccggcccaaggagcccgcgtggttcctggccaccgtcggcgtctcgcccgaccaccagggcaagggtctgggcagcgccgtcgtgctccccggagtggaggcggccgagcgcgccggggtgcccgccttcctggagacctccgcgccccgcaacctccccttctacgagcggctcggcttcaccgtcaccgccgacgtcgaggtgcccgaaggaccgcgcacctggtgcatgacccgcaagcccggtgcctga

SEQ ID NO: 5003 - DNA, 1638 bp, synthetic construct
  source 1..1638: mol_type = other DNA
atggctagactggccctgtctcctgtgcctagccattggatggttgccctgctgctgctcctgtctgctgaacctgttcctgccgccagaagcgaggacagatacagaaaccccaagggcagcgcctgctccagaatctggcaaagccccagattcattgcccggaagaggggcttcaccgtgaagatgcactgctacatgaacagcgccagcggcaacgtttcctggctgtggaagcaagagatggacgagaaccctcagcagctgaagctggaaaagggccgcatggaagagagccagaacgagtctctggccacactgaccatccagggcatcagattcgaggacaacggcatctacttttgccagcagaagtgcaacaacaccagcgaggtgtaccaaggctgtggcaccgagctgagagtgatgggctttagcacactggcccagctgaaacagcggaacaccctgaaggacggcatcattatgatccagacactgctcatcatcctgtttattatcgtgcccatcttcctgctgctcgacaaggacgatagcaaggccggcatggaagaggaccacacctacgaaggactggacatcgaccagaccgccacatacgaggacatcgtgaccctgagaaccggcgaagtgaagtggagcgtgggagagcaccctggacaagaaggaggctctggagggcccggaggcagctttaacgttctgatggtccaccgccgcagccatacaggcgaaagacctttccaatgcaaccagtgcggggcctcttttacccagaggggaaacctgctgagacacattcggctgcacaccggggaaagacccttcaggtgtcacctgtgtaactatgcctgtcagcggcgggatgctctgacagcttctgctgaagcccgccacatcagagctgagatgggacgcgccaagagaagcggatctggcgtgaagcagaccctgaatttcgacctgctgaagctggctggcgacgtggaatccaacccaggcccttctagaggccatatgaccgagtacaagcccacggtgcgcctcgccacccgcgacgacgtccccagggccgtacgcaccctcgccgccgcgttcgccgactaccccgccacgcgccacaccgtcgatccggaccgccacatcgagcgggtcaccgagctgcaagaactcttcctcacgcgcgtcgggctcgacatcggcaaggtgtgggtcgcggacgacggcgccgcggtggcggtctggaccacgccggagagcgtcgaagcgggggcggtgttcgccgagatcggcccgcgcatggccgagttgagcggttcccggctggccgcgcagcaacagatggaaggcctcctggcgccgcaccggcccaaggagcccgcgtggttcctggccaccgtcggcgtctcgcccgaccaccagggcaagggtctgggcagcgccgtcgtgctccccggagtggaggcggccgagcgcgccggggtgcccgccttcctggagacctccgcgccccgcaacctccccttctacgagcggctcggcttcaccgtcaccgccgacgtcgaggtgcccgaaggaccgcgcacctggtgcatgacccgcaagcccggtgcctga

SEQ ID NO: 5004 - DNA, 2562 bp, synthetic construct
  source 1..2562: mol_type = other DNA
atggccttaccagtgaccgccttgctcctgccgctggccttgctgctccacgccgccaggccggacatccagatgacacagactacatcctccctgtctgcctctctgggagacagagtcaccatcagttgcagggcaagtcaggacattagtaagtacctgaactggtatcagcagaaaccagatggaactgttaaactcctgatctaccatacatcaagattacactcaggagtcccatcaaggttcagtggcagtgggtctggaacagattattctctcaccattagcaacctggagcaagaagatattgccacttacttttgccaacagggtaatacgcttccgtacacgttcggaggggggaccaagctggagatcacactcgaggccgacgtgtcccccaagcctaccatcttcctgccctctatcgccgagacaaagctccagaaggccggcacctacctgtgcctgctggaaaagttcttcccagatgtgattaagatccactggcaggaaaagaagtccaacaccatcctgggcagccaggaaggcaacaccatgaagaccaacgacacctacatgaagttcagctggctgaccgtgcccgagaagtccctggacaaagaacacagatgcatcgtgcggcacgaaaacaacaagaacggcgtggaccaggaaatcatcttcccacccatcaagaccgatgtgattacaatggaccccaaggacaactgctccaaggacgccaacgataccctgctgctccagctgaccaacaccagcgcctactacatgtacttgttgctgctgctgaagtccgtggtgtacttcgccatcatcacatgctgcctgctgcggagaaccgccttctgctgcaacggcgagaagtctagggccaagcgatctggatctggagcaacaaacttctcactactcaaacaagcaggtgacgtggaggagaatcccgggcctactagtatggactggatttggcgcatccttttccttgtcggcgctgctaccggcgcgcattccttcgaagtgaaactgcaggagtcaggacctggcctggtggcgccctcacagagcctgtccgtcacatgcactgtctcaggggtctcattacccgactatggtgtaagctggattcgccagcctccacgaaagggtctggagtggctgggagtaatatggggtagtgaaaccacatactataattcagctctcaaatccagactgaccatcatcaaggacaactccaagagccaagttttcttaaaaatgaacagtctgcaaactgatgacacagccatttactactgtgccaaacattattactacggtggtagctatgctatggactactggggccaaggaacctcagtcaccgtctcctcaacgcgtcctcacaccaagcccagcgtgttcgtgatgaagaacggcaccaacgtggcctgcctcgtgaaagagttctaccccaaggacatcaggatcaacctggtgtccagcaagaagatcaccgagttcgaccccgccatcgtgatctcccccagcggcaagtacaacgccgtgaagctggggaagtacgaggacagcaacagcgtgacctgctccgtgcagcacgacaacaagaccgtgcacagcaccgactttgaagtgaaaaccgactccaccgaccacgtgaagcccaaagagacagagaacaccaagcagcccagcaagagctgccacaagcccaaggccatcgtgcacaccgagaaagtgaacatgatgagcctgaccgtgctgggcctgcggatgctgttcgccaaaaccgtggccgtgaacttcctgctgaccgccaagctgttcttcctccgcgccaagagaagcggatctggcgtgaagcagaccctgaatttcgacctgctgaagctggctggcgacgtggaatccaacccaggcccttctagaggccatatgaccgagtacaagcccacggtgcgcctcgccacccgcgacgacgtccccagggccgtacgcaccctcgccgccgcgttcgccgactaccccgccacgcgccacaccgtcgatccggaccgccacatcgagcgggtcaccgagctgcaagaactcttcctcacgcgcgtcgggctcgacatcggcaaggtgtgggtcgcggacgacggcgccgcggtggcggtctggaccacgccggagagcgtcgaagcgggggcggtgttcgccgagatcggcccgcgcatggccgagttgagcggttcccggctggccgcgcagcaacagatggaaggcctcctggcgccgcaccggcccaaggagcccgcgtggttcctggccaccgtcggcgtctcgcccgaccaccagggcaagggtctgggcagcgccgtcgtgctccccggagtggaggcggccgagcgcgccggggtgcccgccttcctggagacctccgcgccccgcaacctccccttctacgagcggctcggcttcaccgtcaccgccgacgtcgaggtgcccgaaggaccgcgcacctggtgcatgacccgcaagcccggtgcctga

SEQ ID NO: 5005 - DNA, 2961 bp, synthetic construct
  source 1..2961: mol_type = other DNA
atggccttaccagtgaccgccttgctcctgccgctggccttgctgctccacgccgccaggccggcatgcgaagtgcagctgcttgaaagtggcggcggactgattcagcctggcggatctctgagactgagctgtgccgccagcggcttcaccttttctagccacgccatgacctgggtccgacaggcacctggaaaagggcttgaatgggtgtccgccatcagcggctctggcgattacacacactacgccgacagcgtgaagggcagattcaccatcagcagagacaacagcaagaacaccgtgtacctccagatgaacagcctgagagccgaggacagcgccgtgtattattgcgccaaggatgaggatggcggcagcctgcttggacacagaggacaaggcaccctggtcaccgtttcttccggtaccagaagtgaagatcgctacagggaattcgacatccagatgacacagagccctagcagcctgtctgccagcgtgggagacagagtgaccatcacatgcaaggccagcgaccacatcaacaactggctggcctggtatcagcagaagcctggcaaggcccctaagctgctgatctacggcgctaccacactggaaacaggcgtgcccagcagattttctggcagcggctctggcaccgacttcaccctgacaatatccagcctccagcctgaggacttcgccacctactactgtcagcagagctggaacaccccttggacattcggccagggcaccaaggtggaaatcaagagactcgaggacctgaagaacgtgttcccacctgaggtggccgtgttcgagcctagcgaggccgagatcagccacacccagaaagccaccctcgtgtgcctggctaccggcttctaccccgaccatgtggaactgtcttggtgggtcaacggcaaagaggtgcacagcggcgtgtgtaccgacccccagccactgaaagaacagcccgccctgaacgacagccggtactgcctgagcagcagactgagagtgtccgccaccttctggcagaacccccggaaccacttcagatgccaggtgcagttctacggcctgagcgagaacgacgagtggacccaggacagagccaagcccgtgacccagatcgtgtctgccgaagcctggggcagagccgattgcggctttaccagcgagagctaccagcagggcgtgctgagcgccaccatcctgtacgagatcctgctgggcaaggccaccctgtacgccgtgctggtgtctgccctggtgctgatggctatggtcaagcggaaggacagccggggaagggccaagcgatctggatctggagcaacaaacttctcactactcaaacaagcaggtgacgtggaggagaatcccgggcctactagtatggactggatttggcgcatccttttccttgtcggcgctgctaccggcgcgcattccttcgaagttcagctggttgaatctggcggcggactggttcaacctggcggatctctgagactgagctgtgccgcctctggctacgcctttagcagctactgggtcaactgggttcgacaggcccctggcaaaggactggaatgggtcgcccaaatctatcccggcgacggcgacaccaactacaacggcaagttcaagggcagattcaccatcagccgggacaacagcaagaacaccctgtacctccagatgaactccctgagagccgaggacaccgccgtgtactattgtgccagatccatcaccaccgtcgtgggctgcgctatggattattggggccagggaaccctggtcaccgtgtcctctacgcgtatccagaaccctgatcctgccgtgtaccagctgcgggatagcaagagcagcgacaagagcgtgtgtctgttcaccgacttcgacagccagaccaacgtgtcccagagcaaggactccgacgtgtacatcaccgataagtgcgtgctggacatgcggagcatggacttcaagagcaactccgccgtggcctggtccaacaagtccgatttcgcctgcgccaacgccttcaacaacagcattatccccgaggacacattcttcccaagccccgagagcagctgcgacgtgaagctggtggaaaagagcttcgagacagacaccaacctgaacttccagaacctgagcgtgatcggcttcagaatcctgctgctgaaagtggccggctttaacctgctgatgaccctgcggctgtggtccagccgcgccaagagaagcggatctggcgtgaagcagaccctgaatttcgacctgctgaagctggctggcgacgtggaatccaacccaggcccttctagaggccatatgaccgagtacaagcccacggtgcgcctcgccacccgcgacgacgtccccagggccgtacgcaccctcgccgccgcgttcgccgactaccccgccacgcgccacaccgtcgatccggaccgccacatcgagcgggtcaccgagctgcaagaactcttcctcacgcgcgtcgggctcgacatcggcaaggtgtgggtcgcggacgacggcgccgcggtggcggtctggaccacgccggagagcgtcgaagcgggggcggtgttcgccgagatcggcccgcgcatggccgagttgagcggttcccggctggccgcgcagcaacagatggaaggcctcctggcgccgcaccggcccaaggagcccgcgtggttcctggccaccgtcggcgtctcgcccgaccaccagggcaagggtctgggcagcgccgtcgtgctccccggagtggaggcggccgagcgcgccggggtgcccgccttcctggagacctccgcgccccgcaacctccccttctacgagcggctcggcttcaccgtcaccgccgacgtcgaggtgcccgaaggaccgcgcacctggtgcatgacccgcaagcccggtgcctga

SEQ ID NO: 5006 - DNA, 2427 bp, synthetic construct
  source 1..2427: mol_type = other DNA
atggccttaccagtgaccgccttgctcctgccgctggccttgctgctccacgccgccaggccggacatccagatgacacagagccctagcagcctgtctgccagcgtgggagacagagtgaccatcacatgcaaggccagccaggatgtgggcacagccgtggattggtatcagcagaagcctggcaaggcccctaagctgctgatctactgggccagcacaagacacacaggcgtgcccagcagattttctggcagcggctctggcaccgacttcaccctgacaatatccagcctccagcctgaggacttcgccacctactactgccagcagtacaacagctaccctctgaccttcggccagggcaccaaggtggaaatcaaaagactcgagggacagcctaaggccaatcctaccgtgacactgttccctccaagcagcgaagaactccaggccaacaaggccacacttgtgtgcctgatctccgacttctaccctggggctgtgacagtggcttggaaggccgatggatctcctgtgaaagccggcgtggaaaccaccaagccatccaagcagagcaacaacaaatacgccgccagctcctacctgagcctgacacctgagcagtggaagtcccacagatcctacagctgccaagtgacccacgaaggcagcaccgtggaaaagacagtggcccctacagagtgcagcggatcccagagcttcggcctgctggaccccaagctgtgctacctgctggatggcatcctgttcatctacggcgtgatcctgaccgccctgttcctgagagtgaagttcagcagaagcgccgacgcccctgcctaccagcagggacagaaccaactgtacaacgagctgaacctgggcagacgggaagagtacgacgtgctggacaagcggagaggcagggaccctgagatgggcggaaagccccggagaaagaacccccaggaaggactgtataacgaactccagaaagacaagatggccgaagcctacagcgagatcggcatgaagggcgagcggagaagaggcaagggccacgatggcctgtaccagggcctgagcaccgccaccaaggacacctatgacgccctgcacatgcaggccctgcctccaagaagggccaagcgatctggatctggagcaacaaacttctcactactcaaacaagcaggtgacgtggaggagaatcccgggcctactagtgccaccatggactggatttggcgcatccttttccttgtcggcgctgctaccggcgcccattccgccagaagcgaggacagatacagaaaccccaaattcgaagtgcagctggttgaatcaggtggcggcctggttcaacctggcggatctctgagactgagctgtgccgccagcggctacacctttaccgagtacacaatccactgggtccgacaggcccctggcaaaggacttgagtgggtcgccaacatcaaccccaacaatggcggcaccacctacaaccagaagttcgaggacagattcaccatcagccgggacaacagcaagaacaccctgtacctccagatgaactccctgagagccgaggacaccgccgtgtactattgtgccagaggctggaacttcgactactggggccagggaacactggtcaccgttagctctacgcgtgcgtccactaagggtccgtcagtcttcccgctggcgccctgttcccgcagcacgagtgaatctaccgccgcccttgggtgcttggtaaaagactattttcctgagcccgttacagtatcatggaacagcggggctctgactagcggggtgcatacgttccctgcggttctgcaatctagcggactgtattctctctccagtgttgtgaccgtgccaagctccagcctcggtactaaaacttatacatgtaatgtggatcataaaccttcaaataccaaggttgacaaaagggtagagagtaagtacggtggtacccagagttttgggttgttggaccctaaattgtgctatctgttggacggaatcctgttcatttacggagtgatcctgaccgcattgttcctgcgggttaagttttccagatccgcagacgcacccgcttaccaacaagggcagaaccaactctacaatgaacttaatttggggcggagggaagagtacgacgttctggacaaaaggaggggacgagatcccgagatgggcggaaagcctcagcgaaggaagaatccgcaagaggggctttataacgaactccagaaagataaaatggcagaagcctatagtgagattgggatgaagggagaaaggaggaggggtaaaggtcacgatgggttgtaccaaggattgagcacagccactaaagatacctatgatgcgctccacatgcaggccctgccgccaagataa

SEQ ID NO: 5007 - DNA, 2643 bp, synthetic construct
  source 1..2643: mol_type = other DNA
atggccttaccagtgaccgccttgctcctgccgctggccttgctgctccacgccgccaggccggcatgcgctagaagcgaagatcggtatcggaaccccaagggtaccggcggaggcggatctggcggcggaggtagcggtggcggaggatctgaattcgacatccagatgacacagagccctagcagcctgtctgccagcgtgggagacagagtgaccatcacatgcaaggccagccaggatgtgggcacagccgtggattggtatcagcagaagcctggcaaggcccctaagctgctgatctactgggccagcacaagacacacaggcgtgcccagcagattttctggcagcggctctggcaccgacttcaccctgacaatatccagcctccagcctgaggacttcgccacctactactgccagcagtacaacagctaccctctgaccttcggccagggcaccaaggtggaaatcaaaagactcgaggacctgaagaacgtgttcccacctgaggtggccgtgttcgagcctagcgaggccgagatcagccacacccagaaagccaccctcgtgtgcctggctaccggcttctaccccgaccatgtggaactgtcttggtgggtcaacggcaaagaggtgcacagcggcgtgtgtaccgacccccagccactgaaagaacagcccgccctgaacgacagccggtactgcctgagcagcagactgagagtgtccgccaccttctggcagaacccccggaaccacttcagatgccaggtgcagttctacggcctgagcgagaacgacgagtggacccaggacagagccaagcccgtgacccagatcgtgtctgccgaagcctggggcagagccgattgcggctttaccagcgagagctaccagcagggcgtgctgagcgccaccatcctgtacgagatcctgctgggcaaggccaccctgtacgccgtgctggtgtctgccctggtgctgatggctatggtcaagcggaaggacagccggggaagggccaagcgatctggatctggagcaacaaacttctcactactcaaacaagcaggtgacgtggaggagaatcccgggcctactagtatggactggatttggcgcatccttttccttgtcggcgctgctaccggcgcgcattccttcgaagtgcagctggttgaatcaggtggcggcctggttcaacctggcggatctctgagactgagctgtgccgccagcggctacacctttaccgagtacacaatccactgggtccgacaggcccctggcaaaggacttgagtgggtcgccaacatcaaccccaacaatggcggcaccacctacaaccagaagttcgaggacagattcaccatcagccgggacaacagcaagaacaccctgtacctccagatgaactccctgagagccgaggacaccgccgtgtactattgtgccagaggctggaacttcgactactggggccagggaacactggtcaccgttagctctacgcgtatccagaaccctgatcctgccgtgtaccagctgcgggatagcaagagcagcgacaagagcgtgtgtctgttcaccgacttcgacagccagaccaacgtgtcccagagcaaggactccgacgtgtacatcaccgataagtgcgtgctggacatgcggagcatggacttcaagagcaactccgccgtggcctggtccaacaagtccgatttcgcctgcgccaacgccttcaacaacagcattatccccgaggacacattcttcccaagccccgagagcagctgcgacgtgaagctggtggaaaagagcttcgagacagacaccaacctgaacttccagaacctgagcgtgatcggcttcagaatcctgctgctgaaagtggccggctttaacctgctgatgaccctgcggctgtggtccagccgcgccaagagaagcggatctggcgtgaagcagaccctgaatttcgacctgctgaagctggctggcgacgtggaatccaacccaggcccttctagaggccatatgaccgagtacaagcccacggtgcgcctcgccacccgcgacgacgtccccagggccgtacgcaccctcgccgccgcgttcgccgactaccccgccacgcgccacaccgtcgatccggaccgccacatcgagcgggtcaccgagctgcaagaactcttcctcacgcgcgtcgggctcgacatcggcaaggtgtgggtcgcggacgacggcgccgcggtggcggtctggaccacgccggagagcgtcgaagcgggggcggtgttcgccgagatcggcccgcgcatggccgagttgagcggttcccggctggccgcgcagcaacagatggaaggcctcctggcgccgcaccggcccaaggagcccgcgtggttcctggccaccgtcggcgtctcgcccgaccaccagggcaagggtctgggcagcgccgtcgtgctccccggagtggaggcggccgagcgcgccggggtgcccgccttcctggagacctccgcgccccgcaacctccccttctacgagcggctcggcttcaccgtcaccgccgacgtcgaggtgcccgaaggaccgcgcacctggtgcatgacccgcaagcccggtgcctga

SEQ ID NO: 5008 - DNA, 2631 bp, synthetic construct
  source 1..2631: mol_type = other DNA
atggccttaccagtgaccgccttgctcctgccgctggccttgctgctccacgccgccaggccggcatgcagaagtgaagatcgctacaggggtaccggcggaggcggatctggcggcggaggtagcggtggcggaggatctgaattcgacatccagatgacacagagccctagcagcctgtctgccagcgtgggagacagagtgaccatcacatgcaaggccagccaggatgtgggcacagccgtggattggtatcagcagaagcctggcaaggcccctaagctgctgatctactgggccagcacaagacacacaggcgtgcccagcagattttctggcagcggctctggcaccgacttcaccctgacaatatccagcctccagcctgaggacttcgccacctactactgccagcagtacaacagctaccctctgaccttcggccagggcaccaaggtggaaatcaaaagactcgaggacctgaagaacgtgttcccacctgaggtggccgtgttcgagcctagcgaggccgagatcagccacacccagaaagccaccctcgtgtgcctggctaccggcttctaccccgaccatgtggaactgtcttggtgggtcaacggcaaagaggtgcacagcggcgtgtgtaccgacccccagccactgaaagaacagcccgccctgaacgacagccggtactgcctgagcagcagactgagagtgtccgccaccttctggcagaacccccggaaccacttcagatgccaggtgcagttctacggcctgagcgagaacgacgagtggacccaggacagagccaagcccgtgacccagatcgtgtctgccgaagcctggggcagagccgattgcggctttaccagcgagagctaccagcagggcgtgctgagcgccaccatcctgtacgagatcctgctgggcaaggccaccctgtacgccgtgctggtgtctgccctggtgctgatggctatggtcaagcggaaggacagccggggaagggccaagcgatctggatctggagcaacaaacttctcactactcaaacaagcaggtgacgtggaggagaatcccgggcctactagtatggactggatttggcgcatccttttccttgtcggcgctgctaccggcgcgcattccttcgaagtgcagctggttgaatcaggtggcggcctggttcaacctggcggatctctgagactgagctgtgccgccagcggctacacctttaccgagtacacaatccactgggtccgacaggcccctggcaaaggacttgagtgggtcgccaacatcaaccccaacaatggcggcaccacctacaaccagaagttcgaggacagattcaccatcagccgggacaacagcaagaacaccctgtacctccagatgaactccctgagagccgaggacaccgccgtgtactattgtgccagaggctggaacttcgactactggggccagggaacactggtcaccgttagctctacgcgtatccagaaccctgatcctgccgtgtaccagctgcgggatagcaagagcagcgacaagagcgtgtgtctgttcaccgacttcgacagccagaccaacgtgtcccagagcaaggactccgacgtgtacatcaccgataagtgcgtgctggacatgcggagcatggacttcaagagcaactccgccgtggcctggtccaacaagtccgatttcgcctgcgccaacgccttcaacaacagcattatccccgaggacacattcttcccaagccccgagagcagctgcgacgtgaagctggtggaaaagagcttcgagacagacaccaacctgaacttccagaacctgagcgtgatcggcttcagaatcctgctgctgaaagtggccggctttaacctgctgatgaccctgcggctgtggtccagccgcgccaagagaagcggatctggcgtgaagcagaccctgaatttcgacctgctgaagctggctggcgacgtggaatccaacccaggcccttctagaggccatatgaccgagtacaagcccacggtgcgcctcgccacccgcgacgacgtccccagggccgtacgcaccctcgccgccgcgttcgccgactaccccgccacgcgccacaccgtcgatccggaccgccacatcgagcgggtcaccgagctgcaagaactcttcctcacgcgcgtcgggctcgacatcggcaaggtgtgggtcgcggacgacggcgccgcggtggcggtctggaccacgccggagagcgtcgaagcgggggcggtgttcgccgagatcggcccgcgcatggccgagttgagcggttcccggctggccgcgcagcaacagatggaaggcctcctggcgccgcaccggcccaaggagcccgcgtggttcctggccaccgtcggcgtctcgcccgaccaccagggcaagggtctgggcagcgccgtcgtgctccccggagtggaggcggccgagcgcgccggggtgcccgccttcctggagacctccgcgccccgcaacctccccttctacgagcggctcggcttcaccgtcaccgccgacgtcgaggtgcccgaaggaccgcgcacctggtgcatgacccgcaagcccggtgcctga

SEQ ID NO: 5009 - DNA, 22 bp, synthetic construct
  source 1..22: mol_type = other DNA
gggggggggggggggggggggg

SEQ ID NO: 5010 - DNA, 1473 bp, synthetic construct
  source 1..1473: mol_type = other DNA
atggccttaccagtgaccgccttgctcctgccgctggccttgctgctccacgccgccaggccggacatccagatgacacagagccctagcagcctgtctgccagcgtgggagacagagtgaccatcacatgcaaggccagcgaccacatcaacaactggctggcctggtatcagcagaagcctggcaaggcccctaagctgctgatctacggcgctaccacactggaaacaggcgtgcccagcagattttctggcagcggctctggcaccgacttcaccctgacaatatccagcctccagcctgaggacttcgccacctactactgtcagcagagctggaacaccccttggacattcggccagggcaccaaggtggaaatcaagagaggtggcggaggatctggcggaggtggaagcggcggaggcggatctgaagttcagctggttgaatctggcggcggactggttcaacctggcggatctctgagactgagctgtgccgcctctggctacgcctttagcagctactgggtcaactgggttcgacaggcccctggcaaaggactggaatgggtcgcccaaatctatcccggcgacggcgacaccaactacaacggcaagttcaagggcagattcaccatcagccgggacaacagcaagaacaccctgtacctccagatgaactccctgagagccgaggacaccgccgtgtactattgtgccagatccatcaccaccgtcgtgggctgcgctatggattattggggccagggaaccctggtcaccgtgtcctctacgcgtaccacgacgccagcgccgcgaccaccaacaccggcgcccaccatcgcgtcgcagcccctgtccctgcgcccagaggcgtgccggccagcggcggggggcgcagtgcacacgagggggctggacttcgcctgtgacatctacatctgggcgcccttggccgggacttgtggggtccttctcctgtcactggttatcaccctttactgcaaacggggcagaaagaaactcctgtatatattcaaacaaccatttatgagaccagtacaaactactcaagaggaagatggctgtagctgccgatttccagaagaagaagaaggaggatgtgaactgagagtgaagttcagcaggagcgcagacgcccccgcgtaccagcagggccagaaccagctctataacgagctgaatctaggacgaagagaggagtacgatgttttggacaagagacgtggccgggaccctgagatggggggaaagccgagaaggaagaaccctcaggaaggcctgtacaatgaactgcagaaagataagatggcggaggcctacagtgagattgggatgaaaggcgagcgccggaggggcaaggggcacgatggcctttaccagggtctcagtacagccaccaaggacacctacgacgcccttcacatgcaggccctgccccctcgctga

SEQ ID NO: 5011 - DNA, 1866 bp, synthetic construct
  source 1..1866: mol_type = other DNA
atggccttaccagtgaccgccttgctcctgccgctggccttgctgctccacgccgccaggccggacatccagatgacacagagccctagcagcctgtctgccagcgtgggagacagagtgaccatcacatgcaaggccagcgaccacatcaacaactggctggcctggtatcagcagaagcctggcaaggcccctaagctgctgatctacggcgctaccacactggaaacaggcgtgcccagcagattttctggcagcggctctggcaccgacttcaccctgacaatatccagcctccagcctgaggacttcgccacctactactgtcagcagagctggaacaccccttggacattcggccagggcaccaaggtggaaatcaagagactcgaggacctgaagaacgtgttcccacctgaggtggccgtgttcgagcctagcgaggccgagatcagccacacccagaaagccaccctcgtgtgcctggctaccggcttctaccccgaccatgtggaactgtcttggtgggtcaacggcaaagaggtgcacagcggcgtgtgtaccgacccccagccactgaaagaacagcccgccctgaacgacagccggtactgcctgagcagcagactgagagtgtccgccaccttctggcagaacccccggaaccacttcagatgccaggtgcagttctacggcctgagcgagaacgacgagtggacccaggacagagccaagcccgtgacccagatcgtgtctgccgaagcctggggcagagccgattgcggctttaccagcgagagctaccagcagggcgtgctgagcgccaccatcctgtacgagatcctgctgggcaaggccaccctgtacgccgtgctggtgtctgccctggtgctgatggctatggtcaagcggaaggacagccggggaagggccaagcgatctggatctggagcaacaaacttctcactactcaaacaagcaggtgacgtggaggagaatcccgggcctactagtatggactggatttggcgcatccttttccttgtcggcgctgctaccggcgcgcattccttcgaagttcagctggttgaatctggcggcggactggttcaacctggcggatctctgagactgagctgtgccgcctctggctacgcctttagcagctactgggtcaactgggttcgacaggcccctggcaaaggactggaatgggtcgcccaaatctatcccggcgacggcgacaccaactacaacggcaagttcaagggcagattcaccatcagccgggacaacagcaagaacaccctgtacctccagatgaactccctgagagccgaggacaccgccgtgtactattgtgccagatccatcaccaccgtcgtgggctgcgctatggattattggggccagggaaccctggtcaccgtgtcctctacgcgtatccagaaccctgatcctgccgtgtaccagctgcgggatagcaagagcagcgacaagagcgtgtgtctgttcaccgacttcgacagccagaccaacgtgtcccagagcaaggactccgacgtgtacatcaccgataagtgcgtgctggacatgcggagcatggacttcaagagcaactccgccgtggcctggtccaacaagtccgatttcgcctgcgccaacgccttcaacaacagcattatccccgaggacacattcttcccaagccccgagagcagctgcgacgtgaagctggtggaaaagagcttcgagacagacaccaacctgaacttccagaacctgagcgtgatcggcttcagaatcctgctgctgaaagtggccggctttaacctgctgatgaccctgcggctgtggtccagctaa

SEQ ID NO: 5012 - DNA, 2295 bp, synthetic construct
  source 1..2295: mol_type = other DNA
atggccttaccagtgaccgccttgctcctgccgctggccttgctgctccacgccgccaggccggacatccagatgacacagagccctagcagcctgtctgccagcgtgggagacagagtgaccatcacatgcaaggccagcgaccacatcaacaactggctggcctggtatcagcagaagcctggcaaggcccctaagctgctgatctacggcgctaccacactggaaacaggcgtgcccagcagattttctggcagcggctctggcaccgacttcaccctgacaatatccagcctccagcctgaggacttcgccacctactactgtcagcagagctggaacaccccttggacattcggccagggcaccaaggtggaaatcaagagactcgaggacctgaagaacgtgttcccacctgaggtggccgtgttcgagcctagcgaggccgagatcagccacacccagaaagccaccctcgtgtgcctggctaccggcttctaccccgaccatgtggaactgtcttggtgggtcaacggcaaagaggtgcacagcggcgtgtgtaccgacccccagccactgaaagaacagcccgccctgaacgacagccggtactgcctgagcagcagactgagagtgtccgccaccttctggcagaacccccggaaccacttcagatgccaggtgcagttctacggcctgagcgagaacgacgagtggacccaggacagagccaagcccgtgacccagatcgtgtctgccgaagcctggggcagagccgattgcggctttaccagcgagagctaccagcagggcgtgctgagcgccaccatcctgtacgagatcctgctgggcaaggccaccctgtacgccgtgctggtgtctgccctggtgctgatggctatggtcaagcggaaggacagccggggaagggccaagcgatctggatctggagcaacaaacttctcactactcaaacaagcaggtgacgtggaggagaatcccgggcctactagtgccaccatggactggatttggcgcatccttttccttgtcggcgctgctaccggcgcccattccgggccccaggttcagctgcaagagtctggccctggcctggtcaagcctagccaaacactgagcctgacctgtaccgtgtctggcggctctatcaccaccggcgagttctactggaactggttcagacagcctcctggcaaaggactggaatggatgggagccattgccgccagcggcagcacaacatacagccctagcttcgagagccggaccagcatcagcagagacaccagcaagaatcagttcagcctgaagctgagcagcgtgacagccgccgatacagccgtgtattactgcggcagatcctttggagtggccgccgtgacaaccggccagaatagaggacagggcaccctggtcacagtgtctagcggatccggcggcggaggatctggcggaggcggatctgggggcggaggctctttcgaagttcagctggttgaatctggcggcggactggttcaacctggcggatctctgagactgagctgtgccgcctctggctacgcctttagcagctactgggtcaactgggttcgacaggcccctggcaaaggactggaatgggtcgcccaaatctatcccggcgacggcgacaccaactacaacggcaagttcaagggcagattcaccatcagccgggacaacagcaagaacaccctgtacctccagatgaactccctgagagccgaggacaccgccgtgtactattgtgccagatccatcaccaccgtcgtgggctgcgctatggattattggggccagggaaccctggtcaccgtgtcctctacgcgtatccagaaccctgatcctgccgtgtaccagctgcgggatagcaagagcagcgacaagagcgtgtgtctgttcaccgacttcgacagccagaccaacgtgtcccagagcaaggactccgacgtgtacatcaccgataagtgcgtgctggacatgcggagcatggacttcaagagcaactccgccgtggcctggtccaacaagtccgatttcgcctgcgccaacgccttcaacaacagcattatccccgaggacacattcttcccaagccccgagagcagctgcgacgtgaagctggtggaaaagagcttcgagacagacaccaacctgaacttccagaacctgagcgtgatcggcttcagaatcctgctgctgaaagtggccggctttaacctgctgatgaccctgcggctgtggtccagctaa

SEQ ID NO: 5013 - DNA, 2289 bp, synthetic construct; identical to SEQ ID NO: 4900
  source 1..2289: mol_type = other DNA

SEQ ID NO: 5014 - DNA, 2283 bp, synthetic construct
  source 1..2283: mol_type = other DNA
atggccttaccagtgaccgccttgctcctgccgctggccttgctgctccacgccgccaggccggacatccagatgacacagagccctagcagcctgtctgccagcgtgggagacagagtgaccatcacatgcaaggccagcgaccacatcaacaactggctggcctggtatcagcagaagcctggcaaggcccctaagctgctgatctacggcgctaccacactggaaacaggcgtgcccagcagattttctggcagcggctctggcaccgacttcaccctgacaatatccagcctccagcctgaggacttcgccacctactactgtcagcagagctggaacaccccttggacattcggccagggcaccaaggtggaaatcaagagactcgaggacctgaagaacgtgttcccacctgaggtggccgtgttcgagcctagcgaggccgagatcagccacacccagaaagccaccctcgtgtgcctggctaccggcttctaccccgaccatgtggaactgtcttggtgggtcaacggcaaagaggtgcacagcggcgtgtgtaccgacccccagccactgaaagaacagcccgccctgaacgacagccggtactgcctgagcagcagactgagagtgtccgccaccttctggcagaacccccggaaccacttcagatgccaggtgcagttctacggcctgagcgagaacgacgagtggacccaggacagagccaagcccgtgacccagatcgtgtctgccgaagcctggggcagagccgattgcggctttaccagcgagagctaccagcagggcgtgctgagcgccaccatcctgtacgagatcctgctgggcaaggccaccctgtacgccgtgctggtgtctgccctggtgctgatggctatggtcaagcggaaggacagccggggaagggccaagcgatctggatctggagcaacaaacttctcactactcaaacaagcaggtgacgtggaggagaatcccgggcctactagtgccaccatggactggatttggcgcatccttttccttgtcggcgctgctaccggcgcccattccgggccccagctccagctgcaagagtctggacctggcctggtcaagcctagcgagacactgagcctgacctgtaccgtgtccggcgatagcatcagcagcggcgattactactggggctggatcagacagcctcctggcaaaggactggaatggatcggccacatctactacagcggcatcagctactacaaccccagcctgaagtccagagtgaccatcagcgtggacaccagccggaaccagttctccctgaagctgtctagcgtgacagccgccgataccgccgtgtactactgcaccagagaggacagcagcaactggcggagtagaggccagggaacactggtcacagttagctctggatccggcggcggaggatctggcggaggcggatctgggggcggaggctctttcgaagttcagctggttgaatctggcggcggactggttcaacctggcggatctctgagactgagctgtgccgcctctggctacgcctttagcagctactgggtcaactgggttcgacaggcccctggcaaaggactggaatgggtcgcccaaatctatcccggcgacggcgacaccaactacaacggcaagttcaagggcagattcaccatcagccgggacaacagcaagaacaccctgtacctccagatgaactccctgagagccgaggacaccgccgtgtactattgtgccagatccatcaccaccgtcgtgggctgcgctatggattattggggccagggaaccctggtcaccgtgtcctctacgcgtatccagaaccctgatcctgccgtgtaccagctgcgggatagcaagagcagcgacaagagcgtgtgtctgttcaccgacttcgacagccagaccaacgtgtcccagagcaaggactccgacgtgtacatcaccgataagtgcgtgctggacatgcggagcatggacttcaagagcaactccgccgtggcctggtccaacaagtccgatttcgcctgcgccaacgccttcaacaacagcattatccccgaggacacattcttcccaagccccgagagcagctgcgacgtgaagctggtggaaaagagcttcgagacagacaccaacctgaacttccagaacctgagcgtgatcggcttcagaatcctgctgctgaaagtggccggctttaacctgctgatgaccctgcggctgtggtccagctaa

SEQ ID NO: 5015 - DNA, 2283 bp, synthetic construct
  source 1..2283: mol_type = other DNA
atggccttaccagtgaccgccttgctcctgccgctggccttgctgctccacgccgccaggccggacatccagatgacacagagccctagcagcctgtctgccagcgtgggagacagagtgaccatcacatgcaaggccagcgaccacatcaacaactggctggcctggtatcagcagaagcctggcaaggcccctaagctgctgatctacggcgctaccacactggaaacaggcgtgcccagcagattttctggcagcggctctggcaccgacttcaccctgacaatatccagcctccagcctgaggacttcgccacctactactgtcagcagagctggaacaccccttggacattcggccagggcaccaaggtggaaatcaagagactcgaggacctgaagaacgtgttcccacctgaggtggccgtgttcgagcctagcgaggccgagatcagccacacccagaaagccaccctcgtgtgcctggctaccggcttctaccccgaccatgtggaactgtcttggtgggtcaacggcaaagaggtgcacagcggcgtgtgtaccgacccccagccactgaaagaacagcccgccctgaacgacagccggtactgcctgagcagcagactgagagtgtccgccaccttctggcagaacccccggaaccacttcagatgccaggtgcagttctacggcctgagcgagaacgacgagtggacccaggacagagccaagcccgtgacccagatcgtgtctgccgaagcctggggcagagccgattgcggctttaccagcgagagctaccagcagggcgtgctgagcgccaccatcctgtacgagatcctgctgggcaaggccaccctgtacgccgtgctggtgtctgccctggtgctgatggctatggtcaagcggaaggacagccggggaagggccaagcgatctggatctggagcaacaaacttctcactactcaaacaagcaggtgacgtggaggagaatcccgggcctactagtgccaccatggactggatttggcgcatccttttccttgtcggcgctgctaccggcgcccattccgggccccagctccagctgcaagagtctggacctggcctggtcaagcctagcgagacactgagcctgacctgtaccgtgtccggcgatagcatcagcagcggcgattactactggggctggatcagacagcctcctggcaaaggactggaatggatcggccacatctactacaacggcatcagctactacaaccccagcctgaagtccagagtgaccatcagcgtggacaccagccggaaccagttctccctgaagctgtctagcgtgacagccgccgataccgccgtgtactactgcaccagagaggacagcagcaactggcggagtagaggccagggaacactggtcacagttagctctggatccggcggcggaggatctggcggaggcggatctgggggcggaggctctttcgaagttcagctggttgaatctggcggcggactggttcaacctggcggatctctgagactgagctgtgccgcctctggctacgcctttagcagctactgggtcaactgggttcgacaggcccctggcaaaggactggaatgggtcgcccaaatctatcccggcgacggcgacaccaactacaacggcaagttcaagggcagattcaccatcagccgggacaacagcaagaacaccctgtacctccagatgaactccctgagagccgaggacaccgccgtgtactattgtgccagatccatcaccaccgtcgtgggctgcgctatggattattggggccagggaaccctggtcaccgtgtcctctacgcgtatccagaaccctgatcctgccgtgtaccagctgcgggatagcaagagcagcgacaagagcgtgtgtctgttcaccgacttcgacagccagaccaacgtgtcccagagcaaggactccgacgtgtacatcaccgataagtgcgtgctggacatgcggagcatggacttcaagagcaactccgccgtggcctggtccaacaagtccgatttcgcctgcgccaacgccttcaacaacagcattatccccgaggacacattcttcccaagccccgagagcagctgcgacgtgaagctggtggaaaagagcttcgagacagacaccaacctgaacttccagaacctgagcgtgatcggcttcagaatcctgctgctgaaagtggccggctttaacctgctgatgaccctgcggctgtggtccagctaa

SEQ ID NO: 5016 - DNA, 2277 bp, synthetic construct; identical to SEQ ID NO: 4965
  source 1..2277: mol_type = other DNA

SEQ ID NO: 5017 - DNA, 2283 bp, synthetic construct
  source 1..2283: mol_type = other DNA
atggccttaccagtgaccgccttgctcctgccgctggccttgctgctccacgccgccaggccggacatccagatgacacagagccctagcagcctgtctgccagcgtgggagacagagtgaccatcacatgcaaggccagcgaccacatcaacaactggctggcctggtatcagcagaagcctggcaaggcccctaagctgctgatctacggcgctaccacactggaaacaggcgtgcccagcagattttctggcagcggctctggcaccgacttcaccctgacaatatccagcctccagcctgaggacttcgccacctactactgtcagcagagctggaacaccccttggacattcggccagggcaccaaggtggaaatcaagagactcgaggacctgaagaacgtgttcccacctgaggtggccgtgttcgagcctagcgaggccgagatcagccacacccagaaagccaccctcgtgtgcctggctaccggcttctaccccgaccatgtggaactgtcttggtgggtcaacggcaaagaggtgcacagcggcgtgtgtaccgacccccagccactgaaagaacagcccgccctgaacgacagccggtactgcctgagcagcagactgagagtgtccgccaccttctggcagaacccccggaaccacttcagatgccaggtgcagttctacggcctgagcgagaacgacgagtggacccaggacagagccaagcccgtgacccagatcgtgtctgccgaagcctggggcagagccgattgcggctttaccagcgagagctaccagcagggcgtgctgagcgccaccatcctgtacgagatcctgctgggcaaggccaccctgtacgccgtgctggtgtctgccctggtgctgatggctatggtcaagcggaaggacagccggggaagggccaagcgatctggatctggagcaacaaacttctcactactcaaacaagcaggtgacgtggaggagaatcccgggcctactagtgccaccatggactggatttggcgcatccttttccttgtcggcgctgctaccggcgcccattccgggccccagctccagctgcaagagtctggacctggcctggtcaagcctagcgagacactgagcctgacctgtaccgtgtccggcgatagcatcagcagcggcgattactactggggctggatcagacagcctcctggcaaaggactggaatggatcggccacatctactacagcggcgtgacctactacaaccccagcctgaagtccagagtgaccatcagcgtggacaccagccggaaccagttctccctgaagctgtctagcgtgacagccgccgataccgccgtgtactactgcaccagagaggacagcagcaactggcggagtagaggccagggaacactggtcacagttagctctggatccggcggcggaggatctggcggaggcggatctgggggcggaggctctttcgaagttcagctggttgaatctggcggcggactggttcaacctggcggatctctgagactgagctgtgccgcctctggctacgcctttagcagctactgggtcaactgggttcgacaggcccctggcaaaggactggaatgggtcgcccaaatctatcccggcgacggcgacaccaactacaacggcaagttcaagggcagattcaccatcagccgggacaacagcaagaacaccctgtacctccagatgaactccctgagagccgaggacaccgccgtgtactattgtgccagatccatcaccaccgtcgtgggctgcgctatggattattggggccagggaaccctggtcaccgtgtcctctacgcgtatccagaaccctgatcctgccgtgtaccagctgcgggatagcaagagcagcgacaagagcgtgtgtctgttcaccgacttcgacagccagaccaacgtgtcccagagcaaggactccgacgtgtacatcaccgataagtgcgtgctggacatgcggagcatggacttcaagagcaactccgccgtggcctggtccaacaagtccgatttcgcctgcgccaacgccttcaacaacagcattatccccgaggacacattcttcccaagccccgagagcagctgcgacgtgaagctggtggaaaagagcttcgagacagacaccaacctgaacttccagaacctgagcgtgatcggcttcagaatcctgctgctgaaagtggccggctttaacctgctgatgaccctgcggctgtggtccagctaa

SEQ ID NO: 5018 - DNA, 2277 bp, synthetic construct
  source 1..2277: mol_type = other DNA
atggccttaccagtgaccgccttgctcctgccgctggccttgctgctccacgccgccaggccggacatccagatgacacagagccctagcagcctgtctgccagcgtgggagacagagtgaccatcacatgcaaggccagcgaccacatcaacaactggctggcctggtatcagcagaagcctggcaaggcccctaagctgctgatctacggcgctaccacactggaaacaggcgtgcccagcagattttctggcagcggctctggcaccgacttcaccctgacaatatccagcctccagcctgaggacttcgccacctactactgtcagcagagctggaacaccccttggacattcggccagggcaccaaggtggaaatcaagagactcgaggacctgaagaacgtgttcccacctgaggtggccgtgttcgagcctagcgaggccgagatcagccacacccagaaagccaccctcgtgtgcctggctaccggcttctaccccgaccatgtggaactgtcttggtgggtcaacggcaaagaggtgcacagcggcgtgtgtaccgacccccagccactgaaagaacagcccgccctgaacgacagccggtactgcctgagcagcagactgagagtgtccgccaccttctggcagaacccccggaaccacttcagatgccaggtgcagttctacggcctgagcgagaacgacgagtggacccaggacagagccaagcccgtgacccagatcgtgtctgccgaagcctggggcagagccgattgcggctttaccagcgagagctaccagcagggcgtgctgagcgccaccatcctgtacgagatcctgctgggcaaggccaccctgtacgccgtgctggtgtctgccctggtgctgatggctatggtcaagcggaaggacagccggggaagggccaagcgatctggatctggagcaacaaacttctcactactcaaacaagcaggtgacgtggaggagaatcccgggcctactagtgccaccatggactggatttggcgcatccttttccttgtcggcgctgctaccggcgcccattccgggccccagctccagctgcaagagtctggacctggcctggtcaagcctagcgagacactgagcctgacctgtaccgtgtccggcgatagcatcagcagcggcgattactactggggctggatcagacagcctcctggcaaaggactggaatggatcggccacatctactacaacggcatcagctactacaaccccagcctgaagtccagagtgaccatcagcgtggacaccagccggaaccagttctccctgaagctgtctagcgtgacagccgccgataccgccgtgtactactgcaccagagaggacagcagcaactggcggagtagaggccagggaacactggtcacagttagctctggatccgcacgcagcgaggacaggtataggaaccccaaaggaagtttcgaagttcagctggttgaatctggcggcggactggttcaacctggcggatctctgagactgagctgtgccgcctctggctacgcctttagcagctactgggtcaactgggttcgacaggcccctggcaaaggactggaatgggtcgcccaaatctatcccggcgacggcgacaccaactacaacggcaagttcaagggcagattcaccatcagccgggacaacagcaagaacaccctgtacctccagatgaactccctgagagccgaggacaccgccgtgtactattgtgccagatccatcaccaccgtcgtgggctgcgctatggattattggggccagggaaccctggtcaccgtgtcctctacgcgtatccagaaccctgatcctgccgtgtaccagctgcgggatagcaagagcagcgacaagagcgtgtgtctgttcaccgacttcgacagccagaccaacgtgtcccagagcaaggactccgacgtgtacatcaccgataagtgcgtgctggacatgcggagcatggacttcaagagcaactccgccgtggcctggtccaacaagtccgatttcgcctgcgccaacgccttcaacaacagcattatccccgaggacacattcttcccaagccccgagagcagctgcgacgtgaagctggtggaaaagagcttcgagacagacaccaacctgaacttccagaacctgagcgtgatcggcttcagaatcctgctgctgaaagtggccggctttaacctgctgatgaccctgcggctgtggtccagctaa

SEQ ID NO: 5019 - DNA, 2259 bp, synthetic construct
  source 1..2259: mol_type = other DNA
atggccttaccagtgaccgccttgctcctgccgctggccttgctgctccacgccgccaggccggacatccagatgacacagagccctagcagcctgtctgccagcgtgggagacagagtgaccatcacatgcaaggccagcgaccacatcaacaactggctggcctggtatcagcagaagcctggcaaggcccctaagctgctgatctacggcgctaccacactggaaacaggcgtgcccagcagattttctggcagcggctctggcaccgacttcaccctgacaatatccagcctccagcctgaggacttcgccacctactactgtcagcagagctggaacaccccttggacattcggccagggcaccaaggtggaaatcaagagactcgaggacctgaagaacgtgttcccacctgaggtggccgtgttcgagcctagcgaggccgagatcagccacacccagaaagccaccctcgtgtgcctggctaccggcttctaccccgaccatgtggaactgtcttggtgggtcaacggcaaagaggtgcacagcggcgtgtgtaccgacccccagccactgaaagaacagcccgccctgaacgacagccggtactgcctgagcagcagactgagagtgtccgccaccttctggcagaacccccggaaccacttcagatgccaggtgcagttctacggcctgagcgagaacgacgagtggacccaggacagagccaagcccgtgacccagatcgtgtctgccgaagcctggggcagagccgattgcggctttaccagcgagagctaccagcagggcgtgctgagcgccaccatcctgtacgagatcctgctgggcaaggccaccctgtacgccgtgctggtgtctgccctggtgctgatggctatggtcaagcggaaggacagccggggaagggccaagcgatctggatctggagcaacaaacttctcactactcaaacaagcaggtgacgtggaggagaatcccgggcctactagtgccaccatggactggatttggcgcatccttttccttgtcggcgctgctaccggcgcccattccgggccccagctccagctgcaagagtctggacctggcctggtcaagcctagcgagacactgagcctgacctgtaccgtgtccggcgatagcatcagcagcggcgattactactggggctggatcagacagcctcctggcaaaggactggaatggatcggccacatctactacagcggcatcagctactacaaccccagcctgaagtccagagtgaccatcagcgtggacaccagccggaaccagttctccctgaagctgtctagcgtgacagccgccgataccgccgtgtactactgcaccagagaggacagcagcaactggcggagtagaggccagggaacactggtcacagttagctctggatcccgcagcgaggacaggtataggttcgaagttcagctggttgaatctggcggcggactggttcaacctggcggatctctgagactgagctgtgccgcctctggctacgcctttagcagctactgggtcaactgggttcgacaggcccctggcaaaggactggaatgggtcgcccaaatctatcccggcgacggcgacaccaactacaacggcaagttcaagggcagattcaccatcagccgggacaacagcaagaacaccctgtacctccagatgaactccctgagagccgaggacaccgccgtgtactattgtgccagatccatcaccaccgtcgtgggctgcgctatggattattggggccagggaaccctggtcaccgtgtcctctacgcgtatccagaaccctgatcctgccgtgtaccagctgcgggatagcaagagcagcgacaagagcgtgtgtctgttcaccgacttcgacagccagaccaacgtgtcccagagcaaggactccgacgtgtacatcaccgataagtgcgtgctggacatgcggagcatggacttcaagagcaactccgccgtggcctggtccaacaagtccgatttcgcctgcgccaacgccttcaacaacagcattatccccgaggacacattcttcccaagccccgagagcagctgcgacgtgaagctggtggaaaagagcttcgagacagacaccaacctgaacttccagaacctgagcgtgatcggcttcagaatcctgctgctgaaagtggccggctttaacctgctgatgaccctgcggctgtggtccagctaa

SEQ ID NO: 5020 - DNA, 2259 bp, synthetic construct
  source 1..2259: mol_type = other DNA
atggccttaccagtgaccgccttgctcctgccgctggccttgctgctccacgccgccaggccggacatccagatgacacagagccctagcagcctgtctgccagcgtgggagacagagtgaccatcacatgcaaggccagcgaccacatcaacaactggctggcctggtatcagcagaagcctggcaaggcccctaagctgctgatctacggcgctaccacactggaaacaggcgtgcccagcagattttctggcagcggctctggcaccgacttcaccctgacaatatccagcctccagcctgaggacttcgccacctactactgtcagcagagctggaacaccccttggacattcggccagggcaccaaggtggaaatcaagagactcgaggacctgaagaacgtgttcccacctgaggtggccgtgttcgagcctagcgaggccgagatcagccacacccagaaagccaccctcgtgtgcctggctaccggcttctaccccgaccatgtggaactgtcttggtgggtcaacggcaaagaggtgcacagcggcgtgtgtaccgacccccagccactgaaagaacagcccgccctgaacgacagccggtactgcctgagcagcagactgagagtgtccgccaccttctggcagaacccccggaaccacttcagatgccaggtgcagttctacggcctgagcgagaacgacgagtggacccaggacagagccaagcccgtgacccagatcgtgtctgccgaagcctggggcagagccgattgcggctttaccagcgagagctaccagcagggcgtgctgagcgccaccatcctgtacgagatcctgctgggcaaggccaccctgtacgccgtgctggtgtctgccctggtgctgatggctatggtcaagcggaaggacagccggggaagggccaagcgatctggatctggagcaacaaacttctcactactcaaacaagcaggtgacgtggaggagaatcccgggcctactagtgccaccatggactggatttggcgcatccttttccttgtcggcgctgctaccggcgcccattccgggccccagctccagctgcaagagtctggacctggcctggtcaagcctagcgagacactgagcctgacctgtaccgtgtccggcgatagcatcagcagcggcgattactactggggctggatcagacagcctcctggcaaaggactggaatggatcggccacatctactacaacggcatcagctactacaaccccagcctgaagtccagagtgaccatcagcgtggacaccagccggaaccagttctccctgaagctgtctagcgtgacagccgccgataccgccgtgtactactgcaccagagaggacagcagcaactggcggagtagaggccagggaacactggtcacagttagctctggatcccgcagcgaggacaggtataggttcgaagttcagctggttgaatctggcggcggactggttcaacctggcggatctctgagactgagctgtgccgcctctggctacgcctttagcagctactgggtcaactgggttcgacaggcccctggcaaaggactggaatgggtcgcccaaatctatcccggcgacggcgacaccaactacaacggcaagttcaagggcagattcaccatcagccgggacaacagcaagaacaccctgtacctccagatgaactccctgagagccgaggacaccgccgtgtactattgtgccagatccatcaccaccgtcgtgggctgcgctatggattattggggccagggaaccctggtcaccgtgtcctctacgcgtatccagaaccctgatcctgccgtgtaccagctgcgggatagcaagagcagcgacaagagcgtgtgtctgttcaccgacttcgacagccagaccaacgtgtcccagagcaaggactccgacgtgtacatcaccgataagtgcgtgctggacatgcggagcatggacttcaagagcaactccgccgtggcctggtccaacaagtccgatttcgcctgcgccaacgccttcaacaacagcattatccccgaggacacattcttcccaagccccgagagcagctgcgacgtgaagctggtggaaaagagcttcgagacagacaccaacctgaacttccagaacctgagcgtgatcggcttcagaatcctgctgctgaaagtggccggctttaacctgctgatgaccctgcggctgtggtccagctaa

SEQ ID NO: 5021 - DNA, 2271 bp, synthetic construct
  source 1..2271: mol_type = other DNA
atggccttaccagtgaccgccttgctcctgccgctggccttgctgctccacgccgccaggccggacatccagatgacacagagccctagcagcctgtctgccagcgtgggagacagagtgaccatcacatgcaaggccagcgaccacatcaacaactggctggcctggtatcagcagaagcctggcaaggcccctaagctgctgatctacggcgctaccacactggaaacaggcgtgcccagcagattttctggcagcggctctggcaccgacttcaccctgacaatatccagcctccagcctgaggacttcgccacctactactgtcagcagagctggaacaccccttggacattcggccagggcaccaaggtggaaatcaagagactcgaggacctgaagaacgtgttcccacctgaggtggccgtgttcgagcctagcgaggccgagatcagccacacccagaaagccaccctcgtgtgcctggctaccggcttctaccccgaccatgtggaactgtcttggtgggtcaacggcaaagaggtgcacagcggcgtgtgtaccgacccccagccactgaaagaacagcccgccctgaacgacagccggtactgcctgagcagcagactgagagtgtccgccaccttctggcagaacccccggaaccacttcagatgccaggtgcagttctacggcctgagcgagaacgacgagtggacccaggacagagccaagcccgtgacccagatcgtgtctgccgaagcctggggcagagccgattgcggctttaccagcgagagctaccagcagggcgtgctgagcgccaccatcctgtacgagatcctgctgggcaaggccaccctgtacgccgtgctggtgtctgccctggtgctgatggctatggtcaagcggaaggacagccggggaagggccaagcgatctggatctggagcaacaaacttctcactactcaaacaagcaggtgacgtggaggagaatcccgggcctactagtgccaccatggactggatttggcgcatccttttccttgtcggcgctgctaccggcgcccattccgggccccaggttcagctgcaagagtctggccctggcctggtcaagcctagccaaacactgagcctgacctgtaccgtgtctggcggctctatcaccaccggcgagttctactggaactggttcagacagcctcctggcaaaggactggaatggatgggagccattgccgccagcggcagcacaacatacagccctagcttcgagagccggaccagcatcagcagagacaccagcaagaatcagttcagcctgaagctgagcagcgtgacagccgccgatacagccgtgtattactgcggcagatcctttggagtggccgccgtgacaaccggccagaatagaggacagggcaccctggtcacagtgtctagcggatcccgcagcgaggacaggtataggttcgaagttcagctggttgaatctggcggcggactggttcaacctggcggatctctgagactgagctgtgccgcctctggctacgcctttagcagctactgggtcaactgggttcgacaggcccctggcaaaggactggaatgggtcgcccaaatctatcccggcgacggcgacaccaactacaacggcaagttcaagggcagattcaccatcagccgggacaacagcaagaacaccctgtacctccagatgaactccctgagagccgaggacaccgccgtgtactattgtgccagatccatcaccaccgtcgtgggctgcgctatggattattggggccagggaaccctggtcaccgtgtcctctacgcgtatccagaaccctgatcctgccgtgtaccagctgcgggatagcaagagcagcgacaagagcgtgtgtctgttcaccgacttcgacagccagaccaacgtgtcccagagcaaggactccgacgtgtacatcaccgataagtgcgtgctggacatgcggagcatggacttcaagagcaactccgccgtggcctggtccaacaagtccgatttcgcctgcgccaacgccttcaacaacagcattatccccgaggacacattcttcccaagccccgagagcagctgcgacgtgaagctggtggaaaagagcttcgagacagacaccaacctgaacttccagaacctgagcgtgatcggcttcagaatcctgctgctgaaagtggccggctttaacctgctgatgaccctgcggctgtggtccagctaa

SEQ ID NO: 5022 - DNA, 1458 bp, synthetic construct
  source 1..1458: mol_type = other DNA
atggccttaccagtgaccgccttgctcctgccgctggccttgctgctccacgccgccaggccgcagatcgtgctgacacagagccccgccatcatgtctgttagccctggcgagaaagtgaccatgacctgtagcgccagcagcagcgtgaactacatgcactggttccagcagaagcccggcacaagccctaagctgtgggtgtacagcaccagcaatctggcctctggcgtgccagccagattttctggctctggcagcggcaccagctacagcctgacaatcagcagcatggaagccgaggatgccgccacctactattgtcagcagcggagcatctacccaccttggacatttggcggaggcaccaagctggaaatcaaaggcggaggcggaagtggaggcggaggatctggcggcggaggctctgaagttcagctccagcagagcggccctgagcttgtgaaacctggcgcttccgtgaagatcagctgcaaggccagcggctacagcttcaccggctacaccatgaactgggtcaagcagtcccacggcaagaacctggaatggatcggcctgattaacccctacaacggcggcacctcctacaaccagaagttcaaggccaaggccacactgaccgtggacaagagcagcagcacagcctacatgcagctgaagtccctgaccagcgaggacagcgccgtgtactactgcgccagagattacggctacgtgctggactattggggccagggcacaagcgtgacagtgtctagtacgcgtaccacgacgccagcgccgcgaccaccaacaccggcgcccaccatcgcgtcgcagcccctgtccctgcgcccagaggcgtgccggccagcggcggggggcgcagtgcacacgagggggctggacttcgcctgtgacatctacatctgggcgcccttggccgggacttgtggggtccttctcctgtcactggttatcaccctttactgcaaacggggcagaaagaaactcctgtatatattcaaacaaccatttatgagaccagtacaaactactcaagaggaagatggctgtagctgccgatttccagaagaagaagaaggaggatgtgaactgagagtgaagttcagcaggagcgcagacgcccccgcgtaccagcagggccagaaccagctctataacgagctgaatctaggacgaagagaggagtacgatgttttggacaagagacgtggccgggaccctgagatggggggaaagccgagaaggaagaaccctcaggaaggcctgtacaatgaactgcagaaagataagatggcggaggcctacagtgagattgggatgaaaggcgagcgccggaggggcaaggggcacgatggcctttaccagggtctcagtacagccaccaaggacacctacgacgcccttcacatgcaggccctgccccctcgctaa

SEQ ID NO: 5023 - DNA, 1914 bp, synthetic construct; identical to SEQ ID NO: 4871
  source 1..1914: mol_type = other DNA

SEQ ID NO: 5024 - DNA, 2010 bp, synthetic construct; identical to SEQ ID NO: 4840
  source 1..2010: mol_type = other DNA

SEQ ID NO: 5025 - DNA, 1479 bp, synthetic construct
  source 1..1479: mol_type = other DNA
atggccttaccagtgaccgccttgctcctgccgctggccttgctgctccacgccgccaggccggacatcgtgatgacacagagccctgatagcctggccgtgtctctgggagagagagccaccatcaactgcaagagcagccagagcctgctgaacagcggcaacaacaagaactacgtgacatggtatcagcagaagcccggccagcctcctaagctgctgatctactggggcagcaccagatccacaggcgtgcccgatagattttctggctctggcagcggcaccgacttcaccctgacaatttctagcctgcaagccgaggacgtggccgtgtactactgccagaacgactacacataccccttcaccttcggccagggcaccaagctggaaatcaaaggcggaggcggaagtggaggcggaggatctggcggcggaggctctcaagttcagctggttcagagcggagccgaagtgaagaaacctggggcctctgtgaaggtgtcctgcaaggcttccggctataccttcaccagcttttggctgaactgggtccgacaggcccctggacaaggactggaatggatgggcaacatctaccccagcgacagctacaccgtgtacaaccagaaattcaaggaccgcgtgaccatgaccagggacaccagcacaagcacagtgtacatggaactgagcagcctgcggagcgaggataccgccgtgtattattgcgccagaacctggcggggcaacagcttcgattattggggccagggaaccaccgtgaccgtgtcatctacgcgtaccacgacgccagcgccgcgaccaccaacaccggcgcccaccatcgcgtcgcagcccctgtccctgcgcccagaggcgtgccggccagcggcggggggcgcagtgcacacgagggggctggacttcgcctgtgacatctacatctgggcgcccttggccgggacttgtggggtccttctcctgtcactggttatcaccctttactgcaaacggggcagaaagaaactcctgtatatattcaaacaaccatttatgagaccagtacaaactactcaagaggaagatggctgtagctgccgatttccagaagaagaagaaggaggatgtgaactgagagtgaagttcagcaggagcgcagacgcccccgcgtaccagcagggccagaaccagctctataacgagctgaatctaggacgaagagaggagtacgatgttttggacaagagacgtggccgggaccctgagatggggggaaagccgagaaggaagaaccctcaggaaggcctgtacaatgaactgcagaaagataagatggcggaggcctacagtgagattgggatgaaaggcgagcgccggaggggcaaggggcacgatggcctttaccagggtctcagtacagccaccaaggacacctacgacgcccttcacatgcaggccctgccccctcgctaa

SEQ ID NO: 5026 - DNA, 1938 bp, synthetic construct
  source 1..1938: mol_type = other DNA
atggccttaccagtgaccgccttgctcctgccgctggccttgctgctccacgccgccaggccggcatgcgctagaagcgaagatcggtattggaaccccaagggtaccgacatcgtgatgacacagagccctgatagcctggccgtgtctctgggagagagagccaccatcaactgcaagagcagccagagcctgctgaacagcggcaacaacaagaactacgtgacatggtatcagcagaagcccggccagcctcctaagctgctgatctactggggcagcaccagatccacaggcgtgcccgatagattttctggctctggcagcggcaccgacttcaccctgacaatttctagcctgcaagccgaggacgtggccgtgtactactgccagaacgactacacataccccttcaccttcggccagggcaccaagctggaaatcaaactcgagatccagaaccctgatcctgccgtgtaccagctgcgggatagcaagagcagcgacaagagcgtgtgtctgttcaccgacttcgacagccagaccaacgtgtcccagagcaaggactccgacgtgtacatcaccgataagtgcgtgctggacatgcggagcatggacttcaagagcaactccgccgtggcctggtccaacaagtccgatttcgcctgcgccaacgccttcaacaacagcattatccccgaggacacattcttcccaagccccgagagcagctgcgacgtgaagctggtggaaaagagcttcgagacagacaccaacctgaacttccagaacctgagcgtgatcggcttcagaatcctgctgctgaaagtggccggctttaacctgctgatgaccctgcggctgtggtccagctctagtcgcgccaagagaagcggatctggcgtgaagcagaccctgaatttcgacctgctgaagctggctggcgacgtggaatccaacccaggccctactagtatggactggatttggcgcatccttttccttgtcggcgctgctaccggcgcgcattccttcgaacaagttcagctggttcagagcggagccgaagtgaagaaacctggggcctctgtgaaggtgtcctgcaaggcttccggctataccttcaccagcttttggctgaactgggtccgacaggcccctggacaaggactggaatggatgggcaacatctaccccagcaccagctacaccgtgtacaaccagaaattcaaggaccgcgtgaccatgaccagggacaccagcacaagcacagtgtacatggaactgagcagcctgcggagcgaggataccgccgtgtattattgcgccagaacctggcggggcaacagcttcgattattggggccagggaaccaccgtgaccgtgtcatctacgcgtgaggacctgaagaacgtgttcccacctgaggtggccgtgttcgagcctagcgaggccgagatcagccacacccagaaagccaccctcgtgtgcctggctaccggcttctaccccgaccatgtggaactgtcttggtgggtcaacggcaaagaggtgcacagcggcgtgtgtaccgacccccagccactgaaagaacagcccgccctgaacgacagccggtactgcctgagcagcagactgagagtgtccgccaccttctggcagaacccccggaaccacttcagatgccaggtgcagttctacggcctgagcgagaacgacgagtggacccaggacagagccaagcccgtgacccagatcgtgtctgccgaagcctggggcagagccgattgcggctttaccagcgagagctaccagcagggcgtgctgagcgccaccatcctgtacgagatcctgctgggcaaggccaccctgtacgccgtgctggtgtctgccctggtgctgatggctatggtcaagcggaaggacagccggggataa

SEQ ID NO: 5027 - DNA, 2016 bp, synthetic construct
  source 1..2016: mol_type = other DNA
atggccttaccagtgaccgccttgctcctgccgctggccttgctgctccacgccgccaggccggcatgcgctagaagcgaagatcggtatcggaaccccaagggtaccgacatcgtgatgacacagagccctgatagcctggccgtgtctctgggagagagagccaccatcaactgcaagagcagccagagcctgctgaacagcggcaaccagaagaactacctggcctggtatcagcagaagcccggccagcctcctaagctgctgatctactggggcagcaccagatccacaggcgtgcccgatagattttctggctctggcagcggcaccgacttcaccctgacaatttctagcctgcaagccgaggacgtggccgtgtactactgccagaacgactacacataccccttcaccttcggccagggcaccaagctggaaatcaaactcgaggacctgaagaacgtgttcccacctgaggtggccgtgttcgagcctagcgaggccgagatcagccacacccagaaagccaccctcgtgtgcctggctaccggcttctaccccgaccatgtggaactgtcttggtgggtcaacggcaaagaggtgcacagcggcgtgtgtaccgacccccagccactgaaagaacagcccgccctgaacgacagccggtactgcctgagcagcagactgagagtgtccgccaccttctggcagaacccccggaaccacttcagatgccaggtgcagttctacggcctgagcgagaacgacgagtggacccaggacagagccaagcccgtgacccagatcgtgtctgccgaagcctggggcagagccgattgcggctttaccagcgagagctaccagcagggcgtgctgagcgccaccatcctgtacgagatcctgctgggcaaggccaccctgtacgccgtgctggtgtctgccctggtgctgatggctatggtcaagcggaaggacagccggggaagggccaagcgatctggatctggagcaacaaacttctcactactcaaacaagcaggtgacgtggaggagaatcccgggcctactagtgccaccatggactggatttggcgcatccttttccttgtcggcgctgctaccggcgcccattccgggcccgccagaagcgaggacagatacagaaaccccaaaggatccggcggcggaggatctggcggaggcggatctgggggcggaggctctttcgaacaagttcagctggttcagagcggagccgaagtgaagaaacctggggcctctgtgaaggtgtcctgcaaggcttccggctataccttcaccagcttttggctgaactgggtccgacaggcccctggacaaggactggaatggatgggcaacatctaccccagcgacagctacaccgtgtacaaccagaaattcaaggaccgcgtgaccatgaccagggacaccagcacaagcacagtgtacatggaactgagcagcctgcggagcgaggataccgccgtgtattattgcgccagaacctggcggggcaacagcttcgattattggggccagggaaccaccgtgaccgtgtcatctacgcgtatccagaaccctgatcctgccgtgtaccagctgcgggatagcaagagcagcgacaagagcgtgtgtctgttcaccgacttcgacagccagaccaacgtgtcccagagcaaggactccgacgtgtacatcaccgataagtgcgtgctggacatgcggagcatggacttcaagagcaactccgccgtggcctggtccaacaagtccgatttcgcctgcgccaacgccttcaacaacagcattatccccgaggacacattcttcccaagccccgagagcagctgcgacgtgaagctggtggaaaagagcttcgagacagacaccaacctgaacttccagaacctgagcgtgatcggcttcagaatcctgctgctgaaagtggccggctttaacctgctgatgaccctgcggctgtggtccagctaa

SEQ ID NO: 5028 - DNA, 1932 bp, synthetic construct; identical to SEQ ID NO: 4853
  source 1..1932: mol_type = other DNA

SEQ ID NO: 5029 - DNA, 1920 bp, synthetic construct; identical to SEQ ID NO: 4854
  source 1..1920: mol_type = other DNA

SEQ ID NO: 5030 - DNA, 2028 bp, synthetic construct; identical to SEQ ID NO: 4839
  source 1..2028: mol_type = other DNA

SEQ ID NO: 5031 - DNA, 2925 bp, synthetic construct
  source 1..2925: mol_type = other DNA
atggccttaccagtgaccgccttgctcctgccgctggccttgctgctccacgccgccaggccggacatccagatgacacagagccctagcagcctgtctgccagcgtgggagacagagtgaccatcacatgcaaggccagcgaccacatcaacaactggctggcctggtatcagcagaagcctggacaggcccctaagctgctgatctacggcgctaccacactggaaacaggcgtgcccagcagattttctggcagcggctctggcaccgactacaccctgacaatatccagcctccagcctgaggacttcgccacctactactgtcagcagagctggaacaccccttggacattcggccagggcaccaagctggaaatcaagagactcgaggacctgaagaacgtgttcccacctgaggtggccgtgttcgagcctagcgaggccgagatcagccacacccagaaagccaccctcgtgtgcctggctaccggcttctaccccgaccatgtggaactgtcttggtgggtcaacggcaaagaggtgcacagcggcgtgtctaccgacccccagccactgaaagaacagcccgccctgaacgacagccggtactgcctgagcagcagactgagagtgtccgccaccttctggcagaacccccggaaccacttcagatgccaggtgcagttctacggcctgagcgagaacgacgagtggacccaggacagagccaagcccgtgacccagatcgtgtctgccgaagcctggggcagagccgattgcggatcccagagcttcggcctgctggaccccaagctgtgctacctgctggatggcatcctgttcatctacggcgtgatcctgaccgccctgttcctgagagtgaagttcagcagaagcgccgacgcccctgcctaccagcagggacagaaccaactgtacaacgagctgaacctgggcagacgggaagagtacgacgtgctggacaagcggagaggcagggaccctgagatgggcggaaagccccggagaaagaacccccaggaaggactgtataacgaactccagaaagacaagatggccgaagcctacagcgagatcggcatgaagggcgagcggagaagaggcaagggccacgatggcctgtaccagggcctgagcaccgccaccaaggacacctatgacgccctgcacatgcaggccctgcctccaagaagggccaagcgatctggatctggagcaacaaacttctcactactcaaacaagcaggtgacgtggaggagaatcccgggcctactagtatggactggatttggcgcatccttttccttgtcggcgctgctaccggcgcgcattccttcgaacaagttcagcttcaacagcctggcgctgagctggtcaaacctggcgcttctgtgaagatgagctgcaaagccagcggctacgccttcagcagctactggatcaactggatgaagcagaaacccggccagggactcgaatggatcggccaaatctatcccggcgacggcgacaccaactacaacggcaagttcaagggcagagccacactgaccgccgatacctctagcagcacagcctacatgcagctgagcagcctgaccagcgaagatagcgccgtgtacttctgtgcccggtccatcacaacagtcgtgggctgcgctatggactattggggccagggaacaagcgtgaccgtgtctagtacgcgtatccagaaccctgatcctgccgtgtaccagctgcgggatagcaagagcagcgacaagagcgtgtgtctgttcaccgacttcgacagccagaccaacgtgtcccagagcaaggactccgacgtgtacatcaccgataagaccgtgctggacatgcggagcatggacttcaagagcaactccgccgtggcctggtccaacaagtccgatttcgcctgcgccaacgccttcaacaacagcattatccccgaggacacattcttcccaagccccgagagcagctgcggtaccatcactcaaggtttggcagtgtcaaccatctcatcattctttccacctggctaccaagtgtccttctgcctggtcatggtgctgctgttcgccgtggataccggcctgtacttcagcgtcaagaccaacatccggtccagcaccagagactggaaggaccacaagttcaagtggcggaaggaccctcaggacaagagggccaagcgatctggatctggagcaacaaacttctcactactcaaacaagcaggtgacgtggaggagaatcccgggccttctagaatgtaccggatgcagctgctgagctgtatcgccctgtctctggccctggtcacaaatagcaactgggttaacgtgatctccgacctgaagaagatcgaggacctgatccagtccatgcacatcgacgccacactgtacaccgagagcgacgtgcaccctagctgtaaagtgaccgccatgaagtgctttctgctggaactgcaagtgatctccctggaaagcggcgacgccagcatccacgacaccgtgaagaacctgattatcctggctaacaacagcctgagcagcaacggcaacgtgaccgagtccggctgtaaagagtgcgaggaactggaagagaagaatatcaaagagttcctccagagcttcgtgcacatcgtgcagatgttcatcaacaccagcaagatcgaagtgatgtaccctcctccttacctggacaacgagaagtccaacggcaccatcatccacgtgaagggcaagcacctgtgtccttctccactgttccccggacctagcaagcctttctgggtgctcgttgttgttggcggcgtgctggcctgttacagcctgctggttaccgtggccttcatcatcttttgggtccgaagcaagcggagctaa

SEQ ID NO: 5032 - DNA, 1518 bp, synthetic construct
  source 1..1518: mol_type = other DNA
atggccttaccagtgaccgccttgctcctgccgctggccttgctgctccacgccgccaggccggacatccagatgacacagagccctagcagcctgtctgccagcgtgggagacagagtgaccatcacatgcaaggccagcgaccacatcaacaactggctggcctggtatcagcagaagcctggacaggcccctaagctgctgatctacggcgctaccacactggaaacaggcgtgcccagcagattttctggcagcggctctggcaccgactacaccctgacaatatccagcctccagcctgaggacttcgccacctactactgtcagcagagctggaacaccccttggacattcggccagggcaccaagctggaaatcaagagaggcggaggcggaagtggaggcggaggatctggcggcggaggctctcaagttcagcttcaacagcctggcgctgagctggtcaaacctggcgcttctgtgaagatgagctgcaaagccagcggctacgccttcagcagctactggatcaactggatgaagcagaaacccggccagggactcgaatggatcggccaaatctatcccggcgacggcgacaccaactacaacggcaagttcaagggcagagccacactgaccgccgatacctctagcagcacagcctacatgcagctgagcagcctgaccagcgaagatagcgccgtgtacttctgtgcccggtccatcacaacagtcgtgggctgcgctatggactattggggccagggaacaagcgtgaccgtgtctagtacgcgtggaatgaggactgaggatcttcccaaagctgtcgtctttctcgaaccccaatggtatcgggtgctcgaaaaagactctgtgacactgaaatgccaaggggcctactctcccgaggacaactccacacagtggtttcataatgagtccctcatcagctctcaggccagctcttatttcattgatgccgctacagtggacgactccggcgagtatcggtgtcagaccaatctgtctacactgtctgaccccgtgcagcttgaggtccacattggatggttgctcttgcaagccccacgctgggttttcaaagaggaagatccaatccatctgcggtgccacagctggaaaaacaccgctctccacaaagtcacatacctgcaaaatggcaaaggacgcaaatacttccatcacaattccgatttttacattccgaaggctaccctgaaagacagcggcagctatttctgccggggactcgtcggctccaagaatgtgtcctccgaaaccgtgaatatcacgattacccaaggactggctgtgcctacaatctctagcttctttccgcctggataccaagtctccttctgtcttgtgatggtcctcctgtttgctgtggacacaggactgtacttttccgtgaaaacgaacatccgcagctccacacgcgattggaaagatcacaagtttaaatggcgcaaagatccccaggacaagtaa

SEQ ID NO: 5033 - DNA, 1473 bp, synthetic construct
  source 1..1473: mol_type = other DNA
atggccttaccagtgaccgccttgctcctgccgctggccttgctgctccacgccgccaggccggacatccagatgacacagagccctagcagcctgtctgccagcgtgggagacagagtgaccatcacatgcaaggccagcgaccacatcaacaactggctggcctggtatcagcagaagcctggacaggcccctaagctgctgatctacggcgctaccacactggaaacaggcgtgcccagcagattttctggcagcggctctggcaccgactacaccctgacaatatccagcctccagcctgaggacttcgccacctactactgtcagcagagctggaacaccccttggacattcggccagggcaccaagctggaaatcaagagaggcggaggcggaagtggaggcggaggatctggcggcggaggctctcaagttcagcttcaacagcctggcgctgagctggtcaaacctggcgcttctgtgaagatgagctgcaaagccagcggctacgccttcagcagctactggatcaactggatgaagcagaaacccggccagggactcgaatggatcggccaaatctatcccggcgacggcgacaccaactacaacggcaagttcaagggcagagccacactgaccgccgatacctctagcagcacagcctacatgcagctgagcagcctgaccagcgaagatagcgccgtgtacttctgtgcccggtccatcacaacagtcgtgggctgcgctatggactattggggccagggaacaagcgtgaccgtgtctagtacgcgtaccacgacgccagcgccgcgaccaccaacaccggcgcccaccatcgcgtcgcagcccctgtccctgcgcccagaggcgtgccggccagcggcggggggcgcagtgcacacgagggggctggacttcgcctgtgacatctacatctgggcgcccttggccgggacttgtggggtccttctcctgtcactggttatcaccctttactgcaaacggggcagaaagaaactcctgtatatattcaaacaaccatttatgagaccagtacaaactactcaagaggaagatggctgtagctgccgatttccagaagaagaagaaggaggatgtgaactgagagtgaagttcagcaggagcgcagacgcccccgcgtaccagcagggccagaaccagctctataacgagctgaatctaggacgaagagaggagtacgatgttttggacaagagacgtggccgggaccctgagatggggggaaagccgagaaggaagaaccctcaggaaggcctgtacaatgaactgcagaaagataagatggcggaggcctacagtgagattgggatgaaaggcgagcgccggaggggcaaggggcacgatggcctttaccagggtctcagtacagccaccaaggacacctacgacgcccttcacatgcaggccctgccccctcgctaa

SEQ ID NO: 5034 - DNA, 3189 bp, synthetic construct; identical to SEQ ID NO: 4911
  source 1..3189: mol_type = other DNA

SEQ ID NO: 5035 - DNA, 1500 bp, synthetic construct
  source 1..1500: mol_type = other DNA
atggccttaccagtgaccgccttgctcctgccgctggccttgctgctccacgccgccaggccggacatccagatgacacagagccctagcagcctgtctgccagcgtgggagacagagtgaccatcacatgcaaggccagccaggatgtgggcacagccgtggattggtatcagcagaagcctggcaaggcccctaagctgctgatctactgggccagcacaagacacacaggcgtgcccagcagattttctggcagcggctctggcaccgacttcaccctgacaatatccagcctccagcctgaggacttcgccacctactactgccagcagtacaacagctaccctctgaccttcggccagggcaccaaggtggaaatcaaaagaggcggaggcggatctggcggcggaggtagcggtggcggaggatctgaagtgcagctggttgaatcaggtggcggcctggttcaacctggcggatctctgagactgagctgtgccgccagcggctacacctttaccgagtacacaatccactgggtccgacaggcccctggcaaaggacttgagtgggtcgccaacatcaaccccaacaatggcggcaccacctacaaccagaagttcgaggacagattcaccatcagccgggacaacagcaagaacaccctgtacctccagatgaactccctgagagccgaggacaccgccgtgtactattgtgccagaggctggaacttcgactactggggccagggaacactggtcaccgttagctctacgcgtggaatgaggactgaggatcttcccaaagctgtcgtctttctcgaaccccaatggtatcgggtgctcgaaaaagactctgtgacactgaaatgccaaggggcctactctcccgaggacaactccacacagtggtttcataatgagtccctcatcagctctcaggccagctcttatttcattgatgccgctacagtggacgactccggcgagtatcggtgtcagaccaatctgtctacactgtctgaccccgtgcagcttgaggtccacattggatggttgctcttgcaagccccacgctgggttttcaaagaggaagatccaatccatctgcggtgccacagctggaaaaacaccgctctccacaaagtcacatacctgcaaaatggcaaaggacgcaaatacttccatcacaattccgatttttacattccgaaggctaccctgaaagacagcggcagctatttctgccggggactcgtcggctccaagaatgtgtcctccgaaaccgtgaatatcacgattacccaaggactggctgtgcctacaatctctagcttctttccgcctggataccaagtctccttctgtcttgtgatggtcctcctgtttgctgtggacacaggactgtacttttccgtgaaaacgaacatccgcagctccacacgcgattggaaagatcacaagtttaaatggcgcaaagatccccaggacaagtaa

SEQ ID NO: 5036 - DNA, 1455 bp, synthetic construct; identical to SEQ ID NO: 4927
  source 1..1455: mol_type = other DNA

SEQ ID NO: 5037 - DNA, 3171 bp, synthetic construct; identical to SEQ ID NO: 4938
  source 1..3171: mol_type = other DNA

SEQ ID NO: 5038 - DNA, 3063 bp, synthetic construct; identical to SEQ ID NO: 4939
  source 1..3063: mol_type = other DNA

SEQ ID NO: 5039 - DNA, 1869 bp, synthetic construct
  source 1..1869: mol_type = other DNA
atggccttaccagtgaccgccttgctcctgccgctggccttgctgctccacgccgccaggccggacatccagatgacacagagccctagcagcctgtctgccagcgtgggagacagagtgaccatcacatgcaaggccagcgaccacatcaacaactggctggcctggtatcagcagaagcctggacaggcccctaagctgctgatctacggcgctaccacactggaaacaggcgtgcccagcagattttctggcagcggctctggcaccgactacaccctgacaatatccagcctccagcctgaggacttcgccacctactactgtcagcagagctggaacaccccttggacattcggccagggcaccaagctggaaatcaagagactcgaggacctgaagaacgtgttcccacctgaggtggccgtgttcgagcctagcgaggccgagatcagccacacccagaaagccaccctcgtgtgcctggctaccggcttctaccccgaccatgtggaactgtcttggtgggtcaacggcaaagaggtgcacagcggcgtgtgtaccgacccccagccactgaaagaacagcccgccctgaacgacagccggtactgcctgagcagcagactgagagtgtccgccaccttctggcagaacccccggaaccacttcagatgccaggtgcagttctacggcctgagcgagaacgacgagtggacccaggacagagccaagcccgtgacccagatcgtgtctgccgaagcctggggcagagccgattgcggctttaccagcgagagctaccagcagggcgtgctgagcgccaccatcctgtacgagatcctgctgggcaaggccaccctgtacgccgtgctggtgtctgccctggtgctgatggctatggtcaagcggaaggacagccggggaagggccaagcgatctggatctggagcaacaaacttctcactactcaaacaagcaggtgacgtggaggagaatcccgggcctactagtatggactggatttggcgcatccttttccttgtcggcgctgctaccggcgcgcattccttcgaacaagttcagcttcaacagcctggcgctgagctggtcaaacctggcgcttctgtgaagatgagctgcaaagccagcggctacgccttcagcagctactggatcaactggatgaagcagaaacccggccagggactcgaatggatcggccaaatctatcccggcgacggcgacaccaactacaacggcaagttcaagggcagagccacactgaccgccgatacctctagcagcacagcctacatgcagctgagcagcctgaccagcgaagatagcgccgtgtacttctgtgcccggtccatcacaacagtcgtgggctgcgctatggactattggggccagggaacaagcgtgaccgtgtctagtacgcgtatccagaaccctgatcctgccgtgtaccagctgcgggatagcaagagcagcgacaagagcgtgtgtctgttcaccgacttcgacagccagaccaacgtgtcccagagcaaggactccgacgtgtacatcaccgataagtgcgtgctggacatgcggagcatggacttcaagagcaactccgccgtggcctggtccaacaagtccgatttcgcctgcgccaacgccttcaacaacagcattatccccgaggacacattcttcccaagccccgagagcagctgcgacgtgaagctggtggaaaagagcttcgagacagacaccaacctgaacttccagaacctgagcgtgatcggcttcagaatcctgctgctgaaagtggccggctttaacctgctgatgaccctgcggctgtggtccagctaa

SEQ ID NO: 5040 - DNA, 2445 bp, synthetic construct; identical to SEQ ID NO: 4864
  source 1..2445: mol_type = other DNA

SEQ ID NO: 5041 - DNA, 1869 bp, synthetic construct; identical to SEQ ID NO: 4866
  source 1..1869: mol_type = other DNA

SEQ ID NO: 5042 - DNA, 2283 bp, synthetic construct; identical to SEQ ID NO: 4867
  source 1..2283: mol_type = other DNA

SEQ ID NO: 5043 - DNA, 2283 bp, synthetic construct; identical to SEQ ID NO: 4868
  source 1..2283: mol_type = other DNA

SEQ ID NO: 5044 - DNA, 1905 bp, synthetic construct
  source 1..1905: mol_type = other DNA
atggccttaccagtgaccgccttgctcctgccgctggccttgctgctccacgccgccaggccgcaggttcagctccagcagtctggacctggcctggtcaagcctagccagacactgtctctgacctgtgccatcagcggcgatagcgtgtcctctaatagagccgcctggaactggatcagacagagccctagcagaggactccagtggctgggcagaacctactaccgcagcaagtggtacaacgactacgccgtgtctctgcggagccggatcaccatcaatcccgtgaccagcaagaaccaggtggccctgcacatgaacagcgtgacccctgaagataccgccgtgtactactgtgccagagccggaattgtggtggtgcccggacctgagacattctactactacgaccacggcctggacgtgtggggccagggaacaacagtgactgtctcttctctcgaggacctgaagaacgtgttcccacctgaggtggccgtgttcgagcctagcgaggccgagatcagccacacccagaaagccaccctcgtgtgcctggctaccggcttctaccccgaccatgtggaactgtcttggtgggtcaacggcaaagaggtgcacagcggcgtgtgtaccgacccccagccactgaaagaacagcccgccctgaacgacagccggtactgcctgagcagcagactgagagtgtccgccaccttctggcagaacccccggaaccacttcagatgccaggtgcagttctacggcctgagcgagaacgacgagtggacccaggacagagccaagcccgtgacccagatcgtgtctgccgaagcctggggcagagccgattgcggctttaccagcgagagctaccagcagggcgtgctgagcgccaccatcctgtacgagatcctgctgggcaaggccaccctgtacgccgtgctggtgtctgccctggtgctgatggctatggtcaagcggaaggacagccggggaagggccaagcgatctggatctggagcaacaaacttctcactactcaaacaagcaggtgacgtggaggagaatcccgggcctactagtatggactggatttggcgcatccttttccttgtcggcgctgctaccggcgcgcattccttcgaagacatccagatgacacagagcccctctagcctgtctgccagcgtgggagacagagtgaccatcacctgtagagccagccagagcatcagaaactacctgaactggtatcagcaaaagcccggcaaggcccctgagctgctgattcatgctgcaagcagcctccagagcggcgtgccaagcagattttctggcagcggcagcggaaccgacttcaccctgacaatatctagcctccagcctgaggacttcgccagctactactgccagcagagctacagcgcccctcctatcacctttggacagggcaccagactggaaatcaagacgcgtatccagaaccctgatcctgccgtgtaccagctgcgggatagcaagagcagcgacaagagcgtgtgtctgttcaccgacttcgacagccagaccaacgtgtcccagagcaaggactccgacgtgtacatcaccgataagtgcgtgctggacatgcggagcatggacttcaagagcaactccgccgtggcctggtccaacaagtccgatttcgcctgcgccaacgccttcaacaacagcattatccccgaggacacattcttcccaagccccgagagcagctgcgacgtgaagctggtggaaaagagcttcgagacagacaccaacctgaacttccagaacctgagcgtgatcggcttcagaatcctgctgctgaaagtggccggctttaacctgctgatgaccctgcggctgtggtccagctaa

SEQ ID NO: 5045 - DNA, 2001 bp, synthetic construct; identical to SEQ ID NO: 4832
  source 1..2001: mol_type = other DNA

SEQ ID NO: 5046 - DNA, 1950 bp, synthetic construct; identical to SEQ ID NO: 4852
  source 1..1950: mol_type = other DNA

SEQ ID NO: 5047 - DNA, 1479 bp, synthetic construct; identical to SEQ ID NO: 5025
  source 1..1479: mol_type = other DNA

SEQ ID NO: 5048 - DNA, 1893 bp, synthetic construct
  source 1..1893: mol_type = other DNA
atggccttaccagtgaccgccttgctcctgccgctggccttgctgctccacgccgccaggccggacatcgtgatgacacagagccctgatagcctggccgtgtctctgggagagagagccaccatcaactgcaagagcagccagagcctgctgaacagcggcaacaacaagaactacgtgacatggtatcagcagaagcccggccagcctcctaagctgctgatctactggggcagcaccagatccacaggcgtgcccgatagattttctggctctggcagcggcaccgacttcaccctgacaatttctagcctgcaagccgaggacgtggccgtgtactactgccagaacgactacacataccccttcaccttcggccagggcaccaagctggaaatcaaactcgagatccagaaccctgatcctgccgtgtaccagctgcgggatagcaagagcagcgacaagagcgtgtgtctgttcaccgacttcgacagccagaccaacgtgtcccagagcaaggactccgacgtgtacatcaccgataagtgcgtgctggacatgcggagcatggacttcaagagcaactccgccgtggcctggtccaacaagtccgatttcgcctgcgccaacgccttcaacaacagcattatccccgaggacacattcttcccaagccccgagagcagctgcgacgtgaagctggtggaaaagagcttcgagacagacaccaacctgaacttccagaacctgagcgtgatcggcttcagaatcctgctgctgaaagtggccggctttaacctgctgatgaccctgcggctgtggtccagctctagtcgcgccaagagaagcggatctggcgtgaagcagaccctgaatttcgacctgctgaagctggctggcgacgtggaatccaacccaggccctactagtatggactggatttggcgcatccttttccttgtcggcgctgctaccggcgcgcattccttcgaacaagttcagctggttcagagcggagccgaagtgaagaaacctggggcctctgtgaaggtgtcctgcaaggcttccggctataccttcaccagcttttggctgaactgggtccgacaggcccctggacaaggactggaatggatgggcaacatctaccccagcaccagctacaccgtgtacaaccagaaattcaaggaccgcgtgaccatgaccagggacaccagcacaagcacagtgtacatggaactgagcagcctgcggagcgaggataccgccgtgtattattgcgccagaacctggcggggcaacagcttcgattattggggccagggaaccaccgtgaccgtgtcatctacgcgtgaggacctgaagaacgtgttcccacctgaggtggccgtgttcgagcctagcgaggccgagatcagccacacccagaaagccaccctcgtgtgcctggctaccggcttctaccccgaccatgtggaactgtcttggtgggtcaacggcaaagaggtgcacagcggcgtgtgtaccgacccccagccactgaaagaacagcccgccctgaacgacagccggtactgcctgagcagcagactgagagtgtccgccaccttctggcagaacccccggaaccacttcagatgccaggtgcagttctacggcctgagcgagaacgacgagtggacccaggacagagccaagcccgtgacccagatcgtgtctgccgaagcctggggcagagccgattgcggctttaccagcgagagctaccagcagggcgtgctgagcgccaccatcctgtacgagatcctgctgggcaaggccaccctgtacgccgtgctggtgtctgccctggtgctgatggctatggtcaagcggaaggacagccggggataa

SEQ ID NO: 5049 - DNA, 1887 bp, synthetic construct
  source 1..1887: mol_type = other DNA
atggccttaccagtgaccgccttgctcctgccgctggccttgctgctccacgccgccaggccggacatcgtgatgacacagagccctgatagcctggccgtgtctctgggagagagagccaccatcaactgcaagagcagccagagcctgctgaacagcggcaaccagaagaactacctggcctggtatcagcagaagcccggccagcctcctaagctgctgatctactggggcagcaccagatccacaggcgtgcccgatagattttctggctctggcagcggcaccgacttcaccctgacaatttctagcctgcaagccgaggacgtggccgtgtactactgccagaacgactacacataccccttcaccttcggccagggcaccaagctggaaatcaaactcgagatccagaaccctgatcctgccgtgtaccagctgcgggatagcaagagcagcgacaagagcgtgtgtctgttcaccgacttcgacagccagaccaacgtgtcccagagcaaggactccgacgtgtacatcaccgataagtgcgtgctggacatgcggagcatggacttcaagagcaactccgccgtggcctggtccaacaagtccgatttcgcctgcgccaacgccttcaacaacagcattatccccgaggacacattcttcccaagcagcgacgtgccctgcgacgtgaagctggtggaaaagagcttcgagacagacaccaacctgaacttccagaacctgagcgtgatcggcttcagaatcctgctgctgaaagtggccggctttaacctgctgatgaccctgcggctgtggtccagccgcgccaagagaagcggatctggcgtgaagcagaccctgaatttcgacctgctgaagctggctggcgacgtggaatccaacccaggccctactagtatggactggatttggcgcatccttttccttgtcggcgctgctaccggcgcgcattccttcgaacaagttcagctggttcagagcggagccgaagtgaagaaacctggggcctctgtgaaggtgtcctgcaaggcttccggctataccttcaccagcttttggctgaactgggtccgacaggcccctggacaaggactggaatggatgggcaacatctaccccagcaccagctacaccgtgtacaaccagaaattcaaggaccgcgtgaccatgaccagggacaccagcacaagcacagtgtacatggaactgagcagcctgcggagcgaggataccgccgtgtattattgcgccagaacctggcggggcaacagcttcgattattggggccagggaaccaccgtgaccgtgtcatctacgcgtgaggacctgaagaacgtgttcccacctgaggtggccgtgttcgagcctagcaaggccgagatcgcccacacccagaaagccaccctcgtgtgcctggctaccggcttctaccccgaccatgtggaactgtcttggtgggtcaacggcaaagaggtgcacagcggcgtgtgtaccgacccccagccactgaaagaacagcccgccctgaacgacagccggtactgcctgagcagcagactgagagtgtccgccaccttctggcagaacccccggaaccacttcagatgccaggtgcagttctacggcctgagcgagaacgacgagtggacccaggacagagccaagcccgtgacccagatcgtgtctgccgaagcctggggcagagccgattgcggcatcaccagcgccagctaccaccagggcgtgctgagcgccaccatcctgtacgagatcctgctgggcaaggccaccctgtacgccgtgctggtgtctgccctggtgctgatggctatggtcaagcggaaggacagccggggataa

SEQ ID NO: 5050 - DNA, 1893 bp, synthetic construct
  source 1..1893: mol_type = other DNA
atggccttaccagtgaccgccttgctcctgccgctggccttgctgctccacgccgccaggccggacatcgtgatgacacagagccctgatagcctggccgtgtctctgggagagagagccaccatcaactgcaagagcagccagagcctgctgaacagcggcaaccagaagaactacctggcctggtatcagcagaagcccggccagcctcctaagctgctgatctactggggcagcaccagatccacaggcgtgcccgatagattttctggctctggcagcggcaccgacttcaccctgacaatttctagcctgcaagccgaggacgtggccgtgtactactgccagaacgactacacataccccttcaccttcggccagggcaccaagctggaaatcaaactcgagatccagaaccctgatcctgccgtgtaccagctgcgggatagcaagagcagcgacaagagcgtgtgtctgttcaccgacttcgacagccagaccaacgtgtcccagagcaaggactccgacgtgtacatcaccgataagtgcgtgctggacatgcggagcatggacttcaagagcaactccgccgtggcctggtccaacaagtccgatttcgcctgcgccaacgccttcaacaacagcattatccccgaggacacattcttcccaagccccgagagcagctgcgacgtgaagctggtggaaaagagcttcgagacagacaccaacctgaacttccagaacctgagcgtgatcggcttcagaatcctgctgctgaaagtggccggctttaacctgctgatgaccctgcggctgtggtccagctctagtcgcgccaagagaagcggatctggcgtgaagcagaccctgaatttcgacctgctgaagctggctggcgacgtggaatccaacccaggccctactagtatggactggatttggcgcatccttttccttgtcggcgctgctaccggcgcgcattccttcgaacaagttcagctggttcagagcggagccgaagtgaagaaacctggggcctctgtgaaggtgtcctgcaaggcttccggctataccttcaccagcttttggctgaactgggtccgacaggcccctggacaaggactggaatggatgggcaacatctaccccagcaccagctacaccgtgtacaaccagaaattcaaggaccgcgtgaccatgaccagggacaccagcacaagcacagtgtacatggaactgagcagcctgcggagcgaggataccgccgtgtattattgcgccagaacctggcggggcaacagcttcgattattggggccagggaaccaccgtgaccgtgtcatctacgcgtgaggacctgaagaacgtgttcccacctgaggtggccgtgttcgagcctagcgaggccgagatcagccacacccagaaagccaccctcgtgtgcctggctaccggcttctaccccgaccatgtggaactgtcttggtgggtcaacggcaaagaggtgcacagcggcgtgtgtaccgacccccagccactgaaagaacagcccgccctgaacgacagccggtactgcctgagcagcagactgagagtgtccgccaccttctggcagaacccccggaaccacttcagatgccaggtgcagttctacggcctgagcgagaacgacgagtggacccaggacagagccaagcccgtgacccagatcgtgtctgccgaagcctggggcagagccgattgcggctttaccagcgagagctaccagcagggcgtgctgagcgccaccatcctgtacgagatcctgctgggcaaggccaccctgtacgccgtgctggtgtctgccctggtgctgatggctatggtcaagcggaaggacagccggggataa

SEQ ID NO: 5051 - DNA, 1893 bp, synthetic construct
  source 1..1893: mol_type = other DNA
atggccttaccagtgaccgccttgctcctgccgctggccttgctgctccacgccgccaggccggacatcgtgatgacacagagccctgatagcctggccgtgtctctgggagagagagccaccatcaactgcaagagcagccagagcctgctgaacagcggcaaccagaagaactacctggcctggtatcagcagaagcccggccagcctcctaagctgctgatctactggggcagcaccagatccacaggcgtgcccgatagattttctggctctggcagcggcaccgacttcaccctgacaatttctagcctgcaagccgaggacgtggccgtgtactactgccagaacgactacacataccccttcaccttcggccagggcaccaagctggaaatcaaactcgagatccagaaccctgatcctgccgtgtaccagctgcgggatagcaagagcagcgacaagagcgtgtgtctgttcaccgacttcgacagccagaccaacgtgtcccagagcaaggactccgacgtgtacatcaccgataagtgcgtgctggacatgcggagcatggacttcaagagcaactccgccgtggcctggtccaacaagtccgatttcgcctgcgccaacgccttcaacaacagcattatccccgaggacacattcttcccaagccccgagagcagctgcgacgtgaagctggtggaaaagagcttcgagacagacaccaacctgaacttccagaacctgagcgtgatcggcttcagaatcctgctgctgaaagtggccggctttaacctgctgatgaccctgcggctgtggtccagctctagtcgcgccaagagaagcggatctggcgtgaagcagaccctgaatttcgacctgctgaagctggctggcgacgtggaatccaacccaggccctactagtatggactggatttggcgcatccttttccttgtcggcgctgctaccggcgcgcattccttcgaacaagttcagctggttcagagcggagccgaagtgaagaaacctggggcctctgtgaaggtgtcctgcaaggcttccggctataccttcaccagcttttggctgaactgggtccgacaggcccctggacaaggactggaatggatgggcaacatctaccccagcgacagctacaccgtgtacaaccagaaattcaaggaccgcgtgaccatgaccagggacaccagcacaagcacagtgtacatggaactgagcagcctgcggagcgaggataccgccgtgtattattgcgccagaacctggcggggcaacagcttcgattattggggccagggaaccaccgtgaccgtgtcatctacgcgtgaggacctgaagaacgtgttcccacctgaggtggccgtgttcgagcctagcgaggccgagatcagccacacccagaaagccaccctcgtgtgcctggctaccggcttctaccccgaccatgtggaactgtcttggtgggtcaacggcaaagaggtgcacagcggcgtgtgtaccgacccccagccactgaaagaacagcccgccctgaacgacagccggtactgcctgagcagcagactgagagtgtccgccaccttctggcagaacccccggaaccacttcagatgccaggtgcagttctacggcctgagcgagaacgacgagtggacccaggacagagccaagcccgtgacccagatcgtgtctgccgaagcctggggcagagccgattgcggctttaccagcgagagctaccagcagggcgtgctgagcgccaccatcctgtacgagatcctgctgggcaaggccaccctgtacgccgtgctggtgtctgccctggtgctgatggctatggtcaagcggaaggacagccggggataa

SEQ ID NO: 5052 - DNA, 1893 bp, synthetic construct
  source 1..1893: mol_type = other DNA
atggccttaccagtgaccgccttgctcctgccgctggccttgctgctccacgccgccaggccggacatcgtgatgacacagagccctgatagcctggccgtgtctctgggagagagagccaccatcaactgcaagagcagccagagcctgctgaacagcggcaacaacaagaactacgtgacatggtatcagcagaagcccggccagcctcctaagctgctgatctactggggcagcaccagatccacaggcgtgcccgatagattttctggctctggcagcggcaccgacttcaccctgacaatttctagcctgcaagccgaggacgtggccgtgtactactgccagaacgactacacataccccttcaccttcggccagggcaccaagctggaaatcaaactcgagatccagaaccctgatcctgccgtgtaccagctgcgggatagcaagagcagcgacaagagcgtgtgtctgttcaccgacttcgacagccagaccaacgtgtcccagagcaaggactccgacgtgtacatcaccgataagtgcgtgctggacatgcggagcatggacttcaagagcaactccgccgtggcctggtccaacaagtccgatttcgcctgcgccaacgccttcaacaacagcattatccccgaggacacattcttcccaagccccgagagcagctgcgacgtgaagctggtggaaaagagcttcgagacagacaccaacctgaacttccagaacctgagcgtgatcggcttcagaatcctgctgctgaaagtggccggctttaacctgctgatgaccctgcggctgtggtccagctctagtcgcgccaagagaagcggatctggcgtgaagcagaccctgaatttcgacctgctgaagctggctggcgacgtggaatccaacccaggccctactagtatggactggatttggcgcatccttttccttgtcggcgctgctaccggcgcgcattccttcgaacaagttcagctggttcagagcggagccgaagtgaagaaacctggggcctctgtgaaggtgtcctgcaaggcttccggctataccttcaccagcttttggctgaactgggtccgacaggcccctggacaaggactggaatggatgggcaacatctaccccagcgacagctacaccgtgtacaaccagaaattcaaggaccgcgtgaccatgaccagggacaccagcacaagcacagtgtacatggaactgagcagcctgcggagcgaggataccgccgtgtattattgcgccagaacctggcggggcaacagcttcgattattggggccagggaaccaccgtgaccgtgtcatctacgcgtgaggacctgaagaacgtgttcccacctgaggtggccgtgttcgagcctagcgaggccgagatcagccacacccagaaagccaccctcgtgtgcctggctaccggcttctaccccgaccatgtggaactgtcttggtgggtcaacggcaaagaggtgcacagcggcgtgtgtaccgacccccagccactgaaagaacagcccgccctgaacgacagccggtactgcctgagcagcagactgagagtgtccgccaccttctggcagaacccccggaaccacttcagatgccaggtgcagttctacggcctgagcgagaacgacgagtggacccaggacagagccaagcccgtgacccagatcgtgtctgccgaagcctggggcagagccgattgcggctttaccagcgagagctaccagcagggcgtgctgagcgccaccatcctgtacgagatcctgctgggcaaggccaccctgtacgccgtgctggtgtctgccctggtgctgatggctatggtcaagcggaaggacagccggggataa

SEQ ID NO: 5053 - DNA, 1971 bp, synthetic construct
  source 1..1971: mol_type = other DNA
atggccttaccagtgaccgccttgctcctgccgctggccttgctgctccacgccgccaggccggacatcgtgatgacacagagccctgatagcctggccgtgtctctgggagagagagccaccatcaactgcaagagcagccagagcctgctgaacagcggcaaccagaagaactacctggcctggtatcagcagaagcccggccagcctcctaagctgctgatctactggggcagcaccagatccacaggcgtgcccgatagattttctggctctggcagcggcaccgacttcaccctgacaatttctagcctgcaagccgaggacgtggccgtgtactactgccagaacgactacacataccccttcaccttcggccagggcaccaagctggaaatcaaactcgaggacctgaagaacgtgttcccacctgaggtggccgtgttcgagcctagcgaggccgagatcagccacacccagaaagccaccctcgtgtgcctggctaccggcttctaccccgaccatgtggaactgtcttggtgggtcaacggcaaagaggtgcacagcggcgtgtgtaccgacccccagccactgaaagaacagcccgccctgaacgacagccggtactgcctgagcagcagactgagagtgtccgccaccttctggcagaacccccggaaccacttcagatgccaggtgcagttctacggcctgagcgagaacgacgagtggacccaggacagagccaagcccgtgacccagatcgtgtctgccgaagcctggggcagagccgattgcggctttaccagcgagagctaccagcagggcgtgctgagcgccaccatcctgtacgagatcctgctgggcaaggccaccctgtacgccgtgctggtgtctgccctggtgctgatggctatggtcaagcggaaggacagccggggaagggccaagcgatctggatctggagcaacaaacttctcactactcaaacaagcaggtgacgtggaggagaatcccgggcctactagtgccaccatggactggatttggcgcatccttttccttgtcggcgctgctaccggcgcccattccgggcccgccagaagcgaggacagatacagaaaccccaaaggatccggcggcggaggatctggcggaggcggatctgggggcggaggctctttcgaacaagttcagctggttcagagcggagccgaagtgaagaaacctggggcctctgtgaaggtgtcctgcaaggcttccggctataccttcaccagcttttggctgaactgggtccgacaggcccctggacaaggactggaatggatgggcaacatctaccccagcgacagctacaccgtgtacaaccagaaattcaaggaccgcgtgaccatgaccagggacaccagcacaagcacagtgtacatggaactgagcagcctgcggagcgaggataccgccgtgtattattgcgccagaacctggcggggcaacagcttcgattattggggccagggaaccaccgtgaccgtgtcatctacgcgtatccagaaccctgatcctgccgtgtaccagctgcgggatagcaagagcagcgacaagagcgtgtgtctgttcaccgacttcgacagccagaccaacgtgtcccagagcaaggactccgacgtgtacatcaccgataagtgcgtgctggacatgcggagcatggacttcaagagcaactccgccgtggcctggtccaacaagtccgatttcgcctgcgccaacgccttcaacaacagcattatccccgaggacacattcttcccaagccccgagagcagctgcgacgtgaagctggtggaaaagagcttcgagacagacaccaacctgaacttccagaacctgagcgtgatcggcttcagaatcctgctgctgaaagtggccggctttaacctgctgatgaccctgcggctgtggtccagctaa

SEQ ID NO: 5054 - DNA, 1458 bp, synthetic construct; identical to SEQ ID NO: 5022
  source 1..1458: mol_type = other DNA

SEQ ID NO: 5055 - DNA, 1869 bp, synthetic construct
  source 1..1869: mol_type = other DNA
atggccttaccagtgaccgccttgctcctgccgctggccttgctgctccacgccgccaggccgcagatcgtgctgacacagagccccgccatcatgtctgttagccctggcgagaaagtgaccatgacctgtagcgccagcagcagcgtgaactacatgcactggttccagcagaagcccggcacaagccctaagctgtgggtgtacagcaccagcaatctggcctctggcgtgccagccagattttctggctctggcagcggcaccagctacagcctgacaatcagcagcatggaagccgaggatgccgccacctactattgtcagcagcggagcatctacccaccttggacatttggcggaggcaccaagctggaaatcaaactcgagatccagaaccctgatcctgccgtgtaccagctgcgggatagcaagagcagcgacaagagcgtgtgtctgttcaccgacttcgacagccagaccaacgtgtcccagagcaaggactccgacgtgtacatcaccgataagtgcgtgctggacatgcggagcatggacttcaagagcaactccgccgtggcctggtccaacaagtccgatttcgcctgcgccaacgccttcaacaacagcattatccccgaggacacattcttcccaagccccgagagcagctgcgacgtgaagctggtggaaaagagcttcgagacagacaccaacctgaacttccagaacctgagcgtgatcggcttcagaatcctgctgctgaaagtggccggctttaacctgctgatgaccctgcggctgtggtccagctctagtcgcgccaagagaagcggatctggcgtgaagcagaccctgaatttcgacctgctgaagctggctggcgacgtggaatccaacccaggccctactagtatggactggatttggcgcatccttttccttgtcggcgctgctaccggcgcgcattccttcgaagttcagctccagcagagcggccctgagcttgtgaaacctggcgcttccgtgaagatcagctgcaaggccagcggctacagcttcaccggctacaccatgaactgggtcaagcagtcccacggcaagaacctggaatggatcggcctgattaacccctacaacggcggcacctcctacaaccagaagttcaaggccaaggccacactgaccgtggacaagagcagcagcacagcctacatgcagctgaagtccctgaccagcgaggacagcgccgtgtactactgcgccagagattacggctacgtgctggactattggggccagggcacaagcgtgacagtgtctagtacgcgtgaggacctgaagaacgtgttcccacctgaggtggccgtgttcgagcctagcgaggccgagatcagccacacccagaaagccaccctcgtgtgcctggctaccggcttctaccccgaccatgtggaactgtcttggtgggtcaacggcaaagaggtgcacagcggcgtgtgtaccgacccccagccactgaaagaacagcccgccctgaacgacagccggtactgcctgagcagcagactgagagtgtccgccaccttctggcagaacccccggaaccacttcagatgccaggtgcagttctacggcctgagcgagaacgacgagtggacccaggacagagccaagcccgtgacccagatcgtgtctgccgaagcctggggcagagccgattgcggctttaccagcgagagctaccagcagggcgtgctgagcgccaccatcctgtacgagatcctgctgggcaaggccaccctgtacgccgtgctggtgtctgccctggtgctgatggctatggtcaagcggaaggacagccggggataa

SEQ ID NO: 5056 - DNA, 1905 bp, synthetic construct; identical to SEQ ID NO: 5044
  source 1..1905: mol_type = other DNA

SEQ ID NO: 5057 - DNA, 1527 bp, synthetic construct
  source 1..1527: mol_type = other DNA
atggccttaccagtgaccgccttgctcctgccgctggccttgctgctccacgccgccaggccgcaggttcagctccagcagtctggacctggcctggtcaagcctagccagacactgtctctgacctgtgccatcagcggcgatagcgtgtcctctaatagagccgcctggaactggatcagacagagccctagcagaggactccagtggctgggcagaacctactaccgcagcaagtggtacaacgactacgccgtgtctctgcggagccggatcaccatcaatcccgtgaccagcaagaaccaggtggccctgcacatgaacagcgtgacccctgaagataccgccgtgtactactgtgccagagccggaattgtggtggtgcccggacctgagacattctactactacgaccacggcctggacgtgtggggccagggaacaacagtgactgtctcttctctcgagggaggctctgccagaagcgaggacagatacagaaaccccaaaggcggaagcttcgaagacatccagatgacacagagcccctctagcctgtctgccagcgtgggagacagagtgaccatcacctgtagagccagccagagcatcagaaactacctgaactggtatcagcaaaagcccggcaaggcccctgagctgctgattcatgctgcaagcagcctccagagcggcgtgccaagcagattttctggcagcggcagcggaaccgacttcaccctgacaatatctagcctccagcctgaggacttcgccagctactactgccagcagagctacagcgcccctcctatcacctttggacagggcaccagactggaaatcaagacgcgtaccacgacgccagcgccgcgaccaccaacaccggcgcccaccatcgcgtcgcagcccctgtccctgcgcccagaggcgtgccggccagcggcggggggcgcagtgcacacgagggggctggacttcgcctgtgacatctacatctgggcgcccttggccgggacttgtggggtccttctcctgtcactggttatcaccctttactgcaaacggggcagaaagaaactcctgtatatattcaaacaaccatttatgagaccagtacaaactactcaagaggaagatggctgtagctgccgatttccagaagaagaagaaggaggatgtgaactgagagtgaagttcagcaggagcgcagacgcccccgcgtaccagcagggccagaaccagctctataacgagctgaatctaggacgaagagaggagtacgatgttttggacaagagacgtggccgggaccctgagatggggggaaagccgagaaggaagaaccctcaggaaggcctgtacaatgaactgcagaaagataagatggcggaggcctacagtgagattgggatgaaaggcgagcgccggaggggcaaggggcacgatggcctttaccagggtctcagtacagccaccaaggacacctacgacgcccttcacatgcaggccctgccccctcgctga

SEQ ID NO: 5058 - DNA, 11 bp, synthetic construct
  source 1..11: mol_type = other DNA
ggggggggggg

SEQ ID NO: 5059 - DNA, 1509 bp, synthetic construct
  source 1..1509: mol_type = other DNA
atggccttaccagtgaccgccttgctcctgccgctggccttgctgctccacgccgccaggccgcaggttcagctccagcagtctggacctggcctggtcaagcctagccagacactgtctctgacctgtgccatcagcggcgatagcgtgtcctctaatagagccgcctggaactggatcagacagagccctagcagaggactccagtggctgggcagaacctactaccgcagcaagtggtacaacgactacgccgtgtctctgcggagccggatcaccatcaatcccgtgaccagcaagaaccaggtggccctgcacatgaacagcgtgacccctgaagataccgccgtgtactactgtgccagagccggaattgtggtggtgcccggacctgagacattctactactacgaccacggcctggacgtgtggggccagggaacaacagtgactgtctcttctggaggcggtggatctggcggcggaggtagtggtggtggcggatctgacatccagatgacacagagcccctctagcctgtctgccagcgtgggagacagagtgaccatcacctgtagagccagccagagcatcagaaactacctgaactggtatcagcaaaagcccggcaaggcccctgagctgctgattcatgctgcaagcagcctccagagcggcgtgccaagcagattttctggcagcggcagcggaaccgacttcaccctgacaatatctagcctccagcctgaggacttcgccagctactactgccagcagagctacagcgcccctcctatcacctttggacagggcaccagactggaaatcaagacgcgtaccacgacgccagcgccgcgaccaccaacaccggcgcccaccatcgcgtcgcagcccctgtccctgcgcccagaggcgtgccggccagcggcggggggcgcagtgcacacgagggggctggacttcgcctgtgacatctacatctgggcgcccttggccgggacttgtggggtccttctcctgtcactggttatcaccctttactgcaaacggggcagaaagaaactcctgtatatattcaaacaaccatttatgagaccagtacaaactactcaagaggaagatggctgtagctgccgatttccagaagaagaagaaggaggatgtgaactgagagtgaagttcagcaggagcgcagacgcccccgcgtaccagcagggccagaaccagctctataacgagctgaatctaggacgaagagaggagtacgatgttttggacaagagacgtggccgggaccctgagatggggggaaagccgagaaggaagaaccctcaggaaggcctgtacaatgaactgcagaaagataagatggcggaggcctacagtgagattgggatgaaaggcgagcgccggaggggcaaggggcacgatggcctttaccagggtctcagtacagccaccaaggacacctacgacgcccttcacatgcaggccctgccccctcgctaa

SEQ ID NO: 5060 - DNA, 1869 bp, synthetic construct; identical to SEQ ID NO: 4744
  source 1..1869: mol_type = other DNA

SEQ ID NO: 5061 - DNA, 1872 bp, synthetic construct
  source 1..1872: mol_type = other DNA
atggccttaccagtgaccgccttgctcctgccgctggccttgctgctccacgccgccaggccggacgacatcgtgatgacacagagccctgatagcctggccgtgtctctgggagagagagccaccattaactgcaaggccagccagagcgtggactacgacggcgacagcttcctgaactggtatcagcagaagcccggccagcctcctaagctgctgatctacgccgccagcaatctggaaagcggcgtgccaagcagattttccggctctggcagcggcaccgatttcaccctgacaatatccagcctccagcctgaggacgtggccgtgtactactgccagcagagcaacgacgaccctctgacctttggacagggcaccaaggtggaaatcaaactcgaggacctgaagaacgtgttcccacctgaggtggccgtgttcgagcctagcgaggccgagatcagccacacccagaaagccaccctcgtgtgcctggctaccggcttctaccccgaccatgtggaactgtcttggtgggtcaacggcaaagaggtgcacagcggcgtgtgtaccgacccccagccactgaaagaacagcccgccctgaacgacagccggtactgcctgagcagcagactgagagtgtccgccaccttctggcagaacccccggaaccacttcagatgccaggtgcagttctacggcctgagcgagaacgacgagtggacccaggacagagccaagcccgtgacccagatcgtgtctgccgaagcctggggcagagccgattgcggctttaccagcgagagctaccagcagggcgtgctgagcgcctactacatgtacttgttgctgctgctgaagtccgtggtgtacttcgccatcatcacatgctgcctgctgcggagaaccgccttctgctgcaacggcgagaagtctagggccaagcgatctggatctggagcaacaaacttctcactactcaaacaagcaggtgacgtggaggagaatcccgggcctactagtatggactggatttggcgcatccttttccttgtcggcgctgctaccggcgcgcattccttcgaagaagtccaacttgtggagtctggagggggcctggtgcagcccggcggctctctcagactgtcttgtgcggcaagcggctacaccttcacctcttactggatagaatgggtgaggcaggcacctggaaagggactggagtggattggagagattctgccaggagggggagatacaaattacaatgaaatcttcaaggggcgggccaccttttcagcggataccagcaagaatacagcttacctgcagatgaatagcctccgggcagaagataccgctgtttattattgcacgagacgggtgccaataagactggactattgggggcaagggactcttgtcaccgtcagttcaacgcgtatccagaaccctgatcctgccgtgtaccagctgcgggatagcaagagcagcgacaagagcgtgtgtctgttcaccgacttcgacagccagaccaacgtgtcccagagcaaggactccgacgtgtacatcaccgataagtgcgtgctggacatgcggagcatggacttcaagagcaactccgccgtggcctggtccaacaagtccgatttcgcctgcgccaacgccttcaacaacagcattatccccgaggacacattcttcccaagccccgagagcagctgcgacgtgaagctggtggaaaagagcttcgagacagacaccaacctgaacttccagaacctgagcgtgatcggcttcagaatcctgctgctgaaagtggccggctttaacctgctgatgaccctgcggctgtggtccagctaa

SEQ ID NO: 5062 - DNA, 2220 bp, synthetic construct; identical to SEQ ID NO: 4896
  source 1..2220: mol_type = other DNA

SEQ ID NO: 5063 - DNA, 2346 bp, synthetic construct; identical to SEQ ID NO: 4829
  source 1..2346: mol_type = other DNA

SEQ ID NO: 5064 - DNA, 2268 bp, synthetic construct; identical to SEQ ID NO: 4828
  source 1..2268: mol_type = other DNA

SEQ ID NO: 5065 - DNA, 1869 bp, synthetic construct; identical to SEQ ID NO: 4831
  source 1..1869: mol_type = other DNA

SEQ ID NO: 5066 - DNA, 1872 bp, synthetic construct
  source 1..1872: mol_type = other DNA
atggccttaccagtgaccgccttgctcctgccgctggccttgctgctccacgccgccaggccggacatccagttgacccagtcccccagctcactcagcgccagtgtgggggaccgggtgaccattacctgtaaagccagtcagagtgtggactatgacggggatagcttcctgaattggtatcagcagaagcctggcaaagccccaaagctgctgatctacgctgcatctaatctggagtcaggcgtgccttccaggttctccggtagtgggtctgggaccgatttcacattgaccatttcatccctccaacccgaggatttcgctacatattactgtcagcagtccaatgaggaccctctcacctttggccagggcaccaaagttgaaattaagagactcgaggacctgaagaacgtgttcccacctgaggtggccgtgttcgagcctagcgaggccgagatcagccacacccagaaagccaccctcgtgtgcctggctaccggcttctaccccgaccatgtggaactgtcttggtgggtcaacggcaaagaggtgcacagcggcgtgtgtaccgacccccagccactgaaagaacagcccgccctgaacgacagccggtactgcctgagcagcagactgagagtgtccgccaccttctggcagaacccccggaaccacttcagatgccaggtgcagttctacggcctgagcgagaacgacgagtggacccaggacagagccaagcccgtgacccagatcgtgtctgccgaagcctggggcagagccgattgcggctttaccagcgagagctaccagcagggcgtgctgagcgcctactacatgtacttgttgctgctgctgaagtccgtggtgtacttcgccatcatcacatgctgcctgctgcggagaaccgccttctgctgcaacggcgagaagtctagggccaagcgatctggatctggagcaacaaacttctcactactcaaacaagcaggtgacgtggaggagaatcccgggcctactagtatggactggatttggcgcatccttttccttgtcggcgctgctaccggcgcgcattccttcgaagaagtccaacttgtggagtctggagggggcctggtgcagcccggcggctctctcagactgtcttgtgcggcaagcggctacaccttcacctcttactggatagaatgggtgaggcaggcacctggaaagggactggagtggattggagagattctgccaggagggggagatacaaattacaatgaaatcttcaaggggcgggccaccttttcagcggataccagcaagaatacagcttacctgcagatgaatagcctccgggcagaagataccgctgtttattattgcacgagacgggtgccaataagactggactattgggggcaagggactcttgtcaccgtcagttcaacgcgtatccagaaccctgatcctgccgtgtaccagctgcgggatagcaagagcagcgacaagagcgtgtgtctgttcaccgacttcgacagccagaccaacgtgtcccagagcaaggactccgacgtgtacatcaccgataagtgcgtgctggacatgcggagcatggacttcaagagcaactccgccgtggcctggtccaacaagtccgatttcgcctgcgccaacgccttcaacaacagcattatccccgaggacacattcttcccaagccccgagagcagctgcgacgtgaagctggtggaaaagagcttcgagacagacaccaacctgaacttccagaacctgagcgtgatcggcttcagaatcctgctgctgaaagtggccggctttaacctgctgatgaccctgcggctgtggtccagctaa

SEQ ID NO: 5067 - DNA, 1857 bp, synthetic construct
  source 1..1857: mol_type = other DNA
atggccttaccagtgaccgccttgctcctgccgctggccttgctgctccacgccgccaggccggacatccagatgacacagagccctagcagcctgtctgccagcgtgggagacagagtgaccatcacatgcaagagcagccagagcctgctggactccgatggcaagacctacctgaactggtatcagcagaagcccggcaaggcccctaagctgctgatctacctggtgtccaagctggatagcggcgtgcccagcagattttctggcagcggcagcggaaccgacttcaccctgacaatatccagcctccagcctgaggacttcgccacctactactgcttccaaggcacccactttccattcaccttcggccagggcaccaaggtggaaatcaaaagactcgaggacctgaagaacgtgttcccacctgaggtggccgtgttcgagcctagcgaggccgagatcagccacacccagaaagccaccctcgtgtgcctggctaccggcttctaccccgaccatgtggaactgtcttggtgggtcaacggcaaagaggtgcacagcggcgtgtgtaccgacccccagccactgaaagaacagcccgccctgaacgacagccggtactgcctgagcagcagactgagagtgtccgccaccttctggcagaacccccggaaccacttcagatgccaggtgcagttctacggcctgagcgagaacgacgagtggacccaggacagagccaagcccgtgacccagatcgtgtctgccgaagcctggggcagagccgattgcggctttaccagcgagagctaccagcagggcgtgctgagcgccaccatcctgtacgagatcctgctgggcaaggccaccctgtacgccgtgctggtgtctgccctggtgctgatggctatggtcaagcggaaggacagccggggaagggccaagcgatctggatctggagcaacaaacttctcactactcaaacaagcaggtgacgtggaggagaatcccgggcctactagtatggactggatttggcgcatccttttccttgtcggcgctgctaccggcgcgcattccttcgaagtgcagctggttgaatcaggcggaggactggttcagcctggcggatctctgagactgtcttgtgccgccagcggctacaccttcaccagctactggatgaactgggtccgacaggcccctggcaaaggactggaatgggtcggaatgatcgaccccagcgacagcgagacacactacaaccacatcttcaaggaccgcttcaccatcagcgccgacaccagcaagaataccgcctacctccagatgaactccctgagagccgaggacaccgccgtgtactactgcgccagaaacctgtatctgttcggccagggaaccctggtcacagtgtcatctacgcgtatccagaaccctgatcctgccgtgtaccagctgcgggatagcaagagcagcgacaagagcgtgtgtctgttcaccgacttcgacagccagaccaacgtgtcccagagcaaggactccgacgtgtacatcaccgataagtgcgtgctggacatgcggagcatggacttcaagagcaactccgccgtggcctggtccaacaagtccgatttcgcctgcgccaacgccttcaacaacagcattatccccgaggacacattcttcccaagccccgagagcagctgcgacgtgaagctggtggaaaagagcttcgagacagacaccaacctgaacttccagaacctgagcgtgatcggcttcagaatcctgctgctgaaagtggccggctttaacctgctgatgaccctgcggctgtggtccagctaa

SEQ ID NO: 5068 - DNA, 1473 bp, synthetic construct; identical to SEQ ID NO: 4751
  source 1..1473: mol_type = other DNA

SEQ ID NO: 5069 - DNA, 1872 bp, synthetic construct; identical to SEQ ID NO: 4722
  source 1..1872: mol_type = other DNA

SEQ ID NO: 5070 - DNA, 2223 bp, synthetic construct; identical to SEQ ID NO: 4674
  source 1..2223: mol_type = other DNA

SEQ ID NO: 5071 - DNA, 2220 bp, synthetic construct
  source 1..2220: mol_type = other DNA
atggccttaccagtgaccgccttgctcctgccgctggccttgctgctccacgccgccaggccggacatccagttgacccagtcccccagctcactcagcgccagtgtgggggaccgggtgaccattacctgtaaagccagtcagagtgtggactatgacggggatagcttcctgaattggtatcagcagaagcctggcaaagccccaaagctgctgatctacgctgcatctaatctggagtcaggcgtgccttccaggttctccggtagtgggtctgggaccgatttcacattgaccatttcatccctccaacccgaggatttcgctacatattactgtcagcagtccaatgaggaccctctcacctttggccagggcaccaaagttgaaattaagagactcgaggacctgaagaacgtgttcccacctgaggtggccgtgttcgagcctagcgaggccgagatcagccacacccagaaagccaccctcgtgtgcctggctaccggcttctaccccgaccatgtggaactgtcttggtgggtcaacggcaaagaggtgcacagcggcgtgtctaccgacccccagccactgaaagaacagcccgccctgaacgacagccggtactgcctgagcagcagactgagagtgtccgccaccttctggcagaacccccggaaccacttcagatgccaggtgcagttctacggcctgagcgagaacgacgagtggacccaggacagagccaagcccgtgacccagatcgtgtctgccgaagcctggggcagagccgattgcggatcccagagcttcggcctgctggaccccaagctgtgctacctgctggatggcatcctgttcatctacggcgtgatcctgaccgccctgttcctgagagtgaagttcagcagaagcgccgacgcccctgcctaccagcagggacagaaccaactgtacaacgagctgaacctgggcagacgggaagagtacgacgtgctggacaagcggagaggcagggaccctgagatgggcggaaagccccggagaaagaacccccaggaaggactgtataacgaactccagaaagacaagatggccgaagcctacagcgagatcggcatgaagggcgagcggagaagaggcaagggccacgatggcctgtaccagggcctgagcaccgccaccaaggacacctatgacgccctgcacatgcaggccctgcctccaagaagggccaagcgatctggatctggagcaacaaacttctcactactcaaacaagcaggtgacgtggaggagaatcccgggcctactagtatggactggatttggcgcatccttttccttgtcggcgctgctaccggcgcgcattccttcgaagaagtccaacttgtggagtctggagggggcctggtgcagcccggcggctctctcagactgtcttgtgcggcaagcggctacaccttcacctcttactggatagaatgggtgaggcaggcacctggaaagggactggagtggattggagagattctgccaggagggggagatacaaattacaatgaaatcttcaaggggcgggccaccttttcagcggataccagcaagaatacagcttacctgcagatgaatagcctccgggcagaagataccgctgtttattattgcacgagacgggtgccaataagactggactattgggggcaagggactcttgtcaccgtcagttcaacgcgtatccagaaccctgatcctgccgtgtaccagctgcgggatagcaagagcagcgacaagagcgtgtgtctgttcaccgacttcgacagccagaccaacgtgtcccagagcaaggactccgacgtgtacatcaccgataagaccgtgctggacatgcggagcatggacttcaagagcaactccgccgtggcctggtccaacaagtccgatttcgcctgcgccaacgccttcaacaacagcattatccccgaggacacattcttcccaagccccgagagcagctgcggtaccatcactcaaggtttggcagtgtcaaccatctcatcattctttccacctggctaccaagtgtccttctgcctggtcatggtgctgctgttcgccgtggataccggcctgtacttcagcgtcaagaccaacatccggtccagcaccagagactggaaggaccacaagttcaagtggcggaaggaccctcaggacaagtaa

SEQ ID NO: 5072 - DNA, 684 bp, synthetic construct
  source 1..684: mol_type = other DNA
atgtaccggatgcagctgctgagctgtatcgccctgtctctggccctggtcacaaatagcgcccctaccagcagcagcaccaagaaaacccagctgcaactggaacacctcctgctggacctccagatgatcctgaacggcatcaacaactacaagaaccccaagctgacccggatgctgaccttcaagttctacatgcccaagaaggccaccgagctgaagcacctccagtgcctggaagaggaactgaagcccctggaagaagtgctgaatctggcccagagcaagaacttccacctgaggccaagggacctgatctccaacatcaacgtgatcgtgctggaactgaaaggcagcgagacaaccttcatgtgcgagtacgccgacgagacagctaccatcgtggaatttctgaatcggtggatcaccttctgccagagcatcatcagcaccctgacagcgcgtaaaattgaagttatgtatcctcctccttacctagacaatgagaagagcaatggaaccattatccatgtgaaagggaaacacctttgtccaagtcccctatttcccggaccttctaagcccttttgggtgctggtggtggttgggggagtcctggcttgctatagcttgctagtaacagtggcctttattattttctgggtgaggagtaagaggagctaa

SEQ ID NO: 5073 - DNA, 2988 bp, synthetic construct
  source 1..2988: mol_type = other DNA
atggccttaccagtgaccgccttgctcctgccgctggccttgctgctccacgccgccaggccggacatccagttgacccagtcccccagctcactcagcgccagtgtgggggaccgggtgaccattacctgtaaagccagtcagagtgtggactatgacggggatagcttcctgaattggtatcagcagaagcctggcaaagccccaaagctgctgatctacgctgcatctaatctggagtcaggcgtgccttccaggttctccggtagtgggtctgggaccgatttcacattgaccatttcatccctccaacccgaggatttcgctacatattactgtcagcagtccaatgaggaccctctcacctttggccagggcaccaaagttgaaattaagagactcgaggacctgaagaacgtgttcccacctgaggtggccgtgttcgagcctagcgaggccgagatcagccacacccagaaagccaccctcgtgtgcctggctaccggcttctaccccgaccatgtggaactgtcttggtgggtcaacggcaaagaggtgcacagcggcgtgtctaccgacccccagccactgaaagaacagcccgccctgaacgacagccggtactgcctgagcagcagactgagagtgtccgccaccttctggcagaacccccggaaccacttcagatgccaggtgcagttctacggcctgagcgagaacgacgagtggacccaggacagagccaagcccgtgacccagatcgtgtctgccgaagcctggggcagagccgattgcggatcccagagcttcggcctgctggaccccaagctgtgctacctgctggatggcatcctgttcatctacggcgtgatcctgaccgccctgttcctgagagtgaagttcagcagaagcgccgacgcccctgcctaccagcagggacagaaccaactgtacaacgagctgaacctgggcagacgggaagagtacgacgtgctggacaagcggagaggcagggaccctgagatgggcggaaagccccggagaaagaacccccaggaaggactgtataacgaactccagaaagacaagatggccgaagcctacagcgagatcggcatgaagggcgagcggagaagaggcaagggccacgatggcctgtaccagggcctgagcaccgccaccaaggacacctatgacgccctgcacatgcaggccctgcctccaagaagggccaagcgatctggatctggagcaacaaacttctcactactcaaacaagcaggtgacgtggaggagaatcccgggcctactagtatggactggatttggcgcatccttttccttgtcggcgctgctaccggcgcgcattccttcgaagaagtccaacttgtggagtctggagggggcctggtgcagcccggcggctctctcagactgtcttgtgcggcaagcggctacaccttcacctcttactggatagaatgggtgaggcaggcacctggaaagggactggagtggattggagagattctgccaggagggggagatacaaattacaatgaaatcttcaaggggcgggccaccttttcagcggataccagcaagaatacagcttacctgcagatgaatagcctccgggcagaagataccgctgtttattattgcacgagacgggtgccaataagactggactattgggggcaagggactcttgtcaccgtcagttcaacgcgtatccagaaccctgatcctgccgtgtaccagctgcgggatagcaagagcagcgacaagagcgtgtgtctgttcaccgacttcgacagccagaccaacgtgtcccagagcaaggactccgacgtgtacatcaccgataagaccgtgctggacatgcggagcatggacttcaagagcaactccgccgtggcctggtccaacaagtccgatttcgcctgcgccaacgccttcaacaacagcattatccccgaggacacattcttcccaagccccgagagcagctgcggtaccatcactcaaggtttggcagtgtcaaccatctcatcattctttccacctggctaccaagtgtccttctgcctggtcatggtgctgctgttcgccgtggataccggcctgtacttcagcgtcaagaccaacatccggtccagcaccagagactggaaggaccacaagttcaagtggcggaaggaccctcaggacaagagggccaagcgatctggatctggagcaacaaacttctcactactcaaacaagcaggtgacgtggaggagaatcccgggccttctagaatgtaccggatgcagctgctgagctgtatcgccctgtctctggccctggtcacaaatagcgcccctaccagcagcagcaccaagaaaacccagctgcaactggaacacctcctgctggacctccagatgatcctgaacggcatcaacaactacaagaaccccaagctgacccggatgctgaccttcaagttctacatgcccaagaaggccaccgagctgaagcacctccagtgcctggaagaggaactgaagcccctggaagaagtgctgaatctggcccagagcaagaacttccacctgaggccaagggacctgatctccaacatcaacgtgatcgtgctggaactgaaaggcagcgagacaaccttcatgtgcgagtacgccgacgagacagctaccatcgtggaatttctgaatcggtggatcaccttctgccagagcatcatcagcaccctgacagcgcgtaaaattgaagttatgtatcctcctccttacctagacaatgagaagagcaatggaaccattatccatgtgaaagggaaacacctttgtccaagtcccctatttcccggaccttctaagcccttttgggtgctggtggtggttgggggagtcctggcttgctatagcttgctagtaacagtggcctttattattttctgggtgaggagtaagaggagctaa

SEQ ID NO: 5074 - DNA, 22 bp, synthetic construct
  source 1..22: mol_type = other DNA
gggggggggggggggggggggg

SEQ ID NO: 5075 - DNA, 1863 bp, synthetic construct
  source 1..1863: mol_type = other DNA
atggccttaccagtgaccgccttgctcctgccgctggccttgctgctccacgccgccaggccggacatccagatgacacagagccctagcagcctgtctgccagcgtgggagacagagtgaccatcacatgcaaggccagcgaccacatcaacaactggctggcctggtatcagcagaagcctggacaggcccctaagctgctgatctacggcgctaccacactggaaacaggcgtgcccagcagattttctggcagcggctctggcaccgactacaccctgacaatatccagcctccagcctgaggacttcgccacctactactgtcagcagagctggaacaccccttggacattcggccagggcaccaagctggaaatcaagagaggcggaggcggaagtggaggcggaggatctggcggcggaggctctcaagttcagcttcaacagcctggcgctgagctggtcaaacctggcgcttctgtgaagatgagctgcaaagccagcggctacgccttcaacagctactggatcaactggatgaagcagaaacccggccagggactcgaatggatcggccaaatctatcccggcgacggcgacaccaactacaacggcaagttcaagggcagagccacactgaccgccgatacctctagcagcacagcctacatgcagctgagcagcctgaccagcgaagatagcgccgtgtacttctgtgcccggtccatcacaacagtcgtgggctgcgctatggactattggggccagggaacaagcgtgaccgtgtctagtacgcgtgcaagaagtgaagatcgctacaggaaccctaaggggtcagcctgcaaaggcggcggaggaagcgaacttcctacacagggcaccttcagcaacgtgtccaccaatgtgtccccagccaagcctaccaccaccgcctgcgcacgcagcgaggacaggtataggaaccccaaaggaagtgcgtgcaagctcgagggaggcagctggagccaccctcagtttgaaaaagactacaaagacgatgacgataagggatcagattacaaggatgatgatgacaaggggtcagattataaagacgacgatgataaagggagcgactacaaggacgacgatgacaaggcctggtcccatccccagttcgagaaacaccatcaccaccaccatcatcacactagtggctccggcgagggcagaggaagtctactaacctgcggagatgtggaagaaaatcctggcccacatatgaccgagtacaagcccacggtgcgcctcgccacccgcgacgacgtccccagggccgtacgcaccctcgccgccgcgttcgccgactaccccgccacgcgccacaccgtcgatccggaccgccacatcgagcgggtcaccgagctgcaagaactcttcctcacgcgcgtcgggctcgacatcggcaaggtgtgggtcgcggacgacggcgccgcggtggcggtctggaccacgccggagagcgtcgaagcgggggcggtgttcgccgagatcggcccgcgcatggccgagttgagcggttcccggctggccgcgcagcaacagatggaaggcctcctggcgccgcaccggcccaaggagcccgcgtggttcctggccaccgtcggcgtctcgcccgaccaccagggcaagggtctgggcagcgccgtcgtgctccccggagtggaggcggccgagcgcgccggggtgcccgccttcctggagacctccgcgccccgcaacctccccttctacgagcggctcggcttcaccgtcaccgccgacgtcgaggtgcccgaaggaccgcgcacctggtgcatgacccgcaagcccggtgcctga

SEQ ID NO: 5076 - DNA, 1506 bp, synthetic construct
  source 1..1506: mol_type = other DNA
atggccttaccagtgaccgccttgctcctgccgctggccttgctgctccacgccgccaggccgcaggtgcagctggttgaatctggcggaggactggttcagcctggcggatctctgagactgtcttgtgccgccagcggcaacatcaacagcagaaactgcatgggctggttcagacaggcccctggcaagggaagagaaggcgtggcagctatcggccaagtgaccggcagaacctactacgtggacagcgtgaagggcagattcaccatcagcctggacaacagcaagaacaccctgtacctccagatgaacagcctgagagccgaggacaccgccgtgtactattgtgctgctgcccctggctgtctgctgtctgcacttagaagcgccgactacagaaactggggccagggcacactggtcaccgtttcttctacgcgtgcaagaagtgaagatcgctacaggaaccctaaggggtcagcctgcaaaggcggcggaggaagcgaacttcctacacagggcaccttcagcaacgtgtccaccaatgtgtccccagccaagcctaccaccaccgcctgcgcacgcagcgaggacaggtataggaaccccaaaggaagtgcgtgcaagctcgagggaggcagctggagccaccctcagtttgaaaaagactacaaagacgatgacgataagggatcagattacaaggatgatgatgacaaggggtcagattataaagacgacgatgataaagggagcgactacaaggacgacgatgacaaggcctggtcccatccccagttcgagaaacaccatcaccaccaccatcatcacactagtggctccggcgagggcagaggaagtctactaacctgcggagatgtggaagaaaatcctggcccacatatgaccgagtacaagcccacggtgcgcctcgccacccgcgacgacgtccccagggccgtacgcaccctcgccgccgcgttcgccgactaccccgccacgcgccacaccgtcgatccggaccgccacatcgagcgggtcaccgagctgcaagaactcttcctcacgcgcgtcgggctcgacatcggcaaggtgtgggtcgcggacgacggcgccgcggtggcggtctggaccacgccggagagcgtcgaagcgggggcggtgttcgccgagatcggcccgcgcatggccgagttgagcggttcccggctggccgcgcagcaacagatggaaggcctcctggcgccgcaccggcccaaggagcccgcgtggttcctggccaccgtcggcgtctcgcccgaccaccagggcaagggtctgggcagcgccgtcgtgctccccggagtggaggcggccgagcgcgccggggtgcccgccttcctggagacctccgcgccccgcaacctccccttctacgagcggctcggcttcaccgtcaccgccgacgtcgaggtgcccgaaggaccgcgcacctggtgcatgacccgcaagcccggtgcctga

SEQ ID NO: 5077 - DNA, 1512 bp, synthetic construct
  source 1..1512: mol_type = other DNA
atggccttaccagtgaccgccttgctcctgccgctggccttgctgctccacgccgccaggccggaggtgcagctggttgaatctggcggaggatctgttcaggctggcggctctctgagactgtcttgtgccgccagcggctacacctacagcatcaactgcatgggctggttcagacaggcccctggcaaagagagagaaggcgttgccgccatctctaccggcggaggcagaaccgattaccgggattctgtgaagggcagattcaccatcagccaggacaacgccaagaacaccgtgtacctccagatgaacagcctgaagcctgaggacaccgccatgtactactgtgccggcaagaccacctatcctggctacggatgtggcctgggcagaagcgcctacaattattggggccagggcacccaagtgaccgtgtcatctacgcgtgcaagaagtgaagatcgctacaggaaccctaaggggtcagcctgcaaaggcggcggaggaagcgaacttcctacacagggcaccttcagcaacgtgtccaccaatgtgtccccagccaagcctaccaccaccgcctgcgcacgcagcgaggacaggtataggaaccccaaaggaagtgcgtgcaagctcgagggaggcagctggagccaccctcagtttgaaaaagactacaaagacgatgacgataagggatcagattacaaggatgatgatgacaaggggtcagattataaagacgacgatgataaagggagcgactacaaggacgacgatgacaaggcctggtcccatccccagttcgagaaacaccatcaccaccaccatcatcacactagtggctccggcgagggcagaggaagtctactaacctgcggagatgtggaagaaaatcctggcccacatatgaccgagtacaagcccacggtgcgcctcgccacccgcgacgacgtccccagggccgtacgcaccctcgccgccgcgttcgccgactaccccgccacgcgccacaccgtcgatccggaccgccacatcgagcgggtcaccgagctgcaagaactcttcctcacgcgcgtcgggctcgacatcggcaaggtgtgggtcgcggacgacggcgccgcggtggcggtctggaccacgccggagagcgtcgaagcgggggcggtgttcgccgagatcggcccgcgcatggccgagttgagcggttcccggctggccgcgcagcaacagatggaaggcctcctggcgccgcaccggcccaaggagcccgcgtggttcctggccaccgtcggcgtctcgcccgaccaccagggcaagggtctgggcagcgccgtcgtgctccccggagtggaggcggccgagcgcgccggggtgcccgccttcctggagacctccgcgccccgcaacctccccttctacgagcggctcggcttcaccgtcaccgccgacgtcgaggtgcccgaaggaccgcgcacctggtgcatgacccgcaagcccggtgcctga

SEQ ID NO: 5078 - DNA, 1515 bp, synthetic construct
  source 1..1515: mol_type = other DNA
atggccctgcctgtgacagctctgctgctgcctctggcactgctgctgcacgccgccagacctcaagttcagctggtggaaagcggtggtggcgttgtgcaacctggtggaagtctgaggctgagctgtgccgcttctggcctgagctttagcacctacactgtggcctggttcaggcaggctcccggaaagggtcttgaaggcgtggccgccattccttacaccagccagcacatggtgtacacagacagcgtcagaggccggttcaccatcagcagagacaactccaagaatacgctctatctccagatgaactctctgcgcgccgaagatacagccgtgtattactgcgccaccgacagacggcctggcacctctatgctggcaatcaacggctacaacagatggggacagggaaccaccgtgaccgtgtcatctggtaccgaaacgcgtgcaagaagtgaagatcgctacaggaaccctaaggggtcagcctgcaaaggcggcggaggaagcgaacttcctacacagggcaccttcagcaacgtgtccaccaatgtgtccccagccaagcctaccaccaccgcctgcgcacgcagcgaggacaggtataggaaccccaaaggaagtgcgtgcaagctcgagggaggcagctggagccaccctcagtttgaaaaagactacaaagacgatgacgataagggatcagattacaaggatgatgatgacaaggggtcagattataaagacgacgatgataaagggagcgactacaaggacgacgatgacaaggcctggtcccatccccagttcgagaaacaccatcaccaccaccatcatcacactagtggctccggcgagggcagaggaagtctactaacctgcggagatgtggaagaaaatcctggcccacatatgaccgagtacaagcccacggtgcgcctcgccacccgcgacgacgtccccagggccgtacgcaccctcgccgccgcgttcgccgactaccccgccacgcgccacaccgtcgatccggaccgccacatcgagcgggtcaccgagctgcaagaactcttcctcacgcgcgtcgggctcgacatcggcaaggtgtgggtcgcggacgacggcgccgcggtggcggtctggaccacgccggagagcgtcgaagcgggggcggtgttcgccgagatcggcccgcgcatggccgagttgagcggttcccggctggccgcgcagcaacagatggaaggcctcctggcgccgcaccggcccaaggagcccgcgtggttcctggccaccgtcggcgtctcgcccgaccaccagggcaagggtctgggcagcgccgtcgtgctccccggagtggaggcggccgagcgcgccggggtgcccgccttcctggagacctccgcgccccgcaacctccccttctacgagcggctcggcttcaccgtcaccgccgacgtcgaggtgcccgaaggaccgcgcacctggtgcatgacccgcaagcccggtgcctga

SEQ ID NO: 5079 - DNA, 1488 bp, synthetic construct
  source 1..1488: mol_type = other DNA
atggccttaccagtgaccgccttgctcctgccgctggccttgctgctccacgccgccaggccgttcgaagtgcaactggttgaatccggtggcggcctggtgcaagcaggcggatctctcagacttagctgtgccgcctccggcagaaccttcacaatgggatggtttaggcaggctccagggaaagagagagagttcgtcgccgccatctctctgtctcccacactggcctactacgccgagtctgtgaaaggccggttcaccatctccagagataatgccaagaacaccgtggtgctgcaaatgaactctctgaaacccgaggatacagccctgtactattgtgccgctgaccggaagtccgtgatgagcatcagacccgattactggggacagggcacacaagtcacagtgtcctctacgcgtgcaagaagtgaagatcgctacaggaaccctaaggggtcagcctgcaaaggcggcggaggaagcgaacttcctacacagggcaccttcagcaacgtgtccaccaatgtgtccccagccaagcctaccaccaccgcctgcgcacgcagcgaggacaggtataggaaccccaaaggaagtgcgtgcaagctcgagggaggcagctggagccaccctcagtttgaaaaagactacaaagacgatgacgataagggatcagattacaaggatgatgatgacaaggggtcagattataaagacgacgatgataaagggagcgactacaaggacgacgatgacaaggcctggtcccatccccagttcgagaaacaccatcaccaccaccatcatcacactagtggctccggcgagggcagaggaagtctactaacctgcggagatgtggaagaaaatcctggcccacatatgaccgagtacaagcccacggtgcgcctcgccacccgcgacgacgtccccagggccgtacgcaccctcgccgccgcgttcgccgactaccccgccacgcgccacaccgtcgatccggaccgccacatcgagcgggtcaccgagctgcaagaactcttcctcacgcgcgtcgggctcgacatcggcaaggtgtgggtcgcggacgacggcgccgcggtggcggtctggaccacgccggagagcgtcgaagcgggggcggtgttcgccgagatcggcccgcgcatggccgagttgagcggttcccggctggccgcgcagcaacagatggaaggcctcctggcgccgcaccggcccaaggagcccgcgtggttcctggccaccgtcggcgtctcgcccgaccaccagggcaagggtctgggcagcgccgtcgtgctccccggagtggaggcggccgagcgcgccggggtgcccgccttcctggagacctccgcgccccgcaacctccccttctacgagcggctcggcttcaccgtcaccgccgacgtcgaggtgcccgaaggaccgcgcacctggtgcatgacccgcaagcccggtgcctga

SEQ ID NO: 5080 - DNA, 1899 bp, synthetic construct
  source 1..1899: mol_type = other DNA
atggccttaccagtgaccgccttgctcctgccgctggccttgctgctccacgccgccaggccgcaggttcagctccagcagtctggacctggcctggtcaagcctagccagacactgtctctgacctgtgccatcagcggcgatagcgtgtcctctaatagagccgcctggaactggatcagacagagccctagcagaggactccagtggctgggcagaacctactaccgcagcaagtggtacaacgactacgccgtgtctctgcggagccggatcaccatcaatcccgtgaccagcaagaaccaggtggccctgcacatgaacagcgtgacccctgaagataccgccgtgtactactgtgccagagccggaattgtggtggtgcccggacctgagacattctactactacgaccacggcctggacgtgtggggccagggaacaacagtgactgtctcttctggaggcggtggatctggcggcggaggtagtggtggtggcggatctgacatccagatgacacagagcccctctagcctgtctgccagcgtgggagacagagtgaccatcacctgtagagccagccagagcatcagaaactacctgaactggtatcagcaaaagcccggcaaggcccctgagctgctgattcatgctgcaagcagcctccagagcggcgtgccaagcagattttctggcagcggcagcggaaccgacttcaccctgacaatatctagcctccagcctgaggacttcgccagctactactgccagcagagctacagcgcccctcctatcacctttggacagggcaccagactggaaatcaagacgcgtgcaagaagtgaagatcgctacaggaaccctaaggggtcagcctgcaaaggcggcggaggaagcgaacttcctacacagggcaccttcagcaacgtgtccaccaatgtgtccccagccaagcctaccaccaccgcctgcgcacgcagcgaggacaggtataggaaccccaaaggaagtgcgtgcaagctcgagggaggcagctggagccaccctcagtttgaaaaagactacaaagacgatgacgataagggatcagattacaaggatgatgatgacaaggggtcagattataaagacgacgatgataaagggagcgactacaaggacgacgatgacaaggcctggtcccatccccagttcgagaaacaccatcaccaccaccatcatcacactagtggctccggcgagggcagaggaagtctactaacctgcggagatgtggaagaaaatcctggcccacatatgaccgagtacaagcccacggtgcgcctcgccacccgcgacgacgtccccagggccgtacgcaccctcgccgccgcgttcgccgactaccccgccacgcgccacaccgtcgatccggaccgccacatcgagcgggtcaccgagctgcaagaactcttcctcacgcgcgtcgggctcgacatcggcaaggtgtgggtcgcggacgacggcgccgcggtggcggtctggaccacgccggagagcgtcgaagcgggggcggtgttcgccgagatcggcccgcgcatggccgagttgagcggttcccggctggccgcgcagcaacagatggaaggcctcctggcgccgcaccggcccaaggagcccgcgtggttcctggccaccgtcggcgtctcgcccgaccaccagggcaagggtctgggcagcgccgtcgtgctccccggagtggaggcggccgagcgcgccggggtgcccgccttcctggagacctccgcgccccgcaacctccccttctacgagcggctcggcttcaccgtcaccgccgacgtcgaggtgcccgaaggaccgcgcacctggtgcatgacccgcaagcccggtgcctga

SEQ ID NO: 5081 - DNA, 1875 bp, synthetic construct
  source 1..1875: mol_type = other DNA
atggccttaccagtgaccgccttgctcctgccgctggccttgctgctccacgccgccaggccggacatccagatgacccagagccccagcagcctgtctgccagcgtgggcgacagagtgaccatcacctgtcggagcagccagagcatcgtgcactccgtgggcaacaccttcctggaatggtatcagcagaagcccggcaaggcccccaagctgctgatctacaaggtgtccaacagattcagcggcgtgcccagcaggtttagcggctctggcagcggcaccgacttcaccctgaccatctctagcctccagcccgaggacttcgccacctactactgttttcaaggcagccagttcccctacaccttcggccagggaacaaaggtggaaatcaagcggggcggaggcggaagtggaggcggaggatctggcggcggaggctctgaagtgcaactggtggaaagcggaggcggcctggtgcagcctggcggatctctgagactgagctgtgccgccagcggctacgagttcagccggtcctggatgaactgggtgcgccaggcccctggcaagggactggaatgggtgggaagaatctaccccggcgacggcgacaccaactacagcggcaagttcaagggccggttcaccatcagcgccgacaccagcaagaacaccgcctacctccagatgaacagcctgcgggccgaggataccgccgtgtactactgtgccagagatggcagctcctgggactggtacttcgacgtgtggggacagggaacccttgtgaccgtgtccagcacgcgtgcaagaagtgaagatcgctacaggaaccctaaggggtcagcctgcaaaggcggcggaggaagcgaacttcctacacagggcaccttcagcaacgtgtccaccaatgtgtccccagccaagcctaccaccaccgcctgcgcacgcagcgaggacaggtataggaaccccaaaggaagtgcgtgcaagctcgagggaggcagctggagccaccctcagtttgaaaaagactacaaagacgatgacgataagggatcagattacaaggatgatgatgacaaggggtcagattataaagacgacgatgataaagggagcgactacaaggacgacgatgacaaggcctggtcccatccccagttcgagaaacaccatcaccaccaccatcatcacactagtggctccggcgagggcagaggaagtctactaacctgcggagatgtggaagaaaatcctggcccacatatgaccgagtacaagcccacggtgcgcctcgccacccgcgacgacgtccccagggccgtacgcaccctcgccgccgcgttcgccgactaccccgccacgcgccacaccgtcgatccggaccgccacatcgagcgggtcaccgagctgcaagaactcttcctcacgcgcgtcgggctcgacatcggcaaggtgtgggtcgcggacgacggcgccgcggtggcggtctggaccacgccggagagcgtcgaagcgggggcggtgttcgccgagatcggcccgcgcatggccgagttgagcggttcccggctggccgcgcagcaacagatggaaggcctcctggcgccgcaccggcccaaggagcccgcgtggttcctggccaccgtcggcgtctcgcccgaccaccagggcaagggtctgggcagcgccgtcgtgctccccggagtggaggcggccgagcgcgccggggtgcccgccttcctggagacctccgcgccccgcaacctccccttctacgagcggctcggcttcaccgtcaccgccgacgtcgaggtgcccgaaggaccgcgcacctggtgcatgacccgcaagcccggtgcctga

SEQ ID NO: 5082 - DNA, 1488 bp, synthetic construct
  source 1..1488: mol_type = other DNA
atggccttaccagtgaccgccttgctcctgccgctggccttgctgctccacgccgccaggccgttcgaagtgcagctggttgaatctggcggaggactggttcaggctggcggatctctgagactgtcttgtgccgccagcggcagaacctttagcatgggctggtttagacaggcccctggcaaagagagagagttcgtcgccgccatcacatactctggcggcagcccttactacgccgactctgtgaagggcagattcaccatcagccgggacaacgccaagaacaccgtgtacctccagatgaacagcctgaagcctgaggacaccgccgtgtactactgcgccgccaatccaacatacggcagcgactggaacgccgagaattggggccagggaacccaagtgacagtgtctagcacgcgtgcaagaagtgaagatcgctacaggaaccctaaggggtcagcctgcaaaggcggcggaggaagcgaacttcctacacagggcaccttcagcaacgtgtccaccaatgtgtccccagccaagcctaccaccaccgcctgcgcacgcagcgaggacaggtataggaaccccaaaggaagtgcgtgcaagctcgagggaggcagctggagccaccctcagtttgaaaaagactacaaagacgatgacgataagggatcagattacaaggatgatgatgacaaggggtcagattataaagacgacgatgataaagggagcgactacaaggacgacgatgacaaggcctggtcccatccccagttcgagaaacaccatcaccaccaccatcatcacactagtggctccggcgagggcagaggaagtctactaacctgcggagatgtggaagaaaatcctggcccacatatgaccgagtacaagcccacggtgcgcctcgccacccgcgacgacgtccccagggccgtacgcaccctcgccgccgcgttcgccgactaccccgccacgcgccacaccgtcgatccggaccgccacatcgagcgggtcaccgagctgcaagaactcttcctcacgcgcgtcgggctcgacatcggcaaggtgtgggtcgcggacgacggcgccgcggtggcggtctggaccacgccggagagcgtcgaagcgggggcggtgttcgccgagatcggcccgcgcatggccgagttgagcggttcccggctggccgcgcagcaacagatggaaggcctcctggcgccgcaccggcccaaggagcccgcgtggttcctggccaccgtcggcgtctcgcccgaccaccagggcaagggtctgggcagcgccgtcgtgctccccggagtggaggcggccgagcgcgccggggtgcccgccttcctggagacctccgcgccccgcaacctccccttctacgagcggctcggcttcaccgtcaccgccgacgtcgaggtgcccgaaggaccgcgcacctggtgcatgacccgcaagcccggtgcctga

SEQ ID NO: 5083 - DNA, 1863 bp, synthetic construct
  source 1..1863: mol_type = other DNA
atggccttaccagtgaccgccttgctcctgccgctggccttgctgctccacgccgccaggccggacatcgtgctgacacagagccctgcttctctggccgtgtctctgggacagagagccaccatcagctgtagagccagcgagagcgtggacaactacggcaacaccttcatgcactggtatcagcagaagcccggccagcctcctaagctgctgatctacagagccagcaacctggaaagcggcatccccgccagattttctggcagcggcagcagaaccgacttcaccctgaccatcaatcccgtggaagccgacgacgtggcaacctactactgccagcagagcaacgaggaccctcctacatttggagccggcaccaagctggaactgaaaggcggaggcggaagtggaggcggaggatctggcggcggaggctctcagattcagctggtgcagtctggccccgagctgaagaaacctggcgagacagtgaagatcagctgcaaggccagcggctacatcttcaccaattacggcatgaactgggtcaagcaggcccctggcaagagcttcaagtggatgggctggatcaacacctacaccggcgagagcacatacagcgccgacttcaagggcagattcgccttcagcctggaaaccagcgccagcacagcctacctgcacatcaacgacctgaagaacgaggacaccgccacctacttttgcgccagaagcggcggctacgaccctatggattattggggccagggcaccagcgtgaccgtttcttctacgcgtgcaagaagtgaagatcgctacaggaaccctaaggggtcagcctgcaaaggcggcggaggaagcgaacttcctacacagggcaccttcagcaacgtgtccaccaatgtgtccccagccaagcctaccaccaccgcctgcgcacgcagcgaggacaggtataggaaccccaaaggaagtgcgtgcaagctcgagggaggcagctggagccaccctcagtttgaaaaagactacaaagacgatgacgataagggatcagattacaaggatgatgatgacaaggggtcagattataaagacgacgatgataaagggagcgactacaaggacgacgatgacaaggcctggtcccatccccagttcgagaaacaccatcaccaccaccatcatcacactagtggctccggcgagggcagaggaagtctactaacctgcggagatgtggaagaaaatcctggcccacatatgaccgagtacaagcccacggtgcgcctcgccacccgcgacgacgtccccagggccgtacgcaccctcgccgccgcgttcgccgactaccccgccacgcgccacaccgtcgatccggaccgccacatcgagcgggtcaccgagctgcaagaactcttcctcacgcgcgtcgggctcgacatcggcaaggtgtgggtcgcggacgacggcgccgcggtggcggtctggaccacgccggagagcgtcgaagcgggggcggtgttcgccgagatcggcccgcgcatggccgagttgagcggttcccggctggccgcgcagcaacagatggaaggcctcctggcgccgcaccggcccaaggagcccgcgtggttcctggccaccgtcggcgtctcgcccgaccaccagggcaagggtctgggcagcgccgtcgtgctccccggagtggaggcggccgagcgcgccggggtgcccgccttcctggagacctccgcgccccgcaacctccccttctacgagcggctcggcttcaccgtcaccgccgacgtcgaggtgcccgaaggaccgcgcacctggtgcatgacccgcaagcccggtgcctga

SEQ ID NO: 5084 - DNA, 993 bp, synthetic construct
  source 1..993: mol_type = other DNA
atggccttaccagtgaccgccttgctcctgccgctggccttgctgctccacgccgccaggccggacatccagatgacacagagccctagcagcctgtctgccagcgtgggagacagagtgaccatcacatgcaaggccagcgaccacatcaacaactggctggcctggtatcagcagaagcctggacaggcccctaagctgctgatctacggcgctaccacactggaaacaggcgtgcccagcagattttctggcagcggctctggcaccgactacaccctgacaatatccagcctccagcctgaggacttcgccacctactactgtcagcagagctggaacaccccttggacattcggccagggcaccaagctggaaatcaagagaggcggaggcggaagtggaggcggaggatctggcggcggaggctctcaagttcagcttcaacagcctggcgctgagctggtcaaacctggcgcttctgtgaagatgagctgcaaagccagcggctacgccttcaacagctactggatcaactggatgaagcagaaacccggccagggactcgaatggatcggccaaatctatcccggcgacggcgacaccaactacaacggcaagttcaagggcagagccacactgaccgccgatacctctagcagcacagcctacatgcagctgagcagcctgaccagcgaagatagcgccgtgtacttctgtgcccggtccatcacaacagtcgtgggctgcgctatggactattggggccagggaacaagcgtgaccgtgtctagtacgcgtgcaagaagtgaagatcgctacaggaaccctaagggcggcggaggaagcgaacttcctacacagggcaccttcagcaacgtgtccaccaatgtgtccccagccaagcctaccaccaccgcctgcgcacgcagcgaggacaggtataggaaccccaaagctcgagggaggcagctggagccaccctcagtttga

SEQ ID NO: 5085 - DNA, 636 bp, synthetic construct
  source 1..636: mol_type = other DNA
atggccttaccagtgaccgccttgctcctgccgctggccttgctgctccacgccgccaggccgcaggtgcagctggttgaatctggcggaggactggttcagcctggcggatctctgagactgtcttgtgccgccagcggcaacatcaacagcagaaactgcatgggctggttcagacaggcccctggcaagggaagagaaggcgtggcagctatcggccaagtgaccggcagaacctactacgtggacagcgtgaagggcagattcaccatcagcctggacaacagcaagaacaccctgtacctccagatgaacagcctgagagccgaggacaccgccgtgtactattgtgctgctgcccctggctgtctgctgtctgcacttagaagcgccgactacagaaactggggccagggcacactggtcaccgtttcttctacgcgtgcaagaagtgaagatcgctacaggaaccctaagggcggcggaggaagcgaacttcctacacagggcaccttcagcaacgtgtccaccaatgtgtccccagccaagcctaccaccaccgcctgcgcacgcagcgaggacaggtataggaaccccaaagctcgagggaggcagctggagccaccctcagtttga

SEQ ID NO: 5086 - DNA, 642 bp, synthetic construct; identical to SEQ ID NO: 4897
  source 1..642: mol_type = other DNA

SEQ ID NO: 5087 - DNA, 645 bp, synthetic construct
  source 1..645: mol_type = other DNA
atggccctgcctgtgacagctctgctgctgcctctggcactgctgctgcacgccgccagacctcaagttcagctggtggaaagcggtggtggcgttgtgcaacctggtggaagtctgaggctgagctgtgccgcttctggcctgagctttagcacctacactgtggcctggttcaggcaggctcccggaaagggtcttgaaggcgtggccgccattccttacaccagccagcacatggtgtacacagacagcgtcagaggccggttcaccatcagcagagacaactccaagaatacgctctatctccagatgaactctctgcgcgccgaagatacagccgtgtattactgcgccaccgacagacggcctggcacctctatgctggctatcaacggctacaacagatggggacagggaaccaccgtgaccgtgtcatctggtaccgaaacgcgtgcaagaagtgaagatcgctacaggaaccctaagggcggcggaggaagcgaacttcctacacagggcaccttcagcaacgtgtccaccaatgtgtccccagccaagcctaccaccaccgcctgcgcacgcagcgaggacaggtataggaaccccaaagctcgagggaggcagctggagccaccctcagtttga

SEQ ID NO: 5088 - DNA, 618 bp, synthetic construct
  source 1..618: mol_type = other DNA
atggccttaccagtgaccgccttgctcctgccgctggccttgctgctccacgccgccaggccgttcgaagtgcaactggttgaatccggtggcggcctggtgcaagcaggcggatctctcagacttagctgtgccgcctccggcagaaccttcacaatgggatggtttaggcaggctccagggaaagagagagagttcgtcgccgccatctctctgtctcccacactggcctactacgccgagtctgtgaaaggccggttcaccatctccagagataatgccaagaacaccgtggtgctgcaaatgaactctctgaaacccgaggatacagccctgtactattgtgccgctgaccggaagtccgtgatgagcatcagacccgattactggggacagggcacacaagtcacagtgtcctctacgcgtgcaagaagtgaagatcgctacaggaaccctaagggcggcggaggaagcgaacttcctacacagggcaccttcagcaacgtgtccaccaatgtgtccccagccaagcctaccaccaccgcctgcgcacgcagcgaggacaggtataggaaccccaaagctcgagggaggcagctggagccaccctcagtttga

SEQ ID NO: 5089 - DNA, 1029 bp, synthetic construct
  source 1..1029: mol_type = other DNA
atggccttaccagtgaccgccttgctcctgccgctggccttgctgctccacgccgccaggccgcaggttcagctccagcagtctggacctggcctggtcaagcctagccagacactgtctctgacctgtgccatcagcggcgatagcgtgtcctctaatagagccgcctggaactggatcagacagagccctagcagaggactccagtggctgggcagaacctactaccgcagcaagtggtacaacgactacgccgtgtctctgcggagccggatcaccatcaatcccgtgaccagcaagaaccaggtggccctgcacatgaacagcgtgacccctgaagataccgccgtgtactactgtgccagagccggaattgtggtggtgcccggacctgagacattctactactacgaccacggcctggacgtgtggggccagggaacaacagtgactgtctcttctggaggcggtggatctggcggcggaggtagtggtggtggcggatctgacatccagatgacacagagcccctctagcctgtctgccagcgtgggagacagagtgaccatcacctgtagagccagccagagcatcagaaactacctgaactggtatcagcaaaagcccggcaaggcccctgagctgctgattcatgctgcaagcagcctccagagcggcgtgccaagcagattttctggcagcggcagcggaaccgacttcaccctgacaatatctagcctccagcctgaggacttcgccagctactactgccagcagagctacagcgcccctcctatcacctttggacagggcaccagactggaaatcaagacgcgtgcaagaagtgaagatcgctacaggaaccctaagggcggcggaggaagcgaacttcctacacagggcaccttcagcaacgtgtccaccaatgtgtccccagccaagcctaccaccaccgcctgcgcacgcagcgaggacaggtataggaaccccaaagctcgagggaggcagctggagccaccctcagtttga

SEQ ID NO: 5090 - DNA, 996 bp, synthetic construct
  source 1..996: mol_type = other DNA
atggccttaccagtgaccgccttgctcctgccgctggccttgctgctccacgccgccaggccggacatccagatgacacagagccctagcagcctgtctgccagcgtgggagacagagtgaccatcacctgtagagccagccaggacgtgaacacagccgtggcttggtatcagcagaagcctggcaaggcccctaagctgctgatctacagcgcctacttcctgtacagcggcgtgcccagcagattcagcggaagcagaagcggcaccgacttcaccctgacaatatccagcctccagcctgaggacttcgccacctactactgccagcagtacagcagatacagccccgtgacctttggacagggcaccaaggtggaaatcaagagatctggcggaggcggctctggaggaggcggaagtggcggcggaggcgaagttcagctggttgaaagtggtggcggcctggttcaacctggcggatctctgagactgagctgtgccgccagcggcttcaatgtgtacgcctctggaatgcactgggtccgacaggcccctggcaaaggacttgagtgggtcgccaaaatctaccccgacagcgactacacctattacgccgacagcgtgaagggcagattcaccatcagcgccgacaccagcaagaacaccgcctacctccagatgaactccctgagagccgaggacaccgccgtgtactactgtagcagagacagcagcttctactacgtgtacgctatggactactggggccagggcacactggtcacagtctcttctacgcgtgcaagaagtgaagatcgctacaggaaccctaagggcggcggaggaagcgaacttcctacacagggcaccttcagcaacgtgtccaccaatgtgtccccagccaagcctaccaccaccgcctgcgcacgcagcgaggacaggtataggaaccccaaagctcgagggaggcagctggagccaccctcagtttga

SEQ ID NO: 5091 - DNA, 618 bp, synthetic construct
  source 1..618: mol_type = other DNA
atggccttaccagtgaccgccttgctcctgccgctggccttgctgctccacgccgccaggccgttcgaagtgcagctggttgaatctggcggaggactggttcaggctggcggatctctgagactgtcttgtgccgccagcggcagaacctttagcatgggctggtttagacaggcccctggcaaagagagagagttcgtcgccgccatcacatactctggcggcagcccttactacgccgactctgtgaagggcagattcaccatcagccgggacaacgccaagaacaccgtgtacctccagatgaacagcctgaagcctgaggacaccgccgtgtactactgcgccgccaatccaacatacggcagcgactggaacgccgagaattggggccagggaacccaagtgacagtgtctagcacgcgtgcaagaagtgaagatcgctacaggaaccctaagggcggcggaggaagcgaacttcctacacagggcaccttcagcaacgtgtccaccaatgtgtccccagccaagcctaccaccaccgcctgcgcacgcagcgaggacaggtataggaaccccaaagctcgagggaggcagctggagccaccctcagtttga

SEQ ID NO: 5092 - DNA, 1863 bp, synthetic construct
  source 1..1863: mol_type = other DNA
atggccttaccagtgaccgccttgctcctgccgctggccttgctgctccacgccgccaggccggacatccagatgacccagagccctagctcactgagcgccagcgtgggcgacagggtgaccattacctgctccgccagccaggacatcagcaactacctgaactggtaccagcagaagcccggcaaggcccccaagctgctgatctactacacctccaacctgcactccggcgtgcccagcaggttcagcggaagcggcagcggcaccgatttcaccctgaccatctccagcctgcagcccgaggacttcgccacctactactgccagcagtacaggaagctcccctggactttcggccagggcaccaaactggagatcaagcgtggcggaggcggaagtggaggcggaggatctggcggcggaggctctcaggtgcagctggtccagagcggcgccgaagtgaagaagcccggcagctccgtgaaagtgagctgcaaggccagcggcggcaccttcagcaactactggatgcactgggtgaggcaggcccccggacagggcctggagtggatgggcgccacctacaggggccacagcgacacctactacaaccagaagttcaagggccgggtgaccatcaccgccgacaagagcaccagcaccgcctacatggaactgagcagcctcaggagcgaggacaccgctgtgtattactgcgccaggggcgccatctacgacggctacgacgtgctggacaactggggccagggcacactggtgaccgtgtccagcacgcgtgcaagaagtgaagatcgctacaggaaccctaaggggtcagcctgcaaaggcggcggaggaagcgaacttcctacacagggcaccttcagcaacgtgtccaccaatgtgtccccagccaagcctaccaccaccgcctgcgcacgcagcgaggacaggtataggaaccccaaaggaagtgcgtgcaagctcgagggaggcagctggagccaccctcagtttgaaaaagactacaaagacgatgacgataagggatcagattacaaggatgatgatgacaaggggtcagattataaagacgacgatgataaagggagcgactacaaggacgacgatgacaaggcctggtcccatccccagttcgagaaacaccatcaccaccaccatcatcacactagtggctccggcgagggcagaggaagtctactaacctgcggagatgtggaagaaaatcctggcccacatatgaccgagtacaagcccacggtgcgcctcgccacccgcgacgacgtccccagggccgtacgcaccctcgccgccgcgttcgccgactaccccgccacgcgccacaccgtcgatccggaccgccacatcgagcgggtcaccgagctgcaagaactcttcctcacgcgcgtcgggctcgacatcggcaaggtgtgggtcgcggacgacggcgccgcggtggcggtctggaccacgccggagagcgtcgaagcgggggcggtgttcgccgagatcggcccgcgcatggccgagttgagcggttcccggctggccgcgcagcaacagatggaaggcctcctggcgccgcaccggcccaaggagcccgcgtggttcctggccaccgtcggcgtctcgcccgaccaccagggcaagggtctgggcagcgccgtcgtgatccccggagtggaggcggccgagcgcgccggggtgcccgccttcctggagacctccgcgccccgcaacctccccttctacgagcggctcggcttcaccgtcaccgccgacgtcgaggtgcccgaaggaccgcgcacctggtgcatgacccgcaagcccggtgcctga

SEQ ID NO: 5093 - DNA, 1710 bp, synthetic construct
  source 1..1710: mol_type = other DNA
atggccttaccagtgaccgccttgctcctgccgctggccttgctgctccacgccgccaggccggacatccagatgacacagagccctagcagcctgtctgccagcgtgggagacagagtgaccatcacatgcaaggccagcgaccacatcaacaactggctggcctggtatcagcagaagcctggacaggcccctaagctgctgatctacggcgctaccacactggaaacaggcgtgcccagcagattttctggcagcggctctggcaccgactacaccctgacaatatccagcctccagcctgaggacttcgccacctactactgtcagcagagctggaacaccccttggacattcggccagggcaccaagctggaaatcaagagaggcggaggcggaagtggaggcggaggatctggcggcggaggctctcaagttcagcttcaacagcctggcgctgagctggtcaaacctggcgcttctgtgaagatgagctgcaaagccagcggctacgccttcaacagctactggatcaactggatgaagcagaaacccggccagggactcgaatggatcggccaaatctatcccggcgacggcgacaccaactacaacggcaagttcaagggcagagccacactgaccgccgatacctctagcagcacagcctacatgcagctgagcagcctgaccagcgaagatagcgccgtgtacttctgtgcccggtccatcacaacagtcgtgggctgcgctatggactattggggccagggaacaagcgtgaccgtgtctagtacgcgtgcaagaagtgaagatcgctacaggaaccctaagctcgagggaggcagctggagccaccctcagtttgaaaaagactacaaagacgatgacgataagggatcagattacaaggatgatgatgacaaggggtcagattataaagacgacgatgataaagggagcgactacaaggacgacgatgacaaggcctggtcccatccccagttcgagaaacaccatcaccaccaccatcatcacactagtggctccggcgagggcagaggaagtctactaacctgcggagatgtggaagaaaatcctggcccacatatgaccgagtacaagcccacggtgcgcctcgccacccgcgacgacgtccccagggccgtacgcaccctcgccgccgcgttcgccgactaccccgccacgcgccacaccgtcgatccggaccgccacatcgagcgggtcaccgagctgcaagaactcttcctcacgcgcgtcgggctcgacatcggcaaggtgtgggtcgcggacgacggcgccgcggtggcggtctggaccacgccggagagcgtcgaagcgggggcggtgttcgccgagatcggcccgcgcatggccgagttgagcggttcccggctggccgcgcagcaacagatggaaggcctcctggcgccgcaccggcccaaggagcccgcgtggttcctggccaccgtcggcgtctcgcccgaccaccagggcaagggtctgggcagcgccgtcgtgctccccggagtggaggcggccgagcgcgccggggtgcccgccttcctggagacctccgcgccccgcaacctccccttctacgagcggctcggcttcaccgtcaccgccgacgtcgaggtgcccgaaggaccgcgcacctggtgcatgacccgcaagcccggtgcctga

SEQ ID NO: 5094 - DNA, 1707 bp, synthetic construct
  source 1..1707: mol_type = other DNA
atggccttaccagtgaccgccttgctcctgccgctggccttgctgctccacgccgccaggccggacatccagatgacacagagccctagcagcctgtctgccagcgtgggagacagagtgaccatcacatgcaaggccagcgaccacatcaacaactggctggcctggtatcagcagaagcctggacaggcccctaagctgctgatctacggcgctaccacactggaaacaggcgtgcccagcagattttctggcagcggctctggcaccgactacaccctgacaatatccagcctccagcctgaggacttcgccacctactactgtcagcagagctggaacaccccttggacattcggccagggcaccaagctggaaatcaagagaggcggaggcggaagtggaggcggaggatctggcggcggaggctctcaagttcagcttcaacagcctggcgctgagctggtcaaacctggcgcttctgtgaagatgagctgcaaagccagcggctacgccttcaacagctactggatcaactggatgaagcagaaacccggccagggactcgaatggatcggccaaatctatcccggcgacggcgacaccaactacaacggcaagttcaagggcagagccacactgaccgccgatacctctagcagcacagcctacatgcagctgagcagcctgaccagcgaagatagcgccgtgtacttctgtgcccggtccatcacaacagtcgtgggctgcgctatggactattggggccagggaacaagcgtgaccgtgtctagtacgcgtgcaagaagtgaagatcgctacaggaaccctctcgagggaggcagctggagccaccctcagtttgaaaaagactacaaagacgatgacgataagggatcagattacaaggatgatgatgacaaggggtcagattataaagacgacgatgataaagggagcgactacaaggacgacgatgacaaggcctggtcccatccccagttcgagaaacaccatcaccaccaccatcatcacactagtggctccggcgagggcagaggaagtctactaacctgcggagatgtggaagaaaatcctggcccacatatgaccgagtacaagcccacggtgcgcctcgccacccgcgacgacgtccccagggccgtacgcaccctcgccgccgcgttcgccgactaccccgccacgcgccacaccgtcgatccggaccgccacatcgagcgggtcaccgagctgcaagaactcttcctcacgcgcgtcgggctcgacatcggcaaggtgtgggtcgcggacgacggcgccgcggtggcggtctggaccacgccggagagcgtcgaagcgggggcggtgttcgccgagatcggcccgcgcatggccgagttgagcggttcccggctggccgcgcagcaacagatggaaggcctcctggcgccgcaccggcccaaggagcccgcgtggttcctggccaccgtcggcgtctcgcccgaccaccagggcaagggtctgggcagcgccgtcgtgctccccggagtggaggcggccgagcgcgccggggtgcccgccttcctggagacctccgcgccccgcaacctccccttctacgagcggctcggcttcaccgtcaccgccgacgtcgaggtgcccgaaggaccgcgcacctggtgcatgacccgcaagcccggtgcctga

SEQ ID NO: 5095 - DNA, 1704 bp, synthetic construct
  source 1..1704: mol_type = other DNA
atggccttaccagtgaccgccttgctcctgccgctggccttgctgctccacgccgccaggccggacatccagatgacacagagccctagcagcctgtctgccagcgtgggagacagagtgaccatcacatgcaaggccagcgaccacatcaacaactggctggcctggtatcagcagaagcctggacaggcccctaagctgctgatctacggcgctaccacactggaaacaggcgtgcccagcagattttctggcagcggctctggcaccgactacaccctgacaatatccagcctccagcctgaggacttcgccacctactactgtcagcagagctggaacaccccttggacattcggccagggcaccaagctggaaatcaagagaggcggaggcggaagtggaggcggaggatctggcggcggaggctctcaagttcagcttcaacagcctggcgctgagctggtcaaacctggcgcttctgtgaagatgagctgcaaagccagcggctacgccttcaacagctactggatcaactggatgaagcagaaacccggccagggactcgaatggatcggccaaatctatcccggcgacggcgacaccaactacaacggcaagttcaagggcagagccacactgaccgccgatacctctagcagcacagcctacatgcagctgagcagcctgaccagcgaagatagcgccgtgtacttctgtgcccggtccatcacaacagtcgtgggctgcgctatggactattggggccagggaacaagcgtgaccgtgtctagtacgcgtgcaagaagtgaagatcgctacaggaacctcgagggaggcagctggagccaccctcagtttgaaaaagactacaaagacgatgacgataagggatcagattacaaggatgatgatgacaaggggtcagattataaagacgacgatgataaagggagcgactacaaggacgacgatgacaaggcctggtcccatccccagttcgagaaacaccatcaccaccaccatcatcacactagtggctccggcgagggcagaggaagtctactaacctgcggagatgtggaagaaaatcctggcccacatatgaccgagtacaagcccacggtgcgcctcgccacccgcgacgacgtccccagggccgtacgcaccctcgccgccgcgttcgccgactaccccgccacgcgccacaccgtcgatccggaccgccacatcgagcgggtcaccgagctgcaagaactcttcctcacgcgcgtcgggctcgacatcggcaaggtgtgggtcgcggacgacggcgccgcggtggcggtctggaccacgccggagagcgtcgaagcgggggcggtgttcgccgagatcggcccgcgcatggccgagttgagcggttcccggctggccgcgcagcaacagatggaaggcctcctggcgccgcaccggcccaaggagcccgcgtggttcctggccaccgtcggcgtctcgcccgaccaccagggcaagggtctgggcagcgccgtcgtgctccccggagtggaggcggccgagcgcgccggggtgcccgccttcctggagacctccgcgccccgcaacctccccttctacgagcggctcggcttcaccgtcaccgccgacgtcgaggtgcccgaaggaccgcgcacctggtgcatgacccgcaagcccggtgcctga

SEQ ID NO: 5096 - DNA, 1710 bp, synthetic construct
  source 1..1710: mol_type = other DNA
atggccttaccagtgaccgccttgctcctgccgctggccttgctgctccacgccgccaggccggacatccagatgacacagagccctagcagcctgtctgccagcgtgggagacagagtgaccatcacatgcaaggccagcgaccacatcaacaactggctggcctggtatcagcagaagcctggacaggcccctaagctgctgatctacggcgctaccacactggaaacaggcgtgcccagcagattttctggcagcggctctggcaccgactacaccctgacaatatccagcctccagcctgaggacttcgccacctactactgtcagcagagctggaacaccccttggacattcggccagggcaccaagctggaaatcaagagaggcggaggcggaagtggaggcggaggatctggcggcggaggctctcaagttcagcttcaacagcctggcgctgagctggtcaaacctggcgcttctgtgaagatgagctgcaaagccagcggctacgccttcaacagctactggatcaactggatgaagcagaaacccggccagggactcgaatggatcggccaaatctatcccggcgacggcgacaccaactacaacggcaagttcaagggcagagccacactgaccgccgatacctctagcagcacagcctacatgcagctgagcagcctgaccagcgaagatagcgccgtgtacttctgtgcccggtccatcacaacagtcgtgggctgcgctatggactattggggccagggaacaagcgtgaccgtgtctagtacgcgtgcaagaagtgaagatcgctacaggaaccctacgctcgagggaggcagctggagccaccctcagtttgaaaaagactacaaagacgatgacgataagggatcagattacaaggatgatgatgacaaggggtcagattataaagacgacgatgataaagggagcgactacaaggacgacgatgacaaggcctggtcccatccccagttcgagaaacaccatcaccaccaccatcatcacactagtggctccggcgagggcagaggaagtctactaacctgcggagatgtggaagaaaatcctggcccacatatgaccgagtacaagcccacggtgcgcctcgccacccgcgacgacgtccccagggccgtacgcaccctcgccgccgcgttcgccgactaccccgccacgcgccacaccgtcgatccggaccgccacatcgagcgggtcaccgagctgcaagaactcttcctcacgcgcgtcgggctcgacatcggcaaggtgtgggtcgcggacgacggcgccgcggtggcggtctggaccacgccggagagcgtcgaagcgggggcggtgttcgccgagatcggcccgcgcatggccgagttgagcggttcccggctggccgcgcagcaacagatggaaggcctcctggcgccgcaccggcccaaggagcccgcgtggttcctggccaccgtcggcgtctcgcccgaccaccagggcaagggtctgggcagcgccgtcgtgctccccggagtggaggcggccgagcgcgccggggtgcccgccttcctggagacctccgcgccccgcaacctccccttctacgagcggctcggcttcaccgtcaccgccgacgtcgaggtgcccgaaggaccgcgcacctggtgcatgacccgcaagcccggtgcctga

SEQ ID NO: 5097 - DNA, 1710 bp, synthetic construct
  source 1..1710: mol_type = other DNA
atggccttaccagtgaccgccttgctcctgccgctggccttgctgctccacgccgccaggccggacatccagatgacacagagccctagcagcctgtctgccagcgtgggagacagagtgaccatcacatgcaaggccagcgaccacatcaacaactggctggcctggtatcagcagaagcctggacaggcccctaagctgctgatctacggcgctaccacactggaaacaggcgtgcccagcagattttctggcagcggctctggcaccgactacaccctgacaatatccagcctccagcctgaggacttcgccacctactactgtcagcagagctggaacaccccttggacattcggccagggcaccaagctggaaatcaagagaggcggaggcggaagtggaggcggaggatctggcggcggaggctctcaagttcagcttcaacagcctggcgctgagctggtcaaacctggcgcttctgtgaagatgagctgcaaagccagcggctacgccttcaacagctactggatcaactggatgaagcagaaacccggccagggactcgaatggatcggccaaatctatcccggcgacggcgacaccaactacaacggcaagttcaagggcagagccacactgaccgccgatacctctagcagcacagcctacatgcagctgagcagcctgaccagcgaagatagcgccgtgtacttctgtgcccggtccatcacaacagtcgtgggctgcgctatggactattggggccagggaacaagcgtgaccgtgtctagtacgcgtgcaagaagtgaagatcgctacaggaaccctattctcgagggaggcagctggagccaccctcagtttgaaaaagactacaaagacgatgacgataagggatcagattacaaggatgatgatgacaaggggtcagattataaagacgacgatgataaagggagcgactacaaggacgacgatgacaaggcctggtcccatccccagttcgagaaacaccatcaccaccaccatcatcacactagtggctccggcgagggcagaggaagtctactaacctgcggagatgtggaagaaaatcctggcccacatatgaccgagtacaagcccacggtgcgcctcgccacccgcgacgacgtccccagggccgtacgcaccctcgccgccgcgttcgccgactaccccgccacgcgccacaccgtcgatccggaccgccacatcgagcgggtcaccgagctgcaagaactcttcctcacgcgcgtcgggctcgacatcggcaaggtgtgggtcgcggacgacggcgccgcggtggcggtctggaccacgccggagagcgtcgaagcgggggcggtgttcgccgagatcggcccgcgcatggccgagttgagcggttcccggctggccgcgcagcaacagatggaaggcctcctggcgccgcaccggcccaaggagcccgcgtggttcctggccaccgtcggcgtctcgcccgaccaccagggcaagggtctgggcagcgccgtcgtgctccccggagtggaggcggccgagcgcgccggggtgcccgccttcctggagacctccgcgccccgcaacctccccttctacgagcggctcggcttcaccgtcaccgccgacgtcgaggtgcccgaaggaccgcgcacctggtgcatgacccgcaagcccggtgcctga

SEQ ID NO: 5098 - DNA, 1710 bp, synthetic construct
  source 1..1710: mol_type = other DNA
atggccttaccagtgaccgccttgctcctgccgctggccttgctgctccacgccgccaggccggacatccagatgacacagagccctagcagcctgtctgccagcgtgggagacagagtgaccatcacatgcaaggccagcgaccacatcaacaactggctggcctggtatcagcagaagcctggacaggcccctaagctgctgatctacggcgctaccacactggaaacaggcgtgcccagcagattttctggcagcggctctggcaccgactacaccctgacaatatccagcctccagcctgaggacttcgccacctactactgtcagcagagctggaacaccccttggacattcggccagggcaccaagctggaaatcaagagaggcggaggcggaagtggaggcggaggatctggcggcggaggctctcaagttcagcttcaacagcctggcgctgagctggtcaaacctggcgcttctgtgaagatgagctgcaaagccagcggctacgccttcaacagctactggatcaactggatgaagcagaaacccggccagggactcgaatggatcggccaaatctatcccggcgacggcgacaccaactacaacggcaagttcaagggcagagccacactgaccgccgatacctctagcagcacagcctacatgcagctgagcagcctgaccagcgaagatagcgccgtgtacttctgtgcccggtccatcacaacagtcgtgggctgcgctatggactattggggccagggaacaagcgtgaccgtgtctagtacgcgtgcaagaagtgaagatcgctacaggaaccctatgctcgagggaggcagctggagccaccctcagtttgaaaaagactacaaagacgatgacgataagggatcagattacaaggatgatgatgacaaggggtcagattataaagacgacgatgataaagggagcgactacaaggacgacgatgacaaggcctggtcccatccccagttcgagaaacaccatcaccaccaccatcatcacactagtggctccggcgagggcagaggaagtctactaacctgcggagatgtggaagaaaatcctggcccacatatgaccgagtacaagcccacggtgcgcctcgccacccgcgacgacgtccccagggccgtacgcaccctcgccgccgcgttcgccgactaccccgccacgcgccacaccgtcgatccggaccgccacatcgagcgggtcaccgagctgcaagaactcttcctcacgcgcgtcgggctcgacatcggcaaggtgtgggtcgcggacgacggcgccgcggtggcggtctggaccacgccggagagcgtcgaagcgggggcggtgttcgccgagatcggcccgcgcatggccgagttgagcggttcccggctggccgcgcagcaacagatggaaggcctcctggcgccgcaccggcccaaggagcccgcgtggttcctggccaccgtcggcgtctcgcccgaccaccagggcaagggtctgggcagcgccgtcgtgctccccggagtggaggcggccgagcgcgccggggtgcccgccttcctggagacctccgcgccccgcaacctccccttctacgagcggctcggcttcaccgtcaccgccgacgtcgaggtgcccgaaggaccgcgcacctggtgcatgacccgcaagcccggtgcctga

SEQ ID NO: 5099 - DNA, 1710 bp, synthetic construct
  source 1..1710: mol_type = other DNA
atggccttaccagtgaccgccttgctcctgccgctggccttgctgctccacgccgccaggccggacatccagatgacacagagccctagcagcctgtctgccagcgtgggagacagagtgaccatcacatgcaaggccagcgaccacatcaacaactggctggcctggtatcagcagaagcctggacaggcccctaagctgctgatctacggcgctaccacactggaaacaggcgtgcccagcagattttctggcagcggctctggcaccgactacaccctgacaatatccagcctccagcctgaggacttcgccacctactactgtcagcagagctggaacaccccttggacattcggccagggcaccaagctggaaatcaagagaggcggaggcggaagtggaggcggaggatctggcggcggaggctctcaagttcagcttcaacagcctggcgctgagctggtcaaacctggcgcttctgtgaagatgagctgcaaagccagcggctacgccttcaacagctactggatcaactggatgaagcagaaacccggccagggactcgaatggatcggccaaatctatcccggcgacggcgacaccaactacaacggcaagttcaagggcagagccacactgaccgccgatacctctagcagcacagcctacatgcagctgagcagcctgaccagcgaagatagcgccgtgtacttctgtgcccggtccatcacaacagtcgtgggctgcgctatggactattggggccagggaacaagcgtgaccgtgtctagtacgcgtgcaagaagtgaagatcgctacaggaaccctgatctcgagggaggcagctggagccaccctcagtttgaaaaagactacaaagacgatgacgataagggatcagattacaaggatgatgatgacaaggggtcagattataaagacgacgatgataaagggagcgactacaaggacgacgatgacaaggcctggtcccatccccagttcgagaaacaccatcaccaccaccatcatcacactagtggctccggcgagggcagaggaagtctactaacctgcggagatgtggaagaaaatcctggcccacatatgaccgagtacaagcccacggtgcgcctcgccacccgcgacgacgtccccagggccgtacgcaccctcgccgccgcgttcgccgactaccccgccacgcgccacaccgtcgatccggaccgccacatcgagcgggtcaccgagctgcaagaactcttcctcacgcgcgtcgggctcgacatcggcaaggtgtgggtcgcggacgacggcgccgcggtggcggtctggaccacgccggagagcgtcgaagcgggggcggtgttcgccgagatcggcccgcgcatggccgagttgagcggttcccggctggccgcgcagcaacagatggaaggcctcctggcgccgcaccggcccaaggagcccgcgtggttcctggccaccgtcggcgtctcgcccgaccaccagggcaagggtctgggcagcgccgtcgtgctccccggagtggaggcggccgagcgcgccggggtgcccgccttcctggagacctccgcgccccgcaacctccccttctacgagcggctcggcttcaccgtcaccgccgacgtcgaggtgcccgaaggaccgcgcacctggtgcatgacccgcaagcccggtgcctga

SEQ ID NO: 5100 - DNA, 1710 bp, synthetic construct
  source 1..1710: mol_type = other DNA
atggccttaccagtgaccgccttgctcctgccgctggccttgctgctccacgccgccaggccggacatccagatgacacagagccctagcagcctgtctgccagcgtgggagacagagtgaccatcacatgcaaggccagcgaccacatcaacaactggctggcctggtatcagcagaagcctggacaggcccctaagctgctgatctacggcgctaccacactggaaacaggcgtgcccagcagattttctggcagcggctctggcaccgactacaccctgacaatatccagcctccagcctgaggacttcgccacctactactgtcagcagagctggaacaccccttggacattcggccagggcaccaagctggaaatcaagagaggcggaggcggaagtggaggcggaggatctggcggcggaggctctcaagttcagcttcaacagcctggcgctgagctggtcaaacctggcgcttctgtgaagatgagctgcaaagccagcggctacgccttcaacagctactggatcaactggatgaagcagaaacccggccagggactcgaatggatcggccaaatctatcccggcgacggcgacaccaactacaacggcaagttcaagggcagagccacactgaccgccgatacctctagcagcacagcctacatgcagctgagcagcctgaccagcgaagatagcgccgtgtacttctgtgcccggtccatcacaacagtcgtgggctgcgctatggactattggggccagggaacaagcgtgaccgtgtctagtacgcgtgcaagaagtgaagatcgctacaggaaccagaagctcgagggaggcagctggagccaccctcagtttgaaaaagactacaaagacgatgacgataagggatcagattacaaggatgatgatgacaaggggtcagattataaagacgacgatgataaagggagcgactacaaggacgacgatgacaaggcctggtcccatccccagttcgagaaacaccatcaccaccaccatcatcacactagtggctccggcgagggcagaggaagtctactaacctgcggagatgtggaagaaaatcctggcccacatatgaccgagtacaagcccacggtgcgcctcgccacccgcgacgacgtccccagggccgtacgcaccctcgccgccgcgttcgccgactaccccgccacgcgccacaccgtcgatccggaccgccacatcgagcgggtcaccgagctgcaagaactcttcctcacgcgcgtcgggctcgacatcggcaaggtgtgggtcgcggacgacggcgccgcggtggcggtctggaccacgccggagagcgtcgaagcgggggcggtgttcgccgagatcggcccgcgcatggccgagttgagcggttcccggctggccgcgcagcaacagatggaaggcctcctggcgccgcaccggcccaaggagcccgcgtggttcctggccaccgtcggcgtctcgcccgaccaccagggcaagggtctgggcagcgccgtcgtgctccccggagtggaggcggccgagcgcgccggggtgcccgccttcctggagacctccgcgccccgcaacctccccttctacgagcggctcggcttcaccgtcaccgccgacgtcgaggtgcccgaaggaccgcgcacctggtgcatgacccgcaagcccggtgcctga

SEQ ID NO: 5101 - DNA, 1710 bp, synthetic construct
  source 1..1710: mol_type = other DNA
atggccttaccagtgaccgccttgctcctgccgctggccttgctgctccacgccgccaggccggacatccagatgacacagagccctagcagcctgtctgccagcgtgggagacagagtgaccatcacatgcaaggccagcgaccacatcaacaactggctggcctggtatcagcagaagcctggacaggcccctaagctgctgatctacggcgctaccacactggaaacaggcgtgcccagcagattttctggcagcggctctggcaccgactacaccctgacaatatccagcctccagcctgaggacttcgccacctactactgtcagcagagctggaacaccccttggacattcggccagggcaccaagctggaaatcaagagaggcggaggcggaagtggaggcggaggatctggcggcggaggctctcaagttcagcttcaacagcctggcgctgagctggtcaaacctggcgcttctgtgaagatgagctgcaaagccagcggctacgccttcaacagctactggatcaactggatgaagcagaaacccggccagggactcgaatggatcggccaaatctatcccggcgacggcgacaccaactacaacggcaagttcaagggcagagccacactgaccgccgatacctctagcagcacagcctacatgcagctgagcagcctgaccagcgaagatagcgccgtgtacttctgtgcccggtccatcacaacagtcgtgggctgcgctatggactattggggccagggaacaagcgtgaccgtgtctagtacgcgtgcaagaagtgaagatcgctacaggaacggtaagctcgagggaggcagctggagccaccctcagtttgaaaaagactacaaagacgatgacgataagggatcagattacaaggatgatgatgacaaggggtcagattataaagacgacgatgataaagggagcgactacaaggacgacgatgacaaggcctggtcccatccccagttcgagaaacaccatcaccaccaccatcatcacactagtggctccggcgagggcagaggaagtctactaacctgcggagatgtggaagaaaatcctggcccacatatgaccgagtacaagcccacggtgcgcctcgccacccgcgacgacgtccccagggccgtacgcaccctcgccgccgcgttcgccgactaccccgccacgcgccacaccgtcgatccggaccgccacatcgagcgggtcaccgagctgcaagaactcttcctcacgcgcgtcgggctcgacatcggcaaggtgtgggtcgcggacgacggcgccgcggtggcggtctggaccacgccggagagcgtcgaagcgggggcggtgttcgccgagatcggcccgcgcatggccgagttgagcggttcccggctggccgcgcagcaacagatggaaggcctcctggcgccgcaccggcccaaggagcccgcgtggttcctggccaccgtcggcgtctcgcccgaccaccagggcaagggtctgggcagcgccgtcgtgctccccggagtggaggcggccgagcgcgccggggtgcccgccttcctggagacctccgcgccccgcaacctccccttctacgagcggctcggcttcaccgtcaccgccgacgtcgaggtgcccgaaggaccgcgcacctggtgcatgacccgcaagcccggtgcctga

SEQ ID NO: 5102 - DNA, 831 bp, synthetic construct
  source 1..831: mol_type = other DNA
atggccttaccagtgaccgccttgctcctgccgctggccttgctgctccacgccgccaggccggacatccagatgacacagagccctagcagcctgtctgccagcgtgggagacagagtgaccatcacatgcaaggccagcgaccacatcaacaactggctggcctggtatcagcagaagcctggacaggcccctaagctgctgatctacggcgctaccacactggaaacaggcgtgcccagcagattttctggcagcggctctggcaccgactacaccctgacaatatccagcctccagcctgaggacttcgccacctactactgtcagcagagctggaacaccccttggacattcggccagggcaccaagctggaaatcaagagaggcggaggcggaagtggaggcggaggatctggcggcggaggctctcaagttcagcttcaacagcctggcgctgagctggtcaaacctggcgcttctgtgaagatgagctgcaaagccagcggctacgccttcaacagctactggatcaactggatgaagcagaaacccggccagggactcgaatggatcggccaaatctatcccggcgacggcgacaccaactacaacggcaagttcaagggcagagccacactgaccgccgatacctctagcagcacagcctacatgcagctgagcagcctgaccagcgaagatagcgccgtgtacttctgtgcccggtccatcacaacagtcgtgggctgcgctatggactattggggccagggaacaagcgtgaccgtgtctagtacgcgtgcaagaagtgaagatcgctacaggaactag

SEQ ID NO: 5103 - DNA, 1710 bp, synthetic construct
  source 1..1710: mol_type = other DNA
atggccttaccagtgaccgccttgctcctgccgctggccttgctgctccacgccgccaggccggacatccagatgacacagagccctagcagcctgtctgccagcgtgggagacagagtgaccatcacatgcaaggccagcgaccacatcaacaactggctggcctggtatcagcagaagcctggacaggcccctaagctgctgatctacggcgctaccacactggaaacaggcgtgcccagcagattttctggcagcggctctggcaccgactacaccctgacaatatccagcctccagcctgaggacttcgccacctactactgtcagcagagctggaacaccccttggacattcggccagggcaccaagctggaaatcaagagaggcggaggcggaagtggaggcggaggatctggcggcggaggctctcaagttcagcttcaacagcctggcgctgagctggtcaaacctggcgcttctgtgaagatgagctgcaaagccagcggctacgccttcaacagctactggatcaactggatgaagcagaaacccggccagggactcgaatggatcggccaaatctatcccggcgacggcgacaccaactacaacggcaagttcaagggcagagccacactgaccgccgatacctctagcagcacagcctacatgcagctgagcagcctgaccagcgaagatagcgccgtgtacttctgtgcccggtccatcacaacagtcgtgggctgcgctatggactattggggccagggaacaagcgtgaccgtgtctagtacgcgtgcaagaagtgaagatcgctacaggaactcaaagctcgagggaggcagctggagccaccctcagtttgaaaaagactacaaagacgatgacgataagggatcagattacaaggatgatgatgacaaggggtcagattataaagacgacgatgataaagggagcgactacaaggacgacgatgacaaggcctggtcccatccccagttcgagaaacaccatcaccaccaccatcatcacactagtggctccggcgagggcagaggaagtctactaacctgcggagatgtggaagaaaatcctggcccacatatgaccgagtacaagcccacggtgcgcctcgccacccgcgacgacgtccccagggccgtacgcaccctcgccgccgcgttcgccgactaccccgccacgcgccacaccgtcgatccggaccgccacatcgagcgggtcaccgagctgcaagaactcttcctcacgcgcgtcgggctcgacatcggcaaggtgtgggtcgcggacgacggcgccgcggtggcggtctggaccacgccggagagcgtcgaagcgggggcggtgttcgccgagatcggcccgcgcatggccgagttgagcggttcccggctggccgcgcagcaacagatggaaggcctcctggcgccgcaccggcccaaggagcccgcgtggttcctggccaccgtcggcgtctcgcccgaccaccagggcaagggtctgggcagcgccgtcgtgctccccggagtggaggcggccgagcgcgccggggtgcccgccttcctggagacctccgcgccccgcaacctccccttctacgagcggctcggcttcaccgtcaccgccgacgtcgaggtgcccgaaggaccgcgcacctggtgcatgacccgcaagcccggtgcctga

SEQ ID NO: 5104 - DNA, 1710 bp, synthetic construct
  source 1..1710: mol_type = other DNA
atggccttaccagtgaccgccttgctcctgccgctggccttgctgctccacgccgccaggccggacatccagatgacacagagccctagcagcctgtctgccagcgtgggagacagagtgaccatcacatgcaaggccagcgaccacatcaacaactggctggcctggtatcagcagaagcctggacaggcccctaagctgctgatctacggcgctaccacactggaaacaggcgtgcccagcagattttctggcagcggctctggcaccgactacaccctgacaatatccagcctccagcctgaggacttcgccacctactactgtcagcagagctggaacaccccttggacattcggccagggcaccaagctggaaatcaagagaggcggaggcggaagtggaggcggaggatctggcggcggaggctctcaagttcagcttcaacagcctggcgctgagctggtcaaacctggcgcttctgtgaagatgagctgcaaagccagcggctacgccttcaacagctactggatcaactggatgaagcagaaacccggccagggactcgaatggatcggccaaatctatcccggcgacggcgacaccaactacaacggcaagttcaagggcagagccacactgaccgccgatacctctagcagcacagcctacatgcagctgagcagcctgaccagcgaagatagcgccgtgtacttctgtgcccggtccatcacaacagtcgtgggctgcgctatggactattggggccagggaacaagcgtgaccgtgtctagtacgcgtgcaagaagtgaagatcgctacaggatacctaagctcgagggaggcagctggagccaccctcagtttgaaaaagactacaaagacgatgacgataagggatcagattacaaggatgatgatgacaaggggtcagattataaagacgacgatgataaagggagcgactacaaggacgacgatgacaaggcctggtcccatccccagttcgagaaacaccatcaccaccaccatcatcacactagtggctccggcgagggcagaggaagtctactaacctgcggagatgtggaagaaaatcctggcccacatatgaccgagtacaagcccacggtgcgcctcgccacccgcgacgacgtccccagggccgtacgcaccctcgccgccgcgttcgccgactaccccgccacgcgccacaccgtcgatccggaccgccacatcgagcgggtcaccgagctgcaagaactcttcctcacgcgcgtcgggctcgacatcggcaaggtgtgggtcgcggacgacggcgccgcggtggcggtctggaccacgccggagagcgtcgaagcgggggcggtgttcgccgagatcggcccgcgcatggccgagttgagcggttcccggctggccgcgcagcaacagatggaaggcctcctggcgccgcaccggcccaaggagcccgcgtggttcctggccaccgtcggcgtctcgcccgaccaccagggcaagggtctgggcagcgccgtcgtgctccccggagtggaggcggccgagcgcgccggggtgcccgccttcctggagacctccgcgccccgcaacctccccttctacgagcggctcggcttcaccgtcaccgccgacgtcgaggtgcccgaaggaccgcgcacctggtgcatgacccgcaagcccggtgcctga

SEQ ID NO: 5105 - DNA, 1710 bp, synthetic construct
  source 1..1710: mol_type = other DNA
atggccttaccagtgaccgccttgctcctgccgctggccttgctgctccacgccgccaggccggacatccagatgacacagagccctagcagcctgtctgccagcgtgggagacagagtgaccatcacatgcaaggccagcgaccacatcaacaactggctggcctggtatcagcagaagcctggacaggcccctaagctgctgatctacggcgctaccacactggaaacaggcgtgcccagcagattttctggcagcggctctggcaccgactacaccctgacaatatccagcctccagcctgaggacttcgccacctactactgtcagcagagctggaacaccccttggacattcggccagggcaccaagctggaaatcaagagaggcggaggcggaagtggaggcggaggatctggcggcggaggctctcaagttcagcttcaacagcctggcgctgagctggtcaaacctggcgcttctgtgaagatgagctgcaaagccagcggctacgccttcaacagctactggatcaactggatgaagcagaaacccggccagggactcgaatggatcggccaaatctatcccggcgacggcgacaccaactacaacggcaagttcaagggcagagccacactgaccgccgatacctctagcagcacagcctacatgcagctgagcagcctgaccagcgaagatagcgccgtgtacttctgtgcccggtccatcacaacagtcgtgggctgcgctatggactattggggccagggaacaagcgtgaccgtgtctagtacgcgtgcaagaagtgaagatcgctacaggtatcctaagctcgagggaggcagctggagccaccctcagtttgaaaaagactacaaagacgatgacgataagggatcagattacaaggatgatgatgacaaggggtcagattataaagacgacgatgataaagggagcgactacaaggacgacgatgacaaggcctggtcccatccccagttcgagaaacaccatcaccaccaccatcatcacactagtggctccggcgagggcagaggaagtctactaacctgcggagatgtggaagaaaatcctggcccacatatgaccgagtacaagcccacggtgcgcctcgccacccgcgacgacgtccccagggccgtacgcaccctcgccgccgcgttcgccgactaccccgccacgcgccacaccgtcgatccggaccgccacatcgagcgggtcaccgagctgcaagaactcttcctcacgcgcgtcgggctcgacatcggcaaggtgtgggtcgcggacgacggcgccgcggtggcggtctggaccacgccggagagcgtcgaagcgggggcggtgttcgccgagatcggcccgcgcatggccgagttgagcggttcccggctggccgcgcagcaacagatggaaggcctcctggcgccgcaccggcccaaggagcccgcgtggttcctggccaccgtcggcgtctcgcccgaccaccagggcaagggtctgggcagcgccgtcgtgctccccggagtggaggcggccgagcgcgccggggtgcccgccttcctggagacctccgcgccccgcaacctccccttctacgagcggctcggcttcaccgtcaccgccgacgtcgaggtgcccgaaggaccgcgcacctggtgcatgacccgcaagcccggtgcctga

SEQ ID NO: 5106 - DNA, 1710 bp, synthetic construct
  source 1..1710: mol_type = other DNA
atggccttaccagtgaccgccttgctcctgccgctggccttgctgctccacgccgccaggccggacatccagatgacacagagccctagcagcctgtctgccagcgtgggagacagagtgaccatcacatgcaaggccagcgaccacatcaacaactggctggcctggtatcagcagaagcctggacaggcccctaagctgctgatctacggcgctaccacactggaaacaggcgtgcccagcagattttctggcagcggctctggcaccgactacaccctgacaatatccagcctccagcctgaggacttcgccacctactactgtcagcagagctggaacaccccttggacattcggccagggcaccaagctggaaatcaagagaggcggaggcggaagtggaggcggaggatctggcggcggaggctctcaagttcagcttcaacagcctggcgctgagctggtcaaacctggcgcttctgtgaagatgagctgcaaagccagcggctacgccttcaacagctactggatcaactggatgaagcagaaacccggccagggactcgaatggatcggccaaatctatcccggcgacggcgacaccaactacaacggcaagttcaagggcagagccacactgaccgccgatacctctagcagcacagcctacatgcagctgagcagcctgaccagcgaagatagcgccgtgtacttctgtgcccggtccatcacaacagtcgtgggctgcgctatggactattggggccagggaacaagcgtgaccgtgtctagtacgcgtgcaagaagtgaagatcgctacaggccgcctaagctcgagggaggcagctggagccaccctcagtttgaaaaagactacaaagacgatgacgataagggatcagattacaaggatgatgatgacaaggggtcagattataaagacgacgatgataaagggagcgactacaaggacgacgatgacaaggcctggtcccatccccagttcgagaaacaccatcaccaccaccatcatcacactagtggctccggcgagggcagaggaagtctactaacctgcggagatgtggaagaaaatcctggcccacatatgaccgagtacaagcccacggtgcgcctcgccacccgcgacgacgtccccagggccgtacgcaccctcgccgccgcgttcgccgactaccccgccacgcgccacaccgtcgatccggaccgccacatcgagcgggtcaccgagctgcaagaactcttcctcacgcgcgtcgggctcgacatcggcaaggtgtgggtcgcggacgacggcgccgcggtggcggtctggaccacgccggagagcgtcgaagcgggggcggtgttcgccgagatcggcccgcgcatggccgagttgagcggttcccggctggccgcgcagcaacagatggaaggcctcctggcgccgcaccggcccaaggagcccgcgtggttcctggccaccgtcggcgtctcgcccgaccaccagggcaagggtctgggcagcgccgtcgtgctccccggagtggaggcggccgagcgcgccggggtgcccgccttcctggagacctccgcgccccgcaacctccccttctacgagcggctcggcttcaccgtcaccgccgacgtcgaggtgcccgaaggaccgcgcacctggtgcatgacccgcaagcccggtgcctga

SEQ ID NO: 5107 - DNA, 1710 bp, synthetic construct
  source 1..1710: mol_type = other DNA
atggccttaccagtgaccgccttgctcctgccgctggccttgctgctccacgccgccaggccggacatccagatgacacagagccctagcagcctgtctgccagcgtgggagacagagtgaccatcacatgcaaggccagcgaccacatcaacaactggctggcctggtatcagcagaagcctggacaggcccctaagctgctgatctacggcgctaccacactggaaacaggcgtgcccagcagattttctggcagcggctctggcaccgactacaccctgacaatatccagcctccagcctgaggacttcgccacctactactgtcagcagagctggaacaccccttggacattcggccagggcaccaagctggaaatcaagagaggcggaggcggaagtggaggcggaggatctggcggcggaggctctcaagttcagcttcaacagcctggcgctgagctggtcaaacctggcgcttctgtgaagatgagctgcaaagccagcggctacgccttcaacagctactggatcaactggatgaagcagaaacccggccagggactcgaatggatcggccaaatctatcccggcgacggcgacaccaactacaacggcaagttcaagggcagagccacactgaccgccgatacctctagcagcacagcctacatgcagctgagcagcctgaccagcgaagatagcgccgtgtacttctgtgcccggtccatcacaacagtcgtgggctgcgctatggactattggggccagggaacaagcgtgaccgtgtctagtacgcgtgcaagaagtgaagatcgctacaggacacctaagctcgagggaggcagctggagccaccctcagtttgaaaaagactacaaagacgatgacgataagggatcagattacaaggatgatgatgacaaggggtcagattataaagacgacgatgataaagggagcgactacaaggacgacgatgacaaggcctggtcccatccccagttcgagaaacaccatcaccaccaccatcatcacactagtggctccggcgagggcagaggaagtctactaacctgcggagatgtggaagaaaatcctggcccacatatgaccgagtacaagcccacggtgcgcctcgccacccgcgacgacgtccccagggccgtacgcaccctcgccgccgcgttcgccgactaccccgccacgcgccacaccgtcgatccggaccgccacatcgagcgggtcaccgagctgcaagaactcttcctcacgcgcgtcgggctcgacatcggcaaggtgtgggtcgcggacgacggcgccgcggtggcggtctggaccacgccggagagcgtcgaagcgggggcggtgttcgccgagatcggcccgcgcatggccgagttgagcggttcccggctggccgcgcagcaacagatggaaggcctcctggcgccgcaccggcccaaggagcccgcgtggttcctggccaccgtcggcgtctcgcccgaccaccagggcaagggtctgggcagcgccgtcgtgctccccggagtggaggcggccgagcgcgccggggtgcccgccttcctggagacctccgcgccccgcaacctccccttctacgagcggctcggcttcaccgtcaccgccgacgtcgaggtgcccgaaggaccgcgcacctggtgcatgacccgcaagcccggtgcctga

SEQ ID NO: 5108 - DNA, 1710 bp, synthetic construct
  source 1..1710: mol_type = other DNA
atggccttaccagtgaccgccttgctcctgccgctggccttgctgctccacgccgccaggccggacatccagatgacacagagccctagcagcctgtctgccagcgtgggagacagagtgaccatcacatgcaaggccagcgaccacatcaacaactggctggcctggtatcagcagaagcctggacaggcccctaagctgctgatctacggcgctaccacactggaaacaggcgtgcccagcagattttctggcagcggctctggcaccgactacaccctgacaatatccagcctccagcctgaggacttcgccacctactactgtcagcagagctggaacaccccttggacattcggccagggcaccaagctggaaatcaagagaggcggaggcggaagtggaggcggaggatctggcggcggaggctctcaagttcagcttcaacagcctggcgctgagctggtcaaacctggcgcttctgtgaagatgagctgcaaagccagcggctacgccttcaacagctactggatcaactggatgaagcagaaacccggccagggactcgaatggatcggccaaatctatcccggcgacggcgacaccaactacaacggcaagttcaagggcagagccacactgaccgccgatacctctagcagcacagcctacatgcagctgagcagcctgaccagcgaagatagcgccgtgtacttctgtgcccggtccatcacaacagtcgtgggctgcgctatggactattggggccagggaacaagcgtgaccgtgtctagtacgcgtgcaagaagtgaagatcgctacagggctcctaagctcgagggaggcagctggagccaccctcagtttgaaaaagactacaaagacgatgacgataagggatcagattacaaggatgatgatgacaaggggtcagattataaagacgacgatgataaagggagcgactacaaggacgacgatgacaaggcctggtcccatccccagttcgagaaacaccatcaccaccaccatcatcacactagtggctccggcgagggcagaggaagtctactaacctgcggagatgtggaagaaaatcctggcccacatatgaccgagtacaagcccacggtgcgcctcgccacccgcgacgacgtccccagggccgtacgcaccctcgccgccgcgttcgccgactaccccgccacgcgccacaccgtcgatccggaccgccacatcgagcgggtcaccgagctgcaagaactcttcctcacgcgcgtcgggctcgacatcggcaaggtgtgggtcgcggacgacggcgccgcggtggcggtctggaccacgccggagagcgtcgaagcgggggcggtgttcgccgagatcggcccgcgcatggccgagttgagcggttcccggctggccgcgcagcaacagatggaaggcctcctggcgccgcaccggcccaaggagcccgcgtggttcctggccaccgtcggcgtctcgcccgaccaccagggcaagggtctgggcagcgccgtcgtgctccccggagtggaggcggccgagcgcgccggggtgcccgccttcctggagacctccgcgccccgcaacctccccttctacgagcggctcggcttcaccgtcaccgccgacgtcgaggtgcccgaaggaccgcgcacctggtgcatgacccgcaagcccggtgcctga

SEQ ID NO: 5109 - DNA, 1710 bp, synthetic construct
  source 1..1710: mol_type = other DNA
atggccttaccagtgaccgccttgctcctgccgctggccttgctgctccacgccgccaggccggacatccagatgacacagagccctagcagcctgtctgccagcgtgggagacagagtgaccatcacatgcaaggccagcgaccacatcaacaactggctggcctggtatcagcagaagcctggacaggcccctaagctgctgatctacggcgctaccacactggaaacaggcgtgcccagcagattttctggcagcggctctggcaccgactacaccctgacaatatccagcctccagcctgaggacttcgccacctactactgtcagcagagctggaacaccccttggacattcggccagggcaccaagctggaaatcaagagaggcggaggcggaagtggaggcggaggatctggcggcggaggctctcaagttcagcttcaacagcctggcgctgagctggtcaaacctggcgcttctgtgaagatgagctgcaaagccagcggctacgccttcaacagctactggatcaactggatgaagcagaaacccggccagggactcgaatggatcggccaaatctatcccggcgacggcgacaccaactacaacggcaagttcaagggcagagccacactgaccgccgatacctctagcagcacagcctacatgcagctgagcagcctgaccagcgaagatagcgccgtgtacttctgtgcccggtccatcacaacagtcgtgggctgcgctatggactattggggccagggaacaagcgtgaccgtgtctagtacgcgtgcaagaagtgaagatcgctacaggaaccctactctcgagggaggcagctggagccaccctcagtttgaaaaagactacaaagacgatgacgataagggatcagattacaaggatgatgatgacaaggggtcagattataaagacgacgatgataaagggagcgactacaaggacgacgatgacaaggcctggtcccatccccagttcgagaaacaccatcaccaccaccatcatcacactagtggctccggcgagggcagaggaagtctactaacctgcggagatgtggaagaaaatcctggcccacatatgaccgagtacaagcccacggtgcgcctcgccacccgcgacgacgtccccagggccgtacgcaccctcgccgccgcgttcgccgactaccccgccacgcgccacaccgtcgatccggaccgccacatcgagcgggtcaccgagctgcaagaactcttcctcacgcgcgtcgggctcgacatcggcaaggtgtgggtcgcggacgacggcgccgcggtggcggtctggaccacgccggagagcgtcgaagcgggggcggtgttcgccgagatcggcccgcgcatggccgagttgagcggttcccggctggccgcgcagcaacagatggaaggcctcctggcgccgcaccggcccaaggagcccgcgtggttcctggccaccgtcggcgtctcgcccgaccaccagggcaagggtctgggcagcgccgtcgtgctccccggagtggaggcggccgagcgcgccggggtgcccgccttcctggagacctccgcgccccgcaacctccccttctacgagcggctcggcttcaccgtcaccgccgacgtcgaggtgcccgaaggaccgcgcacctggtgcatgacccgcaagcccggtgcctga

SEQ ID NO: 5110 - DNA, 1710 bp, synthetic construct
  source 1..1710: mol_type = other DNA
atggccttaccagtgaccgccttgctcctgccgctggccttgctgctccacgccgccaggccggacatccagatgacacagagccctagcagcctgtctgccagcgtgggagacagagtgaccatcacatgcaaggccagcgaccacatcaacaactggctggcctggtatcagcagaagcctggacaggcccctaagctgctgatctacggcgctaccacactggaaacaggcgtgcccagcagattttctggcagcggctctggcaccgactacaccctgacaatatccagcctccagcctgaggacttcgccacctactactgtcagcagagctggaacaccccttggacattcggccagggcaccaagctggaaatcaagagaggcggaggcggaagtggaggcggaggatctggcggcggaggctctcaagttcagcttcaacagcctggcgctgagctggtcaaacctggcgcttctgtgaagatgagctgcaaagccagcggctacgccttcaacagctactggatcaactggatgaagcagaaacccggccagggactcgaatggatcggccaaatctatcccggcgacggcgacaccaactacaacggcaagttcaagggcagagccacactgaccgccgatacctctagcagcacagcctacatgcagctgagcagcctgaccagcgaagatagcgccgtgtacttctgtgcccggtccatcacaacagtcgtgggctgcgctatggactattggggccagggaacaagcgtgaccgtgtctagtacgcgtgcaagaagtgaagatcgctacaggaacggaaagctcgagggaggcagctggagccaccctcagtttgaaaaagactacaaagacgatgacgataagggatcagattacaaggatgatgatgacaaggggtcagattataaagacgacgatgataaagggagcgactacaaggacgacgatgacaaggcctggtcccatccccagttcgagaaacaccatcaccaccaccatcatcacactagtggctccggcgagggcagaggaagtctactaacctgcggagatgtggaagaaaatcctggcccacatatgaccgagtacaagcccacggtgcgcctcgccacccgcgacgacgtccccagggccgtacgcaccctcgccgccgcgttcgccgactaccccgccacgcgccacaccgtcgatccggaccgccacatcgagcgggtcaccgagctgcaagaactcttcctcacgcgcgtcgggctcgacatcggcaaggtgtgggtcgcggacgacggcgccgcggtggcggtctggaccacgccggagagcgtcgaagcgggggcggtgttcgccgagatcggcccgcgcatggccgagttgagcggttcccggctggccgcgcagcaacagatggaaggcctcctggcgccgcaccggcccaaggagcccgcgtggttcctggccaccgtcggcgtctcgcccgaccaccagggcaagggtctgggcagcgccgtcgtgctccccggagtggaggcggccgagcgcgccggggtgcccgccttcctggagacctccgcgccccgcaacctccccttctacgagcggctcggcttcaccgtcaccgccgacgtcgaggtgcccgaaggaccgcgcacctggtgcatgacccgcaagcccggtgcctga

SEQ ID NO: 5111 - DNA, 1710 bp, synthetic construct
  source 1..1710: mol_type = other DNA
atggccttaccagtgaccgccttgctcctgccgctggccttgctgctccacgccgccaggccggacatccagatgacacagagccctagcagcctgtctgccagcgtgggagacagagtgaccatcacatgcaaggccagcgaccacatcaacaactggctggcctggtatcagcagaagcctggacaggcccctaagctgctgatctacggcgctaccacactggaaacaggcgtgcccagcagattttctggcagcggctctggcaccgactacaccctgacaatatccagcctccagcctgaggacttcgccacctactactgtcagcagagctggaacaccccttggacattcggccagggcaccaagctggaaatcaagagaggcggaggcggaagtggaggcggaggatctggcggcggaggctctcaagttcagcttcaacagcctggcgctgagctggtcaaacctggcgcttctgtgaagatgagctgcaaagccagcggctacgccttcaacagctactggatcaactggatgaagcagaaacccggccagggactcgaatggatcggccaaatctatcccggcgacggcgacaccaactacaacggcaagttcaagggcagagccacactgaccgccgatacctctagcagcacagcctacatgcagctgagcagcctgaccagcgaagatagcgccgtgtacttctgtgcccggtccatcacaacagtcgtgggctgcgctatggactattggggccagggaacaagcgtgaccgtgtctagtacgcgtgcaagaagtgaagatcgctacaggaaccctacactcgagggaggcagctggagccaccctcagtttgaaaaagactacaaagacgatgacgataagggatcagattacaaggatgatgatgacaaggggtcagattataaagacgacgatgataaagggagcgactacaaggacgacgatgacaaggcctggtcccatccccagttcgagaaacaccatcaccaccaccatcatcacactagtggctccggcgagggcagaggaagtctactaacctgcggagatgtggaagaaaatcctggcccacatatgaccgagtacaagcccacggtgcgcctcgccacccgcgacgacgtccccagggccgtacgcaccctcgccgccgcgttcgccgactaccccgccacgcgccacaccgtcgatccggaccgccacatcgagcgggtcaccgagctgcaagaactcttcctcacgcgcgtcgggctcgacatcggcaaggtgtgggtcgcggacgacggcgccgcggtggcggtctggaccacgccggagagcgtcgaagcgggggcggtgttcgccgagatcggcccgcgcatggccgagttgagcggttcccggctggccgcgcagcaacagatggaaggcctcctggcgccgcaccggcccaaggagcccgcgtggttcctggccaccgtcggcgtctcgcccgaccaccagggcaagggtctgggcagcgccgtcgtgctccccggagtggaggcggccgagcgcgccggggtgcccgccttcctggagacctccgcgccccgcaacctccccttctacgagcggctcggcttcaccgtcaccgccgacgtcgaggtgcccgaaggaccgcgcacctggtgcatgacccgcaagcccggtgcctga

SEQ ID NO: 5112 - DNA, 1710 bp, synthetic construct; identical to SEQ ID NO: 5110
  source 1..1710: mol_type = other DNA

SEQ ID NO: 5113 - DNA, 1701 bp, synthetic construct
  source 1..1701: mol_type = other DNA
atggccttaccagtgaccgccttgctcctgccgctggccttgctgctccacgccgccaggccggacatccagatgacacagagccctagcagcctgtctgccagcgtgggagacagagtgaccatcacatgcaaggccagcgaccacatcaacaactggctggcctggtatcagcagaagcctggacaggcccctaagctgctgatctacggcgctaccacactggaaacaggcgtgcccagcagattttctggcagcggctctggcaccgactacaccctgacaatatccagcctccagcctgaggacttcgccacctactactgtcagcagagctggaacaccccttggacattcggccagggcaccaagctggaaatcaagagaggcggaggcggaagtggaggcggaggatctggcggcggaggctctcaagttcagcttcaacagcctggcgctgagctggtcaaacctggcgcttctgtgaagatgagctgcaaagccagcggctacgccttcaacagctactggatcaactggatgaagcagaaacccggccagggactcgaatggatcggccaaatctatcccggcgacggcgacaccaactacaacggcaagttcaagggcagagccacactgaccgccgatacctctagcagcacagcctacatgcagctgagcagcctgaccagcgaagatagcgccgtgtacttctgtgcccggtccatcacaacagtcgtgggctgcgctatggactattggggccagggaacaagcgtgaccgtgtctagtacgcgtgcaagaagtgaagatcgctacaggctcgagggaggcagctggagccaccctcagtttgaaaaagactacaaagacgatgacgataagggatcagattacaaggatgatgatgacaaggggtcagattataaagacgacgatgataaagggagcgactacaaggacgacgatgacaaggcctggtcccatccccagttcgagaaacaccatcaccaccaccatcatcacactagtggctccggcgagggcagaggaagtctactaacctgcggagatgtggaagaaaatcctggcccacatatgaccgagtacaagcccacggtgcgcctcgccacccgcgacgacgtccccagggccgtacgcaccctcgccgccgcgttcgccgactaccccgccacgcgccacaccgtcgatccggaccgccacatcgagcgggtcaccgagctgcaagaactcttcctcacgcgcgtcgggctcgacatcggcaaggtgtgggtcgcggacgacggcgccgcggtggcggtctggaccacgccggagagcgtcgaagcgggggcggtgttcgccgagatcggcccgcgcatggccgagttgagcggttcccggctggccgcgcagcaacagatggaaggcctcctggcgccgcaccggcccaaggagcccgcgtggttcctggccaccgtcggcgtctcgcccgaccaccagggcaagggtctgggcagcgccgtcgtgctccccggagtggaggcggccgagcgcgccggggtgcccgccttcctggagacctccgcgccccgcaacctccccttctacgagcggctcggcttcaccgtcaccgccgacgtcgaggtgcccgaaggaccgcgcacctggtgcatgacccgcaagcccggtgcctga

SEQ ID NO: 5114 - DNA, 1698 bp, synthetic construct
  source 1..1698: mol_type = other DNA
atggccttaccagtgaccgccttgctcctgccgctggccttgctgctccacgccgccaggccggacatccagatgacacagagccctagcagcctgtctgccagcgtgggagacagagtgaccatcacatgcaaggccagcgaccacatcaacaactggctggcctggtatcagcagaagcctggacaggcccctaagctgctgatctacggcgctaccacactggaaacaggcgtgcccagcagattttctggcagcggctctggcaccgactacaccctgacaatatccagcctccagcctgaggacttcgccacctactactgtcagcagagctggaacaccccttggacattcggccagggcaccaagctggaaatcaagagaggcggaggcggaagtggaggcggaggatctggcggcggaggctctcaagttcagcttcaacagcctggcgctgagctggtcaaacctggcgcttctgtgaagatgagctgcaaagccagcggctacgccttcaacagctactggatcaactggatgaagcagaaacccggccagggactcgaatggatcggccaaatctatcccggcgacggcgacaccaactacaacggcaagttcaagggcagagccacactgaccgccgatacctctagcagcacagcctacatgcagctgagcagcctgaccagcgaagatagcgccgtgtacttctgtgcccggtccatcacaacagtcgtgggctgcgctatggactattggggccagggaacaagcgtgaccgtgtctagtacgcgtgcaagaagtgaagatcgctacctcgagggaggcagctggagccaccctcagtttgaaaaagactacaaagacgatgacgataagggatcagattacaaggatgatgatgacaaggggtcagattataaagacgacgatgataaagggagcgactacaaggacgacgatgacaaggcctggtcccatccccagttcgagaaacaccatcaccaccaccatcatcacactagtggctccggcgagggcagaggaagtctactaacctgcggagatgtggaagaaaatcctggcccacatatgaccgagtacaagcccacggtgcgcctcgccacccgcgacgacgtccccagggccgtacgcaccctcgccgccgcgttcgccgactaccccgccacgcgccacaccgtcgatccggaccgccacatcgagcgggtcaccgagctgcaagaactcttcctcacgcgcgtcgggctcgacatcggcaaggtgtgggtcgcggacgacggcgccgcggtggcggtctggaccacgccggagagcgtcgaagcgggggcggtgttcgccgagatcggcccgcgcatggccgagttgagcggttcccggctggccgcgcagcaacagatggaaggcctcctggcgccgcaccggcccaaggagcccgcgtggttcctggccaccgtcggcgtctcgcccgaccaccagggcaagggtctgggcagcgccgtcgtgctccccggagtggaggcggccgagcgcgccggggtgcccgccttcctggagacctccgcgccccgcaacctccccttctacgagcggctcggcttcaccgtcaccgccgacgtcgaggtgcccgaaggaccgcgcacctggtgcatgacccgcaagcccggtgcctga

SEQ ID NO: 5115 - DNA, 1701 bp, synthetic construct
  source 1..1701: mol_type = other DNA
atggccttaccagtgaccgccttgctcctgccgctggccttgctgctccacgccgccaggccggacatccagatgacacagagccctagcagcctgtctgccagcgtgggagacagagtgaccatcacatgcaaggccagcgaccacatcaacaactggctggcctggtatcagcagaagcctggacaggcccctaagctgctgatctacggcgctaccacactggaaacaggcgtgcccagcagattttctggcagcggctctggcaccgactacaccctgacaatatccagcctccagcctgaggacttcgccacctactactgtcagcagagctggaacaccccttggacattcggccagggcaccaagctggaaatcaagagaggcggaggcggaagtggaggcggaggatctggcggcggaggctctcaagttcagcttcaacagcctggcgctgagctggtcaaacctggcgcttctgtgaagatgagctgcaaagccagcggctacgccttcaacagctactggatcaactggatgaagcagaaacccggccagggactcgaatggatcggccaaatctatcccggcgacggcgacaccaactacaacggcaagttcaagggcagagccacactgaccgccgatacctctagcagcacagcctacatgcagctgagcagcctgaccagcgaagatagcgccgtgtacttctgtgcccggtccatcacaacagtcgtgggctgcgctatggactattggggccagggaacaagcgtgaccgtgtctagtacgcgtagaagtgaagatcgctacaggaacctcgagggaggcagctggagccaccctcagtttgaaaaagactacaaagacgatgacgataagggatcagattacaaggatgatgatgacaaggggtcagattataaagacgacgatgataaagggagcgactacaaggacgacgatgacaaggcctggtcccatccccagttcgagaaacaccatcaccaccaccatcatcacactagtggctccggcgagggcagaggaagtctactaacctgcggagatgtggaagaaaatcctggcccacatatgaccgagtacaagcccacggtgcgcctcgccacccgcgacgacgtccccagggccgtacgcaccctcgccgccgcgttcgccgactaccccgccacgcgccacaccgtcgatccggaccgccacatcgagcgggtcaccgagctgcaagaactcttcctcacgcgcgtcgggctcgacatcggcaaggtgtgggtcgcggacgacggcgccgcggtggcggtctggaccacgccggagagcgtcgaagcgggggcggtgttcgccgagatcggcccgcgcatggccgagttgagcggttcccggctggccgcgcagcaacagatggaaggcctcctggcgccgcaccggcccaaggagcccgcgtggttcctggccaccgtcggcgtctcgcccgaccaccagggcaagggtctgggcagcgccgtcgtgctccccggagtggaggcggccgagcgcgccggggtgcccgccttcctggagacctccgcgccccgcaacctccccttctacgagcggctcggcttcaccgtcaccgccgacgtcgaggtgcccgaaggaccgcgcacctggtgcatgacccgcaagcccggtgcctga

SEQ ID NO: 5116 - DNA, 1701 bp, synthetic construct
  source 1..1701: mol_type = other DNA
atggccttaccagtgaccgccttgctcctgccgctggccttgctgctccacgccgccaggccggacatccagatgacacagagccctagcagcctgtctgccagcgtgggagacagagtgaccatcacatgcaaggccagcgaccacatcaacaactggctggcctggtatcagcagaagcctggacaggcccctaagctgctgatctacggcgctaccacactggaaacaggcgtgcccagcagattttctggcagcggctctggcaccgactacaccctgacaatatccagcctccagcctgaggacttcgccacctactactgtcagcagagctggaacaccccttggacattcggccagggcaccaagctggaaatcaagagaggcggaggcggaagtggaggcggaggatctggcggcggaggctctcaagttcagcttcaacagcctggcgctgagctggtcaaacctggcgcttctgtgaagatgagctgcaaagccagcggctacgccttcaacagctactggatcaactggatgaagcagaaacccggccagggactcgaatggatcggccaaatctatcccggcgacggcgacaccaactacaacggcaagttcaagggcagagccacactgaccgccgatacctctagcagcacagcctacatgcagctgagcagcctgaccagcgaagatagcgccgtgtacttctgtgcccggtccatcacaacagtcgtgggctgcgctatggactattggggccagggaacaagcgtgaccgtgtctagtacgcgtgcaagaagtgaagatcgctacaagctcgagggaggcagctggagccaccctcagtttgaaaaagactacaaagacgatgacgataagggatcagattacaaggatgatgatgacaaggggtcagattataaagacgacgatgataaagggagcgactacaaggacgacgatgacaaggcctggtcccatccccagttcgagaaacaccatcaccaccaccatcatcacactagtggctccggcgagggcagaggaagtctactaacctgcggagatgtggaagaaaatcctggcccacatatgaccgagtacaagcccacggtgcgcctcgccacccgcgacgacgtccccagggccgtacgcaccctcgccgccgcgttcgccgactaccccgccacgcgccacaccgtcgatccggaccgccacatcgagcgggtcaccgagctgcaagaactcttcctcacgcgcgtcgggctcgacatcggcaaggtgtgggtcgcggacgacggcgccgcggtggcggtctggaccacgccggagagcgtcgaagcgggggcggtgttcgccgagatcggcccgcgcatggccgagttgagcggttcccggctggccgcgcagcaacagatggaaggcctcctggcgccgcaccggcccaaggagcccgcgtggttcctggccaccgtcggcgtctcgcccgaccaccagggcaagggtctgggcagcgccgtcgtgctccccggagtggaggcggccgagcgcgccggggtgcccgccttcctggagacctccgcgccccgcaacctccccttctacgagcggctcggcttcaccgtcaccgccgacgtcgaggtgcccgaaggaccgcgcacctggtgcatgacccgcaagcccggtgcctga

SEQ ID NO: 5117 - DNA, 1701 bp, synthetic construct
  source 1..1701: mol_type = other DNA
atggccttaccagtgaccgccttgctcctgccgctggccttgctgctccacgccgccaggccggacatccagatgacacagagccctagcagcctgtctgccagcgtgggagacagagtgaccatcacatgcaaggccagcgaccacatcaacaactggctggcctggtatcagcagaagcctggacaggcccctaagctgctgatctacggcgctaccacactggaaacaggcgtgcccagcagattttctggcagcggctctggcaccgactacaccctgacaatatccagcctccagcctgaggacttcgccacctactactgtcagcagagctggaacaccccttggacattcggccagggcaccaagctggaaatcaagagaggcggaggcggaagtggaggcggaggatctggcggcggaggctctcaagttcagcttcaacagcctggcgctgagctggtcaaacctggcgcttctgtgaagatgagctgcaaagccagcggctacgccttcaacagctactggatcaactggatgaagcagaaacccggccagggactcgaatggatcggccaaatctatcccggcgacggcgacaccaactacaacggcaagttcaagggcagagccacactgaccgccgatacctctagcagcacagcctacatgcagctgagcagcctgaccagcgaagatagcgccgtgtacttctgtgcccggtccatcacaacagtcgtgggctgcgctatggactattggggccagggaacaagcgtgaccgtgtctagtacgcgtgcaagaagtgaagatcgctactctctcgagggaggcagctggagccaccctcagtttgaaaaagactacaaagacgatgacgataagggatcagattacaaggatgatgatgacaaggggtcagattataaagacgacgatgataaagggagcgactacaaggacgacgatgacaaggcctggtcccatccccagttcgagaaacaccatcaccaccaccatcatcacactagtggctccggcgagggcagaggaagtctactaacctgcggagatgtggaagaaaatcctggcccacatatgaccgagtacaagcccacggtgcgcctcgccacccgcgacgacgtccccagggccgtacgcaccctcgccgccgcgttcgccgactaccccgccacgcgccacaccgtcgatccggaccgccacatcgagcgggtcaccgagctgcaagaactcttcctcacgcgcgtcgggctcgacatcggcaaggtgtgggtcgcggacgacggcgccgcggtggcggtctggaccacgccggagagcgtcgaagcgggggcggtgttcgccgagatcggcccgcgcatggccgagttgagcggttcccggctggccgcgcagcaacagatggaaggcctcctggcgccgcaccggcccaaggagcccgcgtggttcctggccaccgtcggcgtctcgcccgaccaccagggcaagggtctgggcagcgccgtcgtgctccccggagtggaggcggccgagcgcgccggggtgcccgccttcctggagacctccgcgccccgcaacctccccttctacgagcggctcggcttcaccgtcaccgccgacgtcgaggtgcccgaaggaccgcgcacctggtgcatgacccgcaagcccggtgcctga

SEQ ID NO: 5118 - DNA, 1701 bp, synthetic construct
  source 1..1701: mol_type = other DNA
atggccttaccagtgaccgccttgctcctgccgctggccttgctgctccacgccgccaggccggacatccagatgacacagagccctagcagcctgtctgccagcgtgggagacagagtgaccatcacatgcaaggccagcgaccacatcaacaactggctggcctggtatcagcagaagcctggacaggcccctaagctgctgatctacggcgctaccacactggaaacaggcgtgcccagcagattttctggcagcggctctggcaccgactacaccctgacaatatccagcctccagcctgaggacttcgccacctactactgtcagcagagctggaacaccccttggacattcggccagggcaccaagctggaaatcaagagaggcggaggcggaagtggaggcggaggatctggcggcggaggctctcaagttcagcttcaacagcctggcgctgagctggtcaaacctggcgcttctgtgaagatgagctgcaaagccagcggctacgccttcaacagctactggatcaactggatgaagcagaaacccggccagggactcgaatggatcggccaaatctatcccggcgacggcgacaccaactacaacggcaagttcaagggcagagccacactgaccgccgatacctctagcagcacagcctacatgcagctgagcagcctgaccagcgaagatagcgccgtgtacttctgtgcccggtccatcacaacagtcgtgggctgcgctatggactattggggccagggaacaagcgtgaccgtgtctagtacgcgtgcaagaagtgaagatcgccgaaggctcgagggaggcagctggagccaccctcagtttgaaaaagactacaaagacgatgacgataagggatcagattacaaggatgatgatgacaaggggtcagattataaagacgacgatgataaagggagcgactacaaggacgacgatgacaaggcctggtcccatccccagttcgagaaacaccatcaccaccaccatcatcacactagtggctccggcgagggcagaggaagtctactaacctgcggagatgtggaagaaaatcctggcccacatatgaccgagtacaagcccacggtgcgcctcgccacccgcgacgacgtccccagggccgtacgcaccctcgccgccgcgttcgccgactaccccgccacgcgccacaccgtcgatccggaccgccacatcgagcgggtcaccgagctgcaagaactcttcctcacgcgcgtcgggctcgacatcggcaaggtgtgggtcgcggacgacggcgccgcggtggcggtctggaccacgccggagagcgtcgaagcgggggcggtgttcgccgagatcggcccgcgcatggccgagttgagcggttcccggctggccgcgcagcaacagatggaaggcctcctggcgccgcaccggcccaaggagcccgcgtggttcctggccaccgtcggcgtctcgcccgaccaccagggcaagggtctgggcagcgccgtcgtgctccccggagtggaggcggccgagcgcgccggggtgcccgccttcctggagacctccgcgccccgcaacctccccttctacgagcggctcggcttcaccgtcaccgccgacgtcgaggtgcccgaaggaccgcgcacctggtgcatgacccgcaagcccggtgcctga

SEQ ID NO: 5119 - DNA, 1701 bp, synthetic construct
  source 1..1701: mol_type = other DNA
atggccttaccagtgaccgccttgctcctgccgctggccttgctgctccacgccgccaggccggacatccagatgacacagagccctagcagcctgtctgccagcgtgggagacagagtgaccatcacatgcaaggccagcgaccacatcaacaactggctggcctggtatcagcagaagcctggacaggcccctaagctgctgatctacggcgctaccacactggaaacaggcgtgcccagcagattttctggcagcggctctggcaccgactacaccctgacaatatccagcctccagcctgaggacttcgccacctactactgtcagcagagctggaacaccccttggacattcggccagggcaccaagctggaaatcaagagaggcggaggcggaagtggaggcggaggatctggcggcggaggctctcaagttcagcttcaacagcctggcgctgagctggtcaaacctggcgcttctgtgaagatgagctgcaaagccagcggctacgccttcaacagctactggatcaactggatgaagcagaaacccggccagggactcgaatggatcggccaaatctatcccggcgacggcgacaccaactacaacggcaagttcaagggcagagccacactgaccgccgatacctctagcagcacagcctacatgcagctgagcagcctgaccagcgaagatagcgccgtgtacttctgtgcccggtccatcacaacagtcgtgggctgcgctatggactattggggccagggaacaagcgtgaccgtgtctagtacgcgtgcaagaagtgaagatcgctactttctcgagggaggcagctggagccaccctcagtttgaaaaagactacaaagacgatgacgataagggatcagattacaaggatgatgatgacaaggggtcagattataaagacgacgatgataaagggagcgactacaaggacgacgatgacaaggcctggtcccatccccagttcgagaaacaccatcaccaccaccatcatcacactagtggctccggcgagggcagaggaagtctactaacctgcggagatgtggaagaaaatcctggcccacatatgaccgagtacaagcccacggtgcgcctcgccacccgcgacgacgtccccagggccgtacgcaccctcgccgccgcgttcgccgactaccccgccacgcgccacaccgtcgatccggaccgccacatcgagcgggtcaccgagctgcaagaactcttcctcacgcgcgtcgggctcgacatcggcaaggtgtgggtcgcggacgacggcgccgcggtggcggtctggaccacgccggagagcgtcgaagcgggggcggtgttcgccgagatcggcccgcgcatggccgagttgagcggttcccggctggccgcgcagcaacagatggaaggcctcctggcgccgcaccggcccaaggagcccgcgtggttcctggccaccgtcggcgtctcgcccgaccaccagggcaagggtctgggcagcgccgtcgtgctccccggagtggaggcggccgagcgcgccggggtgcccgccttcctggagacctccgcgccccgcaacctccccttctacgagcggctcggcttcaccgtcaccgccgacgtcgaggtgcccgaaggaccgcgcacctggtgcatgacccgcaagcccggtgcctga

SEQ ID NO: 5120 - DNA, 1701 bp, synthetic construct
  source 1..1701: mol_type = other DNA
atggccttaccagtgaccgccttgctcctgccgctggccttgctgctccacgccgccaggccggacatccagatgacacagagccctagcagcctgtctgccagcgtgggagacagagtgaccatcacatgcaaggccagcgaccacatcaacaactggctggcctggtatcagcagaagcctggacaggcccctaagctgctgatctacggcgctaccacactggaaacaggcgtgcccagcagattttctggcagcggctctggcaccgactacaccctgacaatatccagcctccagcctgaggacttcgccacctactactgtcagcagagctggaacaccccttggacattcggccagggcaccaagctggaaatcaagagaggcggaggcggaagtggaggcggaggatctggcggcggaggctctcaagttcagcttcaacagcctggcgctgagctggtcaaacctggcgcttctgtgaagatgagctgcaaagccagcggctacgccttcaacagctactggatcaactggatgaagcagaaacccggccagggactcgaatggatcggccaaatctatcccggcgacggcgacaccaactacaacggcaagttcaagggcagagccacactgaccgccgatacctctagcagcacagcctacatgcagctgagcagcctgaccagcgaagatagcgccgtgtacttctgtgcccggtccatcacaacagtcgtgggctgcgctatggactattggggccagggaacaagcgtgaccgtgtctagtacgcgtgcaagaagtgaagatcgctactcgctcgagggaggcagctggagccaccctcagtttgaaaaagactacaaagacgatgacgataagggatcagattacaaggatgatgatgacaaggggtcagattataaagacgacgatgataaagggagcgactacaaggacgacgatgacaaggcctggtcccatccccagttcgagaaacaccatcaccaccaccatcatcacactagtggctccggcgagggcagaggaagtctactaacctgcggagatgtggaagaaaatcctggcccacatatgaccgagtacaagcccacggtgcgcctcgccacccgcgacgacgtccccagggccgtacgcaccctcgccgccgcgttcgccgactaccccgccacgcgccacaccgtcgatccggaccgccacatcgagcgggtcaccgagctgcaagaactcttcctcacgcgcgtcgggctcgacatcggcaaggtgtgggtcgcggacgacggcgccgcggtggcggtctggaccacgccggagagcgtcgaagcgggggcggtgttcgccgagatcggcccgcgcatggccgagttgagcggttcccggctggccgcgcagcaacagatggaaggcctcctggcgccgcaccggcccaaggagcccgcgtggttcctggccaccgtcggcgtctcgcccgaccaccagggcaagggtctgggcagcgccgtcgtgctccccggagtggaggcggccgagcgcgccggggtgcccgccttcctggagacctccgcgccccgcaacctccccttctacgagcggctcggcttcaccgtcaccgccgacgtcgaggtgcccgaaggaccgcgcacctggtgcatgacccgcaagcccggtgcctga

(The sequence listing continues in the following parts.)
